United States Patent Application Publication US 2008/0114160 A1 - sequence listing, part 14

SEQ ID NO: 5608 - DNA, 38678 bp, Oryza sativa
atctcttagatcccgttatacaactgtaacgtacgcacatatataaatggtctatctgatttttgataaaaatatgtcaaatggtaattatagtataaatttagtatatatatatatatataactagtgtaattacatctgtaatttaggaacttatattataaatactttaaaactatatatgtaatttagaaatttatatcataataaatacaactaatttagtgacttaagtaaacacatactacaaattttcaatgaaaaatatgacgacacagttattagcaaatctgtaataaaaatgcgaaaacgagacgggccgcatgggccatcaaccatcatctcgtccagccaaccggcccagtccagcaattccactcccccaccaccgccatcctcccccccgccgcctccacccgccggcgtccacctccatctcctcctccatcaccgccaccgccgccatccatacgggctctcccgctcggctcggctactccaccaccggcaacgctccccgtgccgcatccatccccccccctccaagcttccagtcgcaggagagaaggcggccgccggagtaggcacacgcaacaagcaggtaagctacctcgtgctcgatcgttcggcttgcccttttagccttgggattcgtctggatttgggatctagatcgaatcgtttctcggcttgtgcactacggtttttgcgagcaattttgaatttggtgcgcgaccgattccgcctctaacccttgttcacctcgtagcttccagtaggtttccctcaccggcggcggcggcggcggaggcggcgagaagccggccatggcgacgaagcagcaggacgcttcgacgtccggcgcggccatgtccatgaaggagtacctcaagaggtaccaatccgacgacgcgcagggcaaggccaagaagaagaagaagaagaagcccaagcccgcggccgccgtgggcggaggtgtgcttatcgtcgacgaggaccccacgtggcacaagcccgtccagatcgaggaggagcccgcgtcgtccggtacgcgatagccttcaaaccctagctttgatttccccccgtggtttggtcttgttcttcgatctggcgtgcagcgtgctggatttgattggaattgtgattggttggttgcaggggatgagagaccgttggtggacgaggacatcgaggtcaagcggatgcgccgcctggaggcgattcgcgcggcgcggccgtacaatgctatcgctgaggacggaagcgggtgggtcaccgtggccgcccccgaggactccgatggtggtttaaccggtcgccgccgcagaaatgacacgccctcaccggagcgcgggggtgctggaaggaaggatctgtctcctccgcggcggaggcagcggcaggatacgccctcgccggacccgagagatgctgcgggtaaggatctgtcgccgccgaggcagaggcgaaggcggcaagacacgccgtcaccaaagggtagtgaggtagctggggggcatgatgatttgtcaccaccgcggaagtctaggcagcaacgagacccctctcctccacgcaggctctctcgccatgactccaaggaatcccaggacatttcaccaccacgaaggcgtaccaggcatgactcagaggagccacaggacctctctccaccacgccggaaggggcggcatgattctgaagaacccaaagacctcttgccaccatggaggcgcgtgaggcatgattctgaggaacccaaagacctctcgccaccacggaggcgcacgagacatgattcagaagagcccgaagacctctctcccccacgcagacggacgcggcacgactctcatgaacccaaggacaaattgccaccactgaaaaggcaggctttgggtgatggggacatttcacctccaaggaagggtaggaaggaagtggctccgaaggaggtgaggaaagctgggttgatgacagcagaggaagttaaagaggacatcaggaagattaaggaggatgagaggctcaagtgagtagtacttcacatcttgcagcaaagatgcttactccttttggtcagatttgtaataatgtttatgtttcatctggataggtttgctgcacaggatccctcagtgattgggaaaggggcaaaagcagtattccgagataaacaaggtatgcactacacacagcttatttctgctgttttttcagttatttacttatatacccatgctactttttgtgctaacagcactttctgatgctttccaggaaaacgaataagtgaagaagatatgaggaaggcaaaggaagacacgaaaccaaaggtaaataaatgcttttgaattatgagaattcaattgttttctgtttaaatgttctatggctcatggaagttcaaatatgcttcgggttgaacagaatcaacagatatagattagcggacatgttttgtgcaaattatttacccagacattgctttgatcgggagaattttgttgcaaaactatagaaattattctctaagggacctgttgtttcctacattttcgagcacctcatatgcatttttttttggataagaaacaacatttgttccttttgtcgctatgttctatgcacaagttttaccatggagctgtcagaatagaagatttacaacgtgtggggtccctaaagatacaggagctaagaaatatcaacagctaccaccaagtactaataaacattacagcaaagaatgccttattactgccattaaactttctcactggttgtcactgtcttctatccaaaagaatgctctatttaaatttgtctttacaattttgttatcagcagggttaaaagattaccatagaaaatgggaagtttttttttttttttttgggggtgggggtggggggggggggtgttctctatgggcatttgattcatactgcaagcttgtccagacaaatccatgaaagataatagttggacttgggagaaatatatgattatttttatcagaatcagatcactttttgcagaagtagcatggaacagattgcatcaaatgatgattgaattattccttcttcatgactcctttggactcttttcaacatatgatctctgtattgggtgctgccatttgtagctaatgactgatgttctacatggttgcaggaaatacatatagaatggggtaaagggttggtgcagaagcgagaagctgaggctagattacaggagcttgaatctgaaaagagtaagccatttgcacggacaaggtatttaatacaagttttgttgccttaatattcagattttgcctactcgatagcgttgttcttgcttaattgccttgaacaaactagtgatgttgagttgaaaatctccctccctctcctcactgtatctctgtgtgtgtgtgtgtgtgtgtgtgtgtgtgtttattaaatatgtttatttctttgtcaactgtgaaggtgtggaaacattcattgcaaatatttataatttgaacttgttttgcatgtagggatgatcctgagctcgacaccatgctaaaaaacagaatccggtggggtgatcctatggctcatcttgtcaaggtagctgccacttttgattttgagtggttcagttgaacccttgaacaccttcacctggctaattgctgatttatgtgtacatatgttgcagaggaatgatacagacctccttctggaggacttgggagatgatgaaaagatgaaagaatctggcttcattgttccccaaaatatacctagtcacagctggctgaagcgtggtgtagatcctcctccaaaccgctacggcataaagcctggtcgtcattgggacggagtggatcgcagcaatggtatgtgctttccaaattcattcccaattttcttttcttgttatttaacatcatgttgcttggaatgacaaaaagattagcttaccgtttactccctccattccaaattgatctacatatttcataggtacaccaagaccaagaaaaactaataactcactcatactatatttactctagcaacaaactcgatgcatgtaccatccccactatttcctagccaatagtaaatcaagatattgcatgtgggttataaatacttatgtgcatagatgcatgcatcaatgtccatttactccaatgcacaaataacgaatagatttaatgaatgaacacaaatatgatgatcaattaggaataatctaaaaaaaaactatatgtagatcaatttggaatggagggagtatcacacaatggataagtcaacaactgcagtgacaacctgataaaaaactgttgaaataatgcggattaacagtgaagctgtttgttacggtctctttttttatcttattgaatagacccagcagaatgtccattatccaatttcaagcaagatatatttttctctaccctaatattcaaaaccagagggttgtgtctgcaaacgattgggtggacctggttttataataggggggaaggctgcgcaagggaatagaaacttgaaacatgttcacgttctcttttcttggtccatcatgtcctcgcagtttcactatgttctctggtagattggtactatacatgaatttggacaacttgtgcaactttctggccaatattagtggttcaggcatcagattgtgtccattagaagtttgttttgcatcttgtagtctggtctcttatcacttacaaagcattcccgtgatttcacaggatttgagaaggatatgtttaagctgaagaacgagaagcaagcaacggagcaagaggcctacctttggtctgtcgcagatatgtgagcatagctgttcttcaaagaagccaaggtagcttgtgtgccttgttaaacgaagtagtatactgtaaaatgcttggaaggaaggaagcacggcctctcggcgtagcacagcgtgcttgaaaactcaaatgtagaatcaaacttgttgtgcattggttgaaatctttttggcatttttctctttgccactcttaaaaacattttgtaacatcgatgaacatctttactcggaattagaagctgatcttttatagaaaaaatagttctgaaatatgtttctagtcatgtttaattacagagatacagttttcattaacctgattgtggatggcctgcattcttctggtcagcttttgcagtcaagcagacggcaaatacacaaatttggcaaagacaatgtggaaaatgttgaagcatatttgtaaccaccacaatgacttctctggatgcaaacaaagccaaacaatctgtaaagaacagcaattgaaggtaattaaaccgtttgtgttagaaacggacgcgcattaatcatgcaaccaacaaattgcccctggtatcctggaaaccatggcctgcagccactggttttatcatagctacatacaggcctgccagtctcccacaactttgctccttatccactcaattaatccaatccaggagtctgaatcattgattaaaaaaagggtcatggttattccaaccatgtggctgggaactaattaagaaagccaacatgcaacaagtttccaggatgcatgcatcatatcaggcgatttcttatagttcattactcactcagattcttaataactgacaattttaacttctccatgtgaaatttgaccattaactgcccttatattgttagatcaaagtgaagaaaagttttatatttatattttgggcatacccactttaagaacatggtatcatttccagtatttgaagtacttaaaaatttaaaagtgaatagtatttttttttaaaaaaaaacataaactgattttaaaacataaactgagatactacctcagcaaatcagcatatagtatataagcaaagtgggaatacatccagttttacagagaggtcccttgagaatgagcaaattacacataagttctgaaaaatgcaaaggattcaacaacgagaagaaaaagcaatcaggtccttgactttgcatctcttgcaactgcaacagccagaactcagataacaacgataggagcagaaaaaccatggcaagcggcaaaagatgaaacccagttgcgaacccaaatgggacctccgaaggatggaggttaaagcaacctagacaagtagagatacacttcagttgcccttttaaaccatcgtcgtagtcgaggaagaagaccgtcgctagagcaggagggtcgccggagaaggaacaggtggctgacgcaggagttgaactgactcattcccatatgccttgtttgagctaacaagcctcttatttaagctcacctttaggtcttgttggagaataacaatagtagcgaagaccaccaccaacatcgcccaaagaggtccgaaggaagaggttcatcgatggcttgacgacgacctcgagctgatcatgaaaagggaaactaaaggattaacctgaaaacaagatgaacccgataaaatctaaaactaaccctactagtggatgagagttggaccccctcccacctcactgacgaccggaaagtcgctgaagatggaagggaaggggtcagacaaggaggaacgcgtgttgatcaaaagtgaatagtgcccaatatctttattataaaactgaagaagtattactgcctccttacctataatatacttataagatttgataaatctcttatacccaaatctagaaagcattgcacattcctactctgaacctgtgaccgttgtgcaggatgaaagcagggcaggatggcacccacgcggcgccggccatggaatctttagtgtttgacagcatgtggtttaagtccaacaacatagattagtaaaactaattttggacggctgcagttaaccaagtgtcggtcggtggctctgtctcgtggaccaatcatttcattagcataacaggcgatttatgtctgatccgtgagtccttttagcagtccagactctagggtgacagtacaatacggagttaactggtaaaaatggaaaaggatacaaaatatttctacgatttattgtccagatgttgtctaactcgaagaaaacaaaatatagtgtaaggcttacattttcagcattagcaaaataacttataacaatagatttaagcaatacggtataagaaactttttttttgagaaaatatatttttaaagacgtggagtaaataatccggtgaagtgtttcagtgacaaaaggggcgaaaaatgccgttctctatagaaaaaaacgtaaggggagaaaaaaaactcagaaaataattatacaatcaatcaaatactgaaatttaaaattggtatgccctgtttatgatttgtgcacctgaaaaacaaacaaaaaaacagaagcatagcgccaaatttagcagatgagatgagtgacataagcagatatctccagcctccagtttcttcagaaaaacggcaaaaaccatcgcctccccgcctcctgtttcgcccacgaaaactctatataaactccactcttcttgcacttctcaatccaattccatctcgatcatctcctcagctactactgcttcatcgaatcgtcgaagcatcaacagctatagatcaagttcgagaggttgattcagagaggcattgcaaattagcaatggcgagcgcggcggcggcggtggcggcgaaggcgtggtggacggcggcgatgagcgtgggcgcggtggaggggctcaaggaccagtcgggcctctgccgctggaactacgcgctccggtcgctgcacggcgccgccatggacaccctgatgctgcaggtgcatggcggcgccggcgcctcctcgccggcggcggcgatggcggcggagaggccggaggaggaggggatgaggagggtgatgtacctcagctgctgctggggccctagctaagattgtcatttagattgatactatcctgcttcttttgctgcttgatttcgtaggtagttttgaacttttgattacttgggaatctgaagctggctttgcaagcatcaagatgctgattaagtgattcgtgtctgtaaatgttccacgatgatgatgatgatgatgataaattgagtcgcaaattgaaaggaaacaaaaaaaaatattcctctcatgtcgtgaattttaatttagtatatatccttgctgagatgagagaagcgttaaatctccaaaactactgctgttttttttttttggcatatttaaactgtgatctctgcttgggtcgaaatgagaatggtggaacggcatttgaaagaaaaatttgttttgttaggagatagtaataaatacttcctccgttttacaatgtaagtcattctagtatttttctatatttatattgatgttaatgaatctatatatatatatatatatttatgtctagattcattaatatcaatataaatgtgagaaatgttagaatgacttacattatgaaacgaagagagtaacatttaagtttctactacaatattttgccacttactcttaatataaagatagcaatacttttgcatattaaaaaaaaaatattttgccacttactacaaagtaagtatccaaattaaagcctcttgtttataccacctcattatccaaaagaattttatcggctgctccgtctcgtttcagtctttcaaagtagtaaaatgcatttatttaatggatcggccataattatggcgatagattttttccacaaacgcagtcgaattttcaaccttaggattggcatgaagattcgtgctcacggggcatcagcacacacgctttgctgtattggttctgacacggcgtagatgcatactgatatgctttttaaactttgttgttgttgtaaattatatatttatataaatttacataatagttacacctcactaatacactatttacatatgtaattttaggatttacatatgtaattttaagacttacatatataattttggggcttacattgtaaatacactaaaattacatatgtaatttagtgacttacaatgtaaacacatgccgactatattttgtgaaaaatatgacgccataaatatagctagtccctttatttaataggaaacatagcactgattatctcgtttaatgatttcttgagcaataagcatttcttccatttatacatattcttgtccagcaagttgcaggatgcgatcgactgcataaatcaccatgaccttcaattcagagattttttttttgtatcaccatccaaaaacattacacattggagtggtgaatccatctcagaataaaaattcagtaagtcctctgatcattttgctgctcgatcttctactcctcccctctaatctttcagctcaaaaaacacaggaaaaaaaaagattcagcctttcagatcaaacactcaaaaaacaaaaaatattcagcctttcagatcaaaaaccaaaaaagtttcagtgtttcagctcaaaaaacacaggaaaaaagaagattcagcctttcagatcagaaactaaaaaagtttcagtctttcagatgcagtggaagcaggagaagatagatttggcgaggtgagcaagcagcataaatctctgaatatctgatcagcaatcaatctcccagatacagagcgggatgagcctggcctacgtgagcaggctgtgcgccagggcggtgcaggccgccgtgcgggcggagcagccggccacgacgcgccgccggccgccgcacgccgggcggccgccacctccctcctccggcggtggatcgccggccgaggtggcgccggcggcgaagtcggtggcggaggagaaggcgaggaggttgaggaggagggcggagaaggacgagaaggtgatgcatctcgtctgctggggaccaagctagtgcaaaacctgaagaatgcttagtttcagttatttctgcatatgcagtttctgaagatcaattttccttttcttgcctctgcgattaaaaactacagagcttggttgtggccaggaagaccaggattagttttagactgtgtttatgtagatcctgggaattttgtttaattacatgtatatatgttgggctgttggccagattagtgcagagatctgaagaatgttcagacagttctgcatatgcacttgtccagttcaagcagaaggtagattcttgaaagattggctgcaaaaataatccgagatttagtatttaaaacaaggcaatctttagtcgcaactcgcaaatgtgatgtgttgactgctattccctgatcttacattttactgatcaatactacatatattttattgtcaggttataacatgctgcacttcaaggcttcaagctgagcaaactcagtttcaaagcagcatagttgttctggcaagccacaatccgcattttttggacttctgttcctgtaaatcctaccacagcttttggtgaaatgtatgtaaatcctactagaatttttggtgaaatgtatgtatgcatgctggccaagctagtggagtctggagagccctgaagaatgttcagttctgcttctgcttgtgcatatgcacttgtgctgcagtttctgaagaaaggtagatccttgaaacattggatacagccattagtcgatctatgatttcgaataaaagatccttgaaacttcttttgtcgtttgaaaagttaaaagcgcgccacagttcaagcacatcaaactcaggttctgagtttcgcaaaatttgtcaatgaaacacatcatattttcaggcaagaactggagatgaaaaaactaaaaaccttcacatcacatgctttttccgttggcaaaaatattcacgtctttgatccatggagatcgaggaaggcaggaagaaagaaatcaagaaaacaaaaatcacaagcaaagcccaagaaaatggacatggaaatggatgtggcctcaggagtttgggccccagaaggagatgaacatgaacgcccgcagcgactcctcctccctcttcctcctcctcctccgatcatcctcctcctcctccgccgcattcgccgccctcatcgcctgcctcgacgacagcgagccccccgccgcagccgccgccctatccttcgcgttccacgtcgtggcggcgcctccgtctcgcgttttccctgccggcgccggcgccggcgatggagccacccgagcgccgcccacgcgacccgccaacctcacgctcatcgccgccgccgctaagctcttcgcatttctcggtgaagtgaagggagaggaaggggccgcggttgccgtacttgtaggcggcgcggtgcggtgggcggcgccgctggttacgccggcgaaacggcgggccaaagctcaaacctgcccgcggttttctccccacgccgctagctgacgtggcccaaatgaatggcccagattttctggaaattgtcaccctcattgtttggctgaatttttttgaaatattactatcttaatggaaaatcgcaaaaatggtggccgttggagatttttcaaagagtaaattgcacccacagtacaacaacttggtaggtgagtgcgatatagtgcaagaacttgagaattaaacgtacgaatgcaacacttcacaagtaggtgcattttagtaaaagaacttgacaatttagtattttggtgcatcaactaagctaagcatatgctaggtgagtttttctcacgatatcaatatgccattacatagcaatcatacggatattaccttgtaatattgaattttatctttaagaattatactgcatatccaatttataaccaattacctttaagaatttttgttttcttcacattcctaaatctcaaccgaaatataataatttctacatctagtttaattgacttttagttattagttattagaataaaaatataaatatgcttatatacaaatccacgctagtatattatcaaaataagaacttaaaaattgaatatgcataaaaaagtgctccaaataattaagttgtcgcataacttcttaacttattgtatcaaaatcgtacatatcttgcaagttgttgcatttatgcaatcacttataaagtttttttagctaaactgcacatacctgcgaagttgatgcactagaacgctcgtttctctagttcttgcaccaaattgcacccacctgccaagttgatacaccgtgggtgcaatttactctttttcaaaataggggcctatcgaagtgcggtagttcgacaggaccctatcgaacggccgtgtagcaacaggcgggtgctctcgaacggcgggaggttgacagaaccaatttaaccacgggaattcgactgggcccacagtgggctttcgaaatgtggcttcgtaaagtggatcgatacggcgagagtaacttccattggtgcaaggataacacaacctgagatgaccacacaattattcaagcattgatggagtatgagcgccaagtgtagtcaaacttacactggagatccaatccattatgtctacctgaatggtttgagcatccaaaatgcggttgtagagatcgctgccaaattgctacatccttttcacaagagacatttggaaggtgatattccgtctgtcccaacatagacaacaacttagttgtatgtcattgcttaattttttattttcatttttgctcgcgtttccataatgcaatacatatcccattctataatttgatttattcctcaggagaacccaaggatgtgtggattcactttgtagatcgacatggtcaacccgacgtatgatggcggaagagtaactgaagctaaaacgcaagtagggataggagaataaaggagcacgaagttgcggcaaagccatgaaaccaaaaatggcaatgaaaataataaagaatttgtatataaacaatacctcattaatccaaatattttaagaaacaaataaaaactacaactagcaaagaacaataaaaactaccgcagttcgacaggcccctattttagtgaaaaatcttcgatgaccaccatttttgcgatttttcattaaaataataatatttcccaaaaaaattcttgtttctcttactcgtatgattaatattcgaatcgcttaatatcaaataaaaaaaatcatttctgagtaaagtttctttatatatgttattagcaattaaaagcagatagtgtaaaataaactacaatgaaaaaacaaaaaacaaaattcaaaattgagttctaaaatttaaattttggcttataacttactccctccatcccaaattatagggcgtcatctttttatggaaaattaaactcagtaatttttttactaataataatataaaccatatatatgctaagtattatgcgtgttatatcactaaattcacatttcaatgtactttcatgtgatagtaacttcatatttgttaaaaacataacatgaaataaatggattgtcaaagtatgttactgaatatcgtgtaaaaaaatataggccttatacattggaaccggggggggggggatataaacataagcatgagtcattatcttctcaccacatttgaatttgaacacatttcaaatggtacacaaatatacaatctagaaaaataaatatcaacagtttaataactttattttcttcccaaaataacacaaatttctgctgaacaataaacaagaaatcagaaatgttaccaacttgggttctactatagatgttccaaacctatggtctatacattccaaattttgcagtgaacgaattactaaattccactcttataatgttgaaggaatcgaagacaaaaatcactttactgaagaagattatgaacatcaagaatgcaacctagaaaagataccaattctgagttcagctgaggtgagcaatgtcaacctcgtcagggatcttgaatgtatctgcggcaccaaacttcctcctgccatcctcccactcatcttcgtcctccatgctgtccttgtcgtcgtcgttgttgccatggccgctgtgttgtgcgtgggaggattggtcgtcatggacgctcttcgacttgcagggctcgttggcaagcatggtgacctgaccaaggtgggagatctccacaacaacggtgtcgtcatcttttgggaggggctgcttccatggctccccatcgatcctcatgaaggtgtgctctgctgcgcctttgtggaactcgaaacggatcctttgggcctgattttgaaggatgtccacataagcttgaatggagaggactatactagttctagttcttgacgtagaaaattatgactacggcacaatggggaagaagtggttttcagttctgggatgtcaaatggacaaaatggaagcacttttacatatacttcatacctgcgcaaggcgggtaccatgtccatttggggccagcaagacaagtccgtgccaggcatcacggaatccaacaacctcaataagtctatcatcgacaaaaggtgccgtcagctccctctgtagattttgttttttcaagacagaggtttgattattagttcctctgaagatttccagtaaataatctgtgaatagctacaatgcgaaattcacgtgttgaatgacaagcgtagtgcatgtaaactcacctcttctactttccttgtgccaggtgtgccccaaggattcagacctccagagaaactaggcaggttgagacagacgattgatcgaatgctgcaagaggcagtagtacacaggtcacaactttgctcatagattatggtagcatcctccatcaacaagcagaacataaatcagaaatgttgccaacatgtgcaagcaagaaatccaaggaacatattgtaacttgcaaggaagcaaaactgaaacagtatatccgagtttttcttctcttctgttttcttttcttttcgattcagttctttttacagctttcaaagtaatgtatactgcttccaatcttaatagaaaagatacgcaagccttttgcgtatcccaaaaaagaaacagtataagcaaaatattccaagtgcaaatgagaagctttcttgtatcatatcatactagtaggctcaaataacagtacacgggggaaaaaataattcatagtacaacaaaaggaatgaacaatgtttacctgtggtgaatgttaagttcttgccagtggctaccggctcttttcatgattttcacacttgcaagttgagcaatattcctggaaatgaagcactcaaccttacaaccaaaacgaaaagaaggaaacaacttgaacgcacacaaattgattacaccaaatttcaaatttaacattgccaagtacaggtttaagctttgacaataaattttgtggactgaatctataaactgcaaggatggtgctaatatgaaggaacaaaaaagggcacaaatgaattgattggtgtagtttgtaaatgcaatgtacattgaacacccccaaaaatgctggagtgggtatactccctataacttctctctccacattactcacagatatttataggagttaggtggtataatattaaattagagacaccttgactgcaaagataacacaatacaagtatacaactagcacaacaggtataccatgaaatatgttaatgataaatcaacaagctaccttgaagatggatgacttaaagaagcacaaaaccatccttgtttaagtccaaccttagcatatgtaccctgtatagattaaatggattaacacctggcaaagttaagtcattcagccagattgaaattgactagagggacatttatctaaatcaatatagaagtaaatttcacatatttacaggtatattagctatcaaggattacatatttaggaatcaatttgacagaactagagatgtaagtgcaatattttgtaacaactacagttaagaattccagtaacatgcaatgggtattggtcccattcgacacttcctcacttctcatagctcataaaagttctgtatagtaagatcccacaggaagacataagaaatgggtgttgagcacatagagaatctaaataaggtcaattgtacgtctcaagtctctgcctgccaaataaagaggcagttcagttggaacaattttaaacttacgagtaattcagaatctgcagcacagcgaaacagtacaaaagaaatcatcacaatgcacaataataagaatataatatacctgatttgtcagctggtttttgaatttctctggatttttcttcctttcagaatgaaatccgtaagaaatttctgcatccatacctgcaaagatcatcacgtatgaaaatttgaatttctgagtcattgaatcaatatatgctctaggttcttgaagaaacttgggatcttttttccaaatataataaactacgacagtagtgatcatgagtcccacagtacttgccgtacatggaaccagcaggtgcctgcatcttcatagcacaaactagcatgcaacatcaagttccacggtaaactagaaaccaaaccatcagactgtttagggtccataactggaagtggccatgaacagacaaagccttacccatactaaagtaattccaaaatcctccacggaatgtgtggtaaccttcctgaaggggaaaaaaaaagaccaattgaggaaatgaattaaattcaatgccacttgggtcttgacatataacaattttcgtcaacaagaaacatagtaacttagaaaaactggacagattgtcttaccatattgagggaatcactacttgacacacggtgaaatgcatgtaatgaatgaggcaactctaagggggcgattggatcacatggaccttcctttgtagctcgcatcctcaacatgatatgccagctgaaacattcatgtgcacattacattgtagtcttctgttgtgtttgaatgaggtataaaagggaaatcatgttttagactgggaggaaggacaaacagatttgaagaggtaattattcaactacttaaggttcattaaaagagttcagtattgattgattgcaagtttgggggtttatggcaaatattaaataagttaatcagccgcttaacccttatgagcaggatcaaggcaaaagtcaaagcttaaagtaaagtgatatctttatggcattacctatcaattttcatctcttttgcatgcctcactagcccaaggaatgattttactgactcttggtcagtacaaggattcttctttccctgcgatgtttaattcagcaaaagtatacaagaccatgatcaggaacaggttaaagttcaggcaagaatcatttaaaagatcatttaacacagaacaacttatacataatggactctagtttaagtacatcacttttgccacctcccttcaaaaactaattgacacaagaagatgatttgttaagtacacattaatttctgaccacttacccatccaaatgaaaatggaaggttgtttccggttcccagaggcacagtagcaattggaggagggtgtgaaagcttgagatcactgactaccccaagcagccagcttgccgtaccatcgccacctgcaacctaattgaaacctcttttaagtcaacagaaatggaaatggaaagccaaagagacttcctactctgcaaatctgcataatataacctcaaagcatcatcactcacaattattctgagagttctccaaatttgaacagcaagaatgtctccatccatcttgagcttctcaaggttgacattcaaacggtgcaacactttatccggagcctcttcggagacatcgaaaacctgaaaagaacacagcagccatcaacaactgatataacaaaagccacattcctttcctgacgccacaaggcaagaaaggaaatcacatttccaaacacgcagacgatatacctgcgcttcaccgagaagttcacggtaggttttgatcaggctgctcccgagctgaccaccagatccagaattgatgaacaccagcacggggcacgggggcgcatgatcaagaagcacccgctgcgcatccggcctcaggatgtaatccggaatgcggtaatccgtcagcggcccgcatggcttggatgatgaacccaccacagtatccatctccccttccatcctgctcctgcaaatcgattatgacacttcaattcccctaaaaagaacaccacaacaaatgccaccaccacaaattcaattccttctcctgagatgattcaggccaagaaacagtcgaatccaacacaccaaacccacaaacacccgtgtcgatttgtctcgcaacagatcataaatcgcaggaggccatggatgaaagggaaaaattcgaacttatcatccacaagagaagataaaaaaagaaaccgcctttggatcgttacccaggactggaaaaggaactacctttctcggccggtggcgcgggcgccagtgtcagatcgccggcggcggcggagggaggccgctgtcgccgggaaatgggtggctcgcgagcagaggcggaggcgggaggccgcgcggggatgagggaagaagaagagagagaaggagaagtgttcgctcttctccgcaggatgaggcgcgagtgattaataattagaggcaacccatgtaattagtgttaatctaatagtactcaattaaacccttgtaattagtgttaatcgttttgattcttttaaagtcaaacttaaaagaagtttgatcaagtacaaataaccgaatagacatgcaaccatagcaattgctcctagtaagcgaatagacacactgcttagatatgatcaatttgagaataactcaaaattcttgtaggataatcaaaatgagatgaaggaagtactaattaactaaacccatttaattagaatagttcgttttgatttttttaagtcaaatttcaagaattaataccattaaaaccaacaattaatatatttgaataatagatttgttttctgtcgaaaatatcgctatactttttataaatctaattaaacttaaaaatatacttagtagaaaaatcaagctacttatataatataaaacagagggaggatgaaattatttgctgcaattgctggccagatatgagacgaaatatgggccgttggattgcgcggattagtggctaaatccgtggatggacggcacatgttgggtcaacccaagtctgggctggacttagaatcatatagcaatttggtacagatattgctatctgaaacagtattgatgataaaattataaatttatttattgcataatgtcacatcagatgggtatgtgctgttatgagaatgtcaagtggcttgaatagttgaatgaggcttaaaggctgtcgccttttcgcatctgaagcgaagttgattggaagatagaattttgctaattattctgctggagtagtgcaaagtagtagttcacttaattaattgtacaaatctagctacttttgtctctaagattggggatgtatctggtacattgatggtctagacagtgtgttctaggcaggtaactatagaactccctccgtaccataatataggattttgagtttttgtttgcactgtttgaccgctcgtcttattcaaaaaattttagaattattatttatttttttttgacttactttattatccaaagtatttgaagcacaactttttattttttatattttcataaattttttgaataagacgagtggtcaaactctataggtaaaaactcaaaatcccttatattatgaaatttttttaataagacgagtggtcaaactctataaataaaaattcaaaatcctaatattatgagacggagggagtagtccacagcaaatagggtaatttagatacatggacgcattgcacgtatggtcttgtctcttgtacagtaggttgatcattttgaaaggtcaaactttgtctaatcaggctgaaactttgacagcttcatagtgtggttcatattttattctagaagtttcacgtagggtctattcatgtaactatcaaaatgaacattttcacaatttcggtacgttaataatattatcaaatttttgtaggataggctaaatatgttgttgttaaaaatctttagtcattaccagtattttagtaacaaactaaatgcatccatgtatctatcaattttatcaaaagagatggtatggtttaaaatgacaccaatctaaacaggcttatagttttgactttgatactatgtacttttataaattttgacaatttgaccctttgcaaaaactatttttacaaatgaaccgttgccaaaacttatttcaaatctgaccattttgctcaacgccaaatcgtgtggcgctaaacttagacacctcagcgccaaatagcatggcgctgaatgtacgttggcacgctgacttagtctcccattcaccgtggcacggcattcagcgccagctgacgtggcgctgaggtgtctaagttcagcgccacatgatttggcattgagcaaaagggtcagatttgaaataagtttagacagcggttcatttgtaaaaatagtttttgcaaagagtcaaattgtcaaaatttgtgatgtacttttgccatcgtcggtatgagatgttaattaccagtttaccactgtatttcaaaatcatattgtcttgtttgtttaatccctcccatagagaaatcgagggggatttgaagggaatttaatccacacgtattgtgatgtgaaattattccttctcaatactcttcaatccctctatcttagggattagacgaacaaatcttacctgagaaccaacggaaacaaacataacctttctattttcttagggatacttaggtgacaagataaaatacagatatataaaaaaccaacagaatgcatataggcacataagtaactttttaaaaatccataacctctctgttttagctaattctacctgcctttcgttgagaatcatctatctttgatggttagctaagtttgtaattgaaaaataattgattatgctgctatcgatgtaatttctagtagctatagagaagactatatatattacatctattacttttgcaaaccacatctccgcaacttgtatttctacttgtctcgaaattagtacatttcaaaactaagttatgtgtaacagttatgcagccaaagcatgccaccgtatgtttgttatgaatatgacatgtcgttaatgtaactagtacttagataatacactttcaaatgtcgttaatatcgtattattcttttgtttatttaataatacactttcaaataaggaaagcccttttttaaggtaccatggtaaatttatagtgtatagatccacctactgggatttaaagtatagttttcataattacaaacacccaagtatacaaagttactacttatgtgcctaaaaaagttccttaattaacacatcttaaaagtggtaaatacttaaatgtccccaatttaaataggttcatggagtgcctccttcgactaggccgatttagatcctcttgggccagggcaaccaccggtgagcccaataagattgccaagttcaccaagacaaagtctacctatgatcaaaacagaccaattattttaattttattctttggatttcttatctctattttccctcaccagctcctttgtttactccctaaaagggcctaaacccctaaaccaagggaatcaagcaacaataattggagctatatttttacaattcaaatgcaaacaacatttatacaataggcatgtaccatattgcaaaatgttaagcccaaatctggttatgaatacttgaattgtaccataccaatcatgcccaaatttgtttttcagtgcgcagattgaacttagtagtgcatgttagtggagtggcttataacattataatctatgttatcgatatttttcttaaaaaatcatggctatttacatgagatatctacatgcgcacttaagttgcaaaatgagctgcagatttgtagcaggtctcttgtggtcttctactcctgttctcaaaaatatactgatgtcgttttgacatgtctcgaagttaaaaattctaaaaccatgacatcaatatatttatagggggttgatgtatgaaaattccgtacagattcgcctccaaggaagtagcattccctctattttataaggacattcccaacccaagacactaaacatggtttccataaactccacatcattaagaaactagtactagacactactcttccaatgcaaacaccaatattccatacttaaatttaatgttacttatctcagatgatgtcttggatgttgcgtagaaactatgtctcatgcaagatatgatttccttctttttcctcatttattcaattgccacatcatttttcattctaagtgacagcttatttaatgctatggacaccatcctagtcattgggttgggaatgccctaatacatgatgcctctaaattttgacatacatttatcattcatcttatttaattttttgtgaaaatataaacaataaaatcatacttaaagtaaactttgttaaaaaaacaaatcacaataaaataaattattattattattattattattattattattaaagcgtatagtcaaaacatatttcttataaaatcaaccgcgtcaatattacaattttaaattcctattgatgcccagcacgatttatttttatgccggtgggagtagacgtcaaagaacaaactcactctgtcaagagctcatgccgtgcggtggatatctagtggcctacatttccctgttcccttgtgcaaagatcttttcagatcggcaactgatatggttcatatattttgcatggtccacattccctaggatttctgccctgcagcagcaaaggttgtggcaaatgttcccctcctctccattccatggccatggatggccctcccacccttcttctttcccttcaattcaattcaatgcatcctccctcctatggttggcagcaatggagagggaccaatttttttgcaaggactgtccttaggcagagtacaaccccttagaaccacatgatcgagtaacccgtgattgggccgtctctttttgaggatcaatctagaggcgcacgctattccctttgtacggatcagtttagtcgcgtactattctctttctacgaatcggttggtctggtttaattttgtttttagatctccaataatagggaggtattataattcatgtaatttttttaaaaaacaaacaagtctatatcaaatttcactattactgtaaaagcaaagtcgtcctctttccatccccttctcccaccgtgctcagtgcgtcttcgcttgcataaccactggatctaatattcatcaatcacccttatagtatatccctaattatatggacatgattggttctaacacatggacatgctactagtaataataaaagcgtgtaatttaagaatgacatgacttgaaaaatctgtggaaatagtatggcgtgtaaacgtacaccaataaacaggaagggtgtaattcgtggaaaatttctcaaaatacataactgtgtatcaaattaattatacatgcttttaaaatgagacgagaggttagccatgtgaaatgagaggtcttttaaaatgagaagagggtcaaatgataggacctattatccccttttccttcttgcacggtcctgagctcctattgacccaaacccacttatcttattctccaagtggatcatttccaagcaaattctaatctccagatcagtttcatcaagcatgtggcatgcatgatgtcccccttaccaaacgccaatggatctctactactttcacaccacaaagcaagcatgcaatgcatctttctttatataatttttattgtcctttttttctgtggtgagggatgtgtgataatgacatgggtgatgggggaagatcaggatgaagaatttgatgccctgaacaaggaaaaggaaaaggagacttagcctcaatgttattagcacttgtgtgttgctttcactgacctcataagagtttcaaccttgggcaaagtttttcagaagaggttacttatccatttcttccaccaagcaggatttttccatttaagaacacactgaaatcgaccacataaatatcctaacaagaatcccatcctaatcccacaaagcctacctggaattagagataagttcagtagaatatacatgtggcattttgtgcaaattgtgggtaacgtgtattctctttctggctccagtaaccatgagaactacagaaattcgacagccatcgaatttacagatttcaacacatttcagccaagattgtgatttctgaacaagtttgagactgaacatagggcacaatggaagcattcagacagtgaaaccatggaagaatggcactgcaaatgcaaacctatatcatttcttaagttagccagaacgcctcatccaaaaggacaaaaagggatttaaacacatgaaagtagtgggggcacatatacaagctccagcaagccgtcgcgattatgaatactaccgagttctgggatggccgcgtgataagtcgactctgcaagttgtcgacggaaaagatgtgaagatgtgtgtgctcggtggaggtttgatctttgcagtgatccacatctccccccaaatgcctggatacaccaaaagtgaccttctaatgtagttagcatcagcatctacatcattgtttcagttgcctcaggaaaagctgcataacaaaaaggataacatcagttactaccttgttaaaataaaacagcactcactaactgatcaaggttgcccaatttttgccgcaaaaaggagaacatggaaatctttcgacctagtgccaatcttaatacagatacatgcatagaccctttcaagttaaaaggttggaaagataagcactaaaaacaggactacaatgttcgacacgatccgatgccacttcgacaccgcactggctcacctgccatgtacatggcaatatactcaaactggatgaaggaaaagtagatttgcaatgctcttggaatctaaaagctagtttgctatcaatcaactacaacagtagtgggattgcagagcactccaagcatcatatgatggcgttcagcaagcaaggcaagcaaagctatctccttatgatgtaggcatatagccatctttttcagcagtagcaacttcatgacagtaaacctagaggttgttatcaacctctcactacaacttttacatcaaaaatttactcaccctttttttttccctttcttgctcacttcttgatattttcacatcatgcttgcactggtccataaaaaaaatcttgatattttcacatcatgcttgcaagaacactacatcatcgtgccattgttcgataagttgaatttttttttctcttgcttttatgaaattatggttgctaagcttaggaattcttgggaatagtaggattgtgaactcactcatttcgaccaacgaccgcattggagcaattcctcccctgcacgccgctcaccgactgcgccaaccccgaccggcggaaatccgagggcgatctcttcctatgccgggaggcaaggaatcggccgccgacgccaccgccgttccgggaggaggtggcctcgtcgctccggccaccaccgccatggtgagccgaggacgcgtaccggcacaagctcggctgcgacgtcgagcacggctggtcctcctgcaagagacacatcgatcggcatttgcatcagacacgaagcatcaaaaccttatgcaagaacgcgtgatctttgcctccgaaatcggaagaaatgatcaaccgatcgatcgatccgaatagtgccgtgccgtgattgtgtagcccaaattggcgagagtgatccaggtttgcaagatcagaagaagccaaatcaaaggaagagggagaaggagaagtgagggcaccttgacgcggtcggcggcgttcgcgccgttggcggcggcctcccggctgctgctcgacgtggagctcgcgacgggcggcggcgtggcctccgcctcctccgcccacggcaccacctggttctccccctccccctccccctcctcgtcttcatcatcctcgtcctcctcctcctcgacgaccacctcctcgtcctcgtcctcctcctcctcatcgccctcgccgcccatctcctcgtctcccccaccaccacggcctccaccaccagcagcgcctccacctcctccaccaccacggccaccaccgccgcggcggacgcagcgctcgcagagcgacgcggtggggcccagcctgggccccgcggcgcgccacggcgtgggcctcgcgcacccgcggcacagcagcgcccgcgcgtgccgcgccaccaggaagttggccccgtgcacctgcgcgtcgcacccccagcacagcgtcgcctcgtccgccccgcagtacaccctcgccgccgccccgcacagctcgcacgcccccgcacccgcaccaccacccccaccaccaacccccttctccttcccctccgccgccaccgacatgatctctctctagctagtttagcttgtctcgagctttctctctctacctcgacttgtactagtatgtttgattgttggtctgtttgtttctctctctagggtgggggtggtgtggttttgagcctggaagggaggatcgtctgcggatgcgctggggacgggcactactggcggtggaggctccaggtggacattccctcccttccccctgctttcttttatttttctctctctgtctttcccttccctttcctatatgctttgcttgctgttgttcctcggtcaatttttggccccttgttcacgccgtgtttagattccaaatatttctttaaacttctaacttttctatcatatcaaaacttttctatacacgtaaacttccaatttttttcgtcatatcattctaatttcaaacaaactttcaatgttgatctgaactaaacacagtcagtttcactgcaaaatctaacttgctttcccataagcagtagaggatctattaaaggtttataagtgattgtttggtttatggtcatgcttctcttatgtggatttgaacaaaaatattaaaattttgtataggatgtttttcctattggataatttgaaacgaagaattgaaaactaattgaattctatgaaatttctgaggaatgtctcgattcatataaattttttaggatttttaatacgaggtccaatctcataaaaagtagttttatgagttcatctgtcctatacaattcctacatctttttttcgatccaattaagcgatcatttctttattttttgtgtttcataatcatatgttttgcacgttgattcttgcataatcctttttttattgctccgttttatcaatcatgtgtttcaaaggaactctttttatatttggttgtgtggtttatcatactttttcaataacatgtcccatatattattgatttaattttttactaacttttgctgctagcaatttattcatcatacttttatatactacaacttgcgtaaccttagttgtatttaactgtggctgacaactaaacaactcataaactccaaacaaaagttgattatggatagtaggagtatttgttataagttacagtatttcagctgttctaatcagatagaatttcaaggggatcgccaacggttgcagcgtagggcatttaaccttgggtctgaaaattacagttaacctaattcttgtattatgttcatgagctctcctatcgagtaggtagtattgtactccctcagttccacatttatataatgttttgacctcttgatttctccaaattcactaatatttatataaatttggacacatatatattcatacataaatgtattaaaacctaaaacatttagtgtgaaatagagcaaattaacataatgtaatctatgttactcaattatcttttatatttaagtgatcttatacttttggaataaacaaagagttatccatatgttgaacggaatatcagttgacccactattgtttgcagttgcctcctaatattagtatgaggcgtagacagtcaacatgtacctttgcaggttttattttatgatgtacaaaacaataccttaatttctttttcaaaagataaaaccaaggaaaaaaacaggacattggaaaatctaatgaattgtcggtgcgaaatggcactccttgatatttttctcatgaaaatcaaatatttttttaaaaaaaggttagctaaaattatgaaataaaatactccagggtagtacgaacagaacacgttcctgttttcacaataaataaataaaaaaaaacaactcttttaagtgttgtgtgcatctagtttactgatgagtactaatttcattgatatattttatgacgaatgtattactctttcatttcaatataagcataataagtatatatgtgatatatcttacgactatgaattcgaaccgttatgactaaaataatagttctaagatattttattacgtgttaagttgtagtactacgtatttatatttattggaatgaaaggagtaggctgctagcagtcgtagatggtgggaagaaagaaattaaaaaaagaagaaaaaaggaaaaggaagaagactggtggaagccgtggacatgaggctagcaagaggggagagaggcggcgagcgaggaaggccacaaccacaaggtgcggcggacgctgaggtggtgggggtggcccacgtgacgaccacctcgtattcctcgttccccacgcccccctccccttcctccagatatttttcgactctctcatctcccatatctctccgcctacaagctgcctaccaccactacatcaccctggcctgccttgattaatctgctttctctctcgctaaccaagttgctaattcttttattaggcctgctacaagtactaatcgtgatttaatctcgtttagttagctgcccacgatagtggctgcgtagtggagcattctcctgcatctacatccttttcgtattgaggaaattaaaggaggcacaaattaaactctcggtacgaaaccttccaaacatctagtgcaagctcgctctaaactcttgttctgttatgccggtgttctaacttatgtaaattggccacgtctgagtgcctcaccctctccctctcaattccaaagatgtgtttagagtgaagtttggtgtcagctgtaagggttgagttttgggcgatctcaattgtagttcctttgttgacctagttgcaaccggtcacgtttagtgatgactggtctagtgctagccttctcttgggtcagtgtgttggcgttgttggtgcgtgggtggtggttatttttttctttattttcctagctatgacctcacaagatcgtaatattgtaatttttttctgctataacaatatgaacttagcatctagtgcaagtcgttaaaaaaaaactcccggtactcaccactagctccgtccatgttcatagctattagtaaaaaaattttaggatggaggatgtcctctggtttattgcgttcacttcgaagttcttcttttctccgtcctaaattccttctcattttctctattttttctgcagagtcacatccagggcacataatttttcattctaatttcggctaaaaggttggtcctcacgaccactaacccctggaattaatttctataaatatcgaacgaaattcactgactgcaaacatgactgcaaaaaaccttggttacatcgtgagtatctactttccttttttttttgagagagagagtggggatcgcgagcatctctacttggcatggctaaatttgaatttttcaaatttgatttaggattatttccatgagttatttcatcaaaccgtttttcttcttttcataccctgatatcagactgtaaatttcaaaattagctcaaatgaatgctcgatatagctttcgcttttaagcacaagcttatttgaatttttaaaattaattcaattttctagggtgtacgattacaatttgttttcaaatacgggtgactcataaaaataaaattatgatgaaactgtgaatggtgggatggaagtattaaaaatagaataccatatccagtttcaacaacaaatttagagaaattcatgcgataaaactaaccctgcaacagcataattatatatgtggcctcatttttatgttttgagactgctttcaattccttaatttggaccaattttggccttactactgacccattatacacttgcgacattgttacgcggttggatcttagtttacctgattcgatgactgatccatcagattccgtgtcaaatctgtttagtagtactattatttataccctactctctctgtttaaaaaaaaaaaaaggcaaacattagtttttcgtgttcaactttgattgtccgtcttatataaatttttttataattcgtatttttattattgttagatgataaaacatgattaatattttatgcgtaacttgtctttttatttttttcataatttttttaaataagacggacacgttggacacggaaaccatggtttgtctttttttaccgagggagtactaagggcatgtacaacccacagataggggttcgtctccaagaacctcgaagttatcatccagacagatataaagacagctcatacagcccatagacagaggatctgtctgtaagctgtttaatgcttttgcatgtagctttgatcaattgcaaatacgtttgtgtataccattgtgtggctatatatttgaaataatactatcaagcatgaataagatacatgattacaataatttttaggaaccataaatataataattatattacaatgcctttagtctaatttcgtcgccaaacttttcaatcaccccttcagcaaattttatagtataaaagtgaggcttgaattcacgttcacattcacagaaacgggcatgcacataactgaagcattcacataaaggagcacatatacataatgcctgtaactgaagcatgcacattcacattccagaaagaaactgaagggtacattcacattcacataagcaaataagtcctctcggcactccaacagaaactgaaactgaagcatgcacattcacattccaacagaaactgaagtgcacattcgcatttacaaatcacattcacattaattcagaaactgaaactgaatgagacctctcggcactccaactgacctcacaggatgtatatgtatagagacatacactgaacctgctgaaagattaaacataactgcatatgtatatagagagagtacaaaaagaaaaggaatgcaataaaaggctaatatgcccatctttttccctagattatatatactccatattagtagtatagtgtatcactgaacaagcaccaaaataggcttagtggattgagcatgaacaaaaattatataaactgagacatacactgaacctgctgaaagattaaacataacttgccaatagccagagtttaggatagaaaaagtggaaaagttggtttaggatagaaaaaacagcaagataatttggcattcaccagatagccaaagatagtagcctccacttgcaaaattgacatatctgtatcaataacagtaaggttcatattagacactgaagggactgcctaagacacttgtaatcacacatatttgtggcaataacatgtaagtttcagatattgcataattgtttacctgttcaatcagattcagggaaaagagttttcataagacacttcatcatactaactcgctgcgccttttcctcagcagacattgaacttgtatcttgtgagatgaggctgttataagtctccatcatctttgactctttctcaagcttccttccttctttgtactcttgtgctgtaaggtgggcaatttttgtggcctctagcttctcagaagatattttttcctgtctgtccaatagtttcatgcgcttgtcattgttttcctcctggaatttgctatatctatcaaatttgtctaactgaataggagactcctttgagtgaccatcatcactactgcccaaaccatttgacttgatttttgcatctagagctgcctttttagcggccttctgacccattggtcgctttggcatctcatcaaaagtgtcatcagcttcctcagagtctccttccaagtgaaatgatttccttttacgtgcattcctcatgttttcattgtatgttttccactttgagacttctcggcatattttccaaacctccattagcacaaagggtcctagctttgcctctttattgtcatccacataaaatttgtgtgctgcatcaatccacatttgattagaatatccacttgtaaaaattctacgagcctttacataagcacactcaaagagatccgtccacctattaatcttgtgccatctatccttgcattgcttcagatttctttttctgagaggtggggtagtcttgttgtacgattcaacaacttcaccccaatattggccacctcccttatctgctccacatgtagagtcagttgaatgctctatccaagcactcatcaatctgatatcctcttcctctgtccacagtatcctcttctcagtcctaacattgccattgccatttccatcatcattgccttgtaaaatttccacctctggtggtgaactagcatcagcaatgtaaataggcgcaccaaccaaatgagagttttgtgcatgatttccaaaatagctcatgaaaccaccacgtggatgtacatctttatcactgcaggataatagcatatatttgaggcaaataaattggataatatcttagatcacagggataatctctgcatttgagtttggctcgcttttgcgaattatctcatggcagctagttcatttcagttacagggttctagctaactactgtgaccatataacaaaggaagggattactgacattactaatcaggtagtataaacaaagtaacatctagagatagcttcatccaatccacaagaaattcataatataaacaaccatcagatttttatttctctcaaaagttgaatataacctcaataacattaggataacatgctacatgatgcaaaaaattccagagtcaagtaattaaattgtagaatgccttttccaatcagtactaaattagcagttataaacatttaagtaaactgtgaatggttaagttgcagaatgcagagaagctcatcacatggcaggggatgtacaataaagcctgatttttatgactttgtaacactaaaattagttctaacacagaacatagtaggcattcagatgggaaaaaacaagcatattctatgttctcttgtgatgtaaggggcaatttttaacccacaagaatcattagcagttcatgaatcaaacatccacaaggaaacaaatcacacaagcatattctgctagaacagagaacaagaataaaagattaccatgatccaggagaagattcatcaccaccggacgcatccaaccaagctgaagagctggggaatccacctctgtaggatccatcaaaaggtggagggaagggaaatccatccatggacgctgaataactggggaagccgcctggagggattgctgccactgctggcccgccaccacggccgagagagcggggcggcggtgctaacccgacaccgcggccgccacgactgaaggggagagccgccgtcgccgacccaacaccacaacctagggtacgggctggggctgccgccgccgcatctgaggcctcaggtgtgcctcccttcttcttcctacctgcagccgccgtggacatctcagcagcacccaaatcaagcgaggggagttggagattgggagagattgctgcgctatatgctggagcaaatttcctggatttcgcgggcaaatttcccggattgggggagtgggaggggagttggacgaacctggattttgcggggaaatttcccgcgctcgcgctctccgcgcgggatcctgccgcgccgtcgcctcgggacgacgagctcgtacaacggtgctgagcttgcctcttccgcctcggagcacgggtcgtcgccgtcgcctcgcgagaggacgcagctcccgtcgcttgactcaaccaggggtttttttgcataaaaggcatcacaaagacggggcaaaaagacccgctgtacgtgccctaatcttctcgtagggagtactaatcttctcctacgatttgatccaccctgatctggattttctgcaagctgtgtggagtacagcacttgggctaggaatctattttattccgatccgtacatccgcattctcctagcaaataaaaatttcgggcattccttttttattttagtactgcatatttcatatttcaatgtatgacgccgttgactttttaaccaacgtttaaccgctcgtcttatttaaaaaatttatgcaaatataaaaatacttatgtcacgcttaaagaatatttgatgataaatcaagtcacaataaaataaattataattacataaatttttgaataagacgaaaggtcaaacgtttttcaaaaactcaacggcgtcataggagtagtatatctgattgcactactttatttttattatatggcggacaaacccgtacacactgctacatatgaaacaccaaacccagtctctcacacactatcaatacgtctcccaacacactgaaaaagacaaaaaaccaacggtatatacctaatcttatttaaattatatcgattggactgcattaataatatagtgttgtatattgtacggagtagtgcgttaataaattctatcgattgtaccaagtattcaggtgttaaatttcacatgtttgtaaaacaaagataaactttgatatttataccttctctatacaaagataaagttgggtgacaaaatatatagcaacccctcccccaccggccaccccaccaaaaaaaactctcaaaataaagttctaaatttaaaacataacacttaggctgtgttcgggagtgagggttgggaacctcactccctagcacataaaacaaagcagcgtttatctcataattaatcaagtattagctaaaataaatttgaaaaatgaattaatatgatttttttaaaaagtaactttcatatagaatttttttaaaaaaacacaccgtttagcattttgaaaagcatgcgcgtggaaaacaagggaggtgagttggaaaaacggagataagaactcagcctagaggcagtccaaaggggagtggattctaatccctcgaggggatatctattggtcgcgtaggctacgatagcataaatcaaaaatttctatcgcgtaaaccaggaaccatgcaagtattagatcatagatcgttaccactcgacgcgctgcgcagcggaagaagacgctgaaaagtcgaaggaactctcgcgaagtagcacgcgtcgatgtaaaggaagtagtcgatcgcaccggctcgaccttctcctccttgtgcgtactcctcgccgtacttccacgccgatcagcaccgcaaaccaacggcgcctctaccggtatccacacgtacagggacggaacgccacgcacaaatgtgctagcactcgcgcgcggctagggttttgctcggggagggaattgacggctagggtttctcacgtgatgcaatacctccgccggtcacacccctcacgaatatataggatccatcactcgggcctccaaggcccgtaggactcctattcggatctctatctgaattaagctcatattggatctctatccaatccccttattccggcccattaagcgtgcgaccctataagttcatatatactcggctgtaacccgaaaactccttttcggtccacgcgtcaacagcggcccctagtagaacgtattgacccaccgggcatacataaagatcatatcggctgaacctctagtgtatacttgtatgaacccctttgcctcacgatatcgattaagctcaaggctagatttgtgccatcctcttatagctcaatcattcactcgaatctgttgatagattatataacttgcgattgactcctcaatcacctttggcatggccatgcacttctataatctacaacatcgaggggcccagagatatctctccataggaggggcaaatcccatcttgattattcatatcccactacatgtttcatagcatacccgaaaactacttttataactacccaattacggagcagcgtttagcagtccctaagtaagctactacacatgttgggaaccatgataatctcaggtctaaggattcaacactaacactaaatgagatcattgatgacacaacacacatggctcttgcagtgtcttatgttgggtctatccaacaatatgttcaccaacatgtgtccacattattaatttggtatctctataccatgatccatgagatatgatcatcaattaatacatgtgctgatcatataaacatatttattccacacatgatatttgatcagggatcctttagaaatagcgacacataacataaagagtctcatgaaataatcacatatttattaaccaataatgagtttatctatttcaaggaacaaagtcggataaatatgtaaacatagtatgtgatacaatcatctttatgattgcctctagggcatatcactaacagtatcccctcgtatacctttttcttccaaattcgatgctaataattatgaaaaattctaaaaaaaattgacaatgtagagtataatgatacctactagtccaccaaaattcatgttcaaattcgatctatacatcgagaaaaaaaaagacaaatttagatataaacaatacgctactattcatacgctgaatttgtcttttttatatctcgacgtgtgagttgagtttggacttaagattttgtgaaattgtatatatgtgttgtatgaatgttgttaaatttttccagaatttttcataaccgtttagatggtttttgagcaaacgagggaacatcctcttgagggattagaatagtttcccgagtccaaagagatgatagtacggcagcatgactggggtggcactgttgaggcaattgcatagagacaagaagaccaaaatgtgaatggtctgctagtgagggcgaaaagttctaacgacgctagaagatcacgatgtatagatcccgaaaagaggatatgagaagtgaaagaagatgaggacgaacaaatggccaaaggaggcacatcattttgccatgcatagttttataaatttcagccacaggattatattactcttgtacaatggatggatgatgtttatgaaccttaaagcgataacactatcaaattttgatctacacatggtttttgaagggagctagcttgaagccactcatttgttccaactaaagctaataactattctttccccggcttctctgaaaagccgactcatggtcaaattacttatctttgaacatgtcattctcaaagccatggaccatttgaccttatcaggaatatcagatagctggttcacatcagtctcaagtgaagtttcccttaccatccatggagaatatcttcacccctttccccttcaccctcttagggtgtgttccttgtcaaatattttcagtggcatgtaatacggaaaaagctattaaagaattgttaattgagtattaaatattaaaaatttaaaaaacatttatttgatttaaaaagacttatattttttttgaaaaagtaatatttagcagtttgggaaacacgcttacagtaaatggaaaaaatagtttagctgagttgtagaattgaactcagcattagtccattgtgtcgattttcaagcggacaatccaaactgttgaaaacaacacatgcatcatttgaactacaaagctaaattattcttgaatcctttttttagagctagctttggcatgataagaaaaaaggaagcaacttttgagcactgcacaactaatcacatatacacatgtatgtactctcatcaagagtgaggaggaaaagtgaaaggaggcaagacaacatcaatacattcatcctaacatactacacccatgccagccactagtctcaagttctcaaccacttgatccactttgcttgattttgaacaaatatgtgtgtctcccatgattatcaaacaacccttttatagcattttaatttcgatacaaacccaacactcaaacacattacttacataacatgagtattaattactccaaaaaacatattagagagaaattcatccatatctctgagtttttacttagatcgccttctataaattgagagttctgctctatctaattttcattttcacacattggtcttgtttggatccttcgggttattaaatagccctccggaatcttgctatttatgagtattaaacgtagattactgacaaaatcaattccataaaccctaggctattttgcgagacgaatctaacg

SEQ ID NO: 5609 - DNA, 54005 bp, Oryza sativa
cttagtaggatttgccatattactcatttgtgaagcagcaggagataccattgggccaactggtgtaagtgcttctaatgaaacatctggtgcttggttcatcaatttaggcttcttggcagcatgctgaccatttatcactgttgacaagtcacaagtgtgaaaaattattcccatgtcctcttaaatagagcaagaactatttattatagatataaattatgcaatctgaagtagagaaagaaaataccaatatttccatttgaatcgaattgatggacctctgatctcttcttcaaataatccttctggtatagaaaggagaaaacatttatcagatattaatgaaacgacaagcttttgctttccaaaagcatgtggtggttggaattttttgagtgggagaaggtttgtacacctcctgttcttttttacttgttatttacgaccaaataacgaccaatgcacatgtttggtaactaatatttttaatcatatattcatcaaaaacattgtcatatataggtatggaagtatttcatgacaggtctgccattttcacatatcaaatagttctgcatacattagaaggctaagatttcgaggcttagctgcacatattctaaaacatagtcctatttgaggaaggaggtaatacttcactaaaagctgcaatgctgctaacccaaaaattagaacatacgaaacccaatgattcattaagatgaataaaatttgtggtgtcatttagaccactattcacttgtgctgattataagctgtatggcttattactaacaaaaaaaattgaacgttaaacttttatatgtgtgtttagtgatttaaaagcaaatgctgaaaaataaactatgatgaagaaaccccaaaatttactccaaaattatgttttaaaattcttttttttttttgctgcagcttataagctgaagggtggacacaccatcagagtgttgggacacatgtttaaccacttaaaacactaatggattcaccatgctgattttgtctgcaaaaggtgcaaatgtcattgacatactacaatcagaacagccaaaaaaatacctgctcatattgagcaatcaaatcaacctgaggtctaggatcacaggcaatgccctgaaacatcagcagaatcaacttactctacaacattgtaaacaagatagagagagagttgacataaagatcttaaccttcccagcaatcaaagagcaagactcagcgacactttgaggtgtcttgtatccagggtgcttagactttttcttcttttttgacttagtagatacctcactgccatcatacaattgtctatcaaaatcaactgtcgattcaatatccacattcttccttggaaaagatccaccatgcaatgaactttggtcatcttgacaagagtttgtgtctccactagaagcatctgttttacttgtgaatgcagtggctccagaagcattagcaggatatgggcttacaactcgttgtctagcagctgtccggatgcgttttgtaggaatattaaagaaatctgaaggtctttttccatttgataaaaatggctggtttcctggcttgctctccacatatggatcataaggcatgtcaacaccagtactgtaatgccttgtgccattcatcctctgctgcataaggtgtttctttttgtgactcgattttgatggcaaaccatcatcatatgtaccatgcaatacataagtggatgcctcgacatcatcatcttcatatgcatgtcccctatgtgcatctaaaccaaaaaagcatgataagaacattaagtacatgtaaatatttctcaaaacatgtaataatatataatatagaaggaaatagtggtgtaatagatatattacctgcaacagagcctgttgtagatggctcataatcattcttctgtcgagagttattggttttctggacggtagacattaatttttgtaagtacaggcaaacgacgatgaagtaaaattctaaataaaagatggaaaaacaatccaaagtaatggacataggacaataatatgcaatgtgacgattcatatcacttactcaagattgtgcaaaaggtcaaatgctcacttcagtaaaaaaaaaaaacagagagagataaaaactcaaacacgcagaagagattgtgtttcatatcactaagagagagaaaaaaaggccacaggagagggagttaggcccacaccccatacacaccaaagaaaaaactagtgaaaatctctccacacaaagataaaggcaaccagctagcaccacagataaagatctagcccaatacattagtaatttatcatagagccattaggtaaataaaatcttgaaaacaacaataggttcaattgtccagaactttatcaacccacagttgaaaacaacaacgattttctatactgtccgataattgaaaaccgaacaaaagcaccgcatagcataaaagaattactattataaagccatcagagtacagagagcatgtccttgccttattagccacaaaaggaccctccacaaactctctgtatgcctgcatcgcaccaggggctacgccataaaataggtttgcctagaagttaggaaaaaaaatcataaaaccagtgtcagtcaacagtttttgtgtatgctcctcagagaattcatttcaaattagatgaaatgttaaatggtgtcatcagatgggttacttctgaaagctggtctggcactttcaaaatgccaaaatcattcagcctgtcaggagtagctggtgcttcagctaacgacagacactcagatatattacagttgtccttcagaaactttagtgcgtaactttgaataggagactgaagcttctcttgttccagaggttcgttacactgtccagatttgtaaattacatcaagcacaaatatgttagtcgctataagtttgtaaataatgcttatgcaacataataaatacaatgtccctattttattctaagttgtctagaaagatctgaaatcttaaattgtctcgtaagtgaaaaagtggttgcatgtaagagaatataaagaaggaacaatgttagaaaattgatttcgctgacctgttctttttctgcattgattccagccagctttgtttccccaatcccaattgactcctctgcttgcttctctttacgcatttcaccactggtagctcgtaaagtctcagctgaacaccaaaacttcatgatactcttggctaggattctagcaattgatttctgtttcctttgaatgtttgcttcctcaaatgttgctcgaccacttaaggcaatccagtggcacatctgggaagctgctgcacttttccacaggcgctcctttaaatagaaaacgtgatgttacataatatctttgaatatgtaaatacagtaaaagaaatgttacacgacaagataaaaaacttgcagcctgcatgagaacaagaattgattattaagatcactttagagaatacctgcataaattcatttgccatccaagccatctcctccaggacaaattcccagtgactctttggcttcttctccaaagaaatattgcagagagatcgttcaccagctttcttgatattgacctgagaagtatttattaactttcttctcagaaaagcagtatcagaaaagtatatattctaagtgtacctctattaatcgtgcccttctaaggatagtatcttcatgttccttcttggcaacagtagaatcttcgcattccttcttttccatcattggaatattttcaccagttttattaacatcattgtcagggttcattaatgacacagaactaggcacgtccttcatgagcaaaccagacgccacggtaacagaatccaacttatcagcaatattagaatcaggagaacatttattattttttttcaaattagaacatgcttccttatcgactttgtcaagaccagaagtagcaagattccctgtatccttttgtgcatcaaccatcttgttatggacatcaacgtcatctttggcataaatggtattgctgacttctggttgaacagaattagaaacgccatcaacaactgtgggcatgtcaccaccttctggttgaccatctttgtttccatccttgtcagaaggtatagcatcacctaaatcttcatcagacaccttccctgataagttctcactttttccaggatgttcatcaacggtcttagacacatctgcacatggtatatccgcttcattttcattcaaactggcaatttctacctcagagggaggaacagaactcttgctaaccatatcatctgcatgaacaaccaaatttttatctgagcatccattacctgcttcttccgcagcacatgcttcttccaagacttcattgcatgaagatggaaatgaagaagttgccattaaagcagcttcttttggacttgtgtcaggggattctgcagaagtagttgcagtaactaccaaaccatctccaataagctgtgaattaccattcacactgtttggtgagatttccggtgtttcaacaccatctttgaagtttgttgtttcatgagttgctgcttggtttccttcattagtgttgtccatctccatcgcatcatgatcacctaatgaagcaacctttgatgtgttgttccgatctggacttgctggttttgagttgccaatagatgaggcaccatgatcttctgattttgtttcttgtattatcccttttgcatctttcccttgagaatatagtggggaaactggtagagacccaacagacgcagtggcattctccctgcttgatttcgatctgcgacgagcatacgcctggttctttgccccagggcggaacaaactagaatcttcagcctcttttacattgttttgaccatcacagcgcagggacacatcaggttgagatacattagttcgtttagtaccacatttgacaagtttctccccacctgtgttgctggtatctccatccaaaagcataagattatcagctgtgttggcatcacggcatgatgaacttcctggcttgccactactttcaactgaatccccatggggtgaggcagcaaacgcaaagctgcccttagcttcactgtagtgcaagtgagaaaagaggatcgtatcaaacaataatggcagcaccgttatcatatgacaaaccatgaaaatcagtatcaccttatcacattttgttcggttatatgatctgcaacagaagtggactggacactaagtgatgctacatgtccaagtttgaaatccaaggggttacctccctgcaataacagattaataaatcaggacaaatgatctaatgcaaagtcaacatacactccaaaccataaggatccgattgcaacataccttctctaaaaattcaagctcccttcttcgttcttcacggacatcatattcttgcctgaagtttgtacagaacattaggaatccacagaaagcatatacaggctcataataagatggccgtcaatgtacctaagctcctcttgagctttctctatggccgcacggcgtggcgaagctttctgatcaatgttcacaccacattctgcaattcctcccatagagcacagctcagtatccacacaggatcaggatatgcaaaggcatcactgcaagcattatctactcagcttgccatgtcatcactcatcaatggacatgaccttctcaaaagtccgcaaaatgtgcaacctgtttcctgtaaaaccaaaccatgttgctgataacaaggcaacaatatgcaaaaaacaatagtagaaactaaatatcataaaggtgacggcgtcctcccatatcaagtttacggaaaacgcaatccttattaccaaaaataaaaaggagacaaaataaatgcatagcgccagcattttcccagtcaagaatagagcatgccaagtccaaccacacttgcccaatcaaacacgcacacgcaaacggttcgacagccttatggcctgatcgaactaagcgcgcacataacgacagaacgtgccgcgaagctagaaagtctttctttcactaacaaacagaccacatgccatataaggcacactaaaaaatcactttttttaagcagacccgcgaacattccgcgctatcagagctcaaaccgtttacagcgttgctaaaccatgaatgcttcagttacagcgagcgcgcgaagctgaccacacgtaccccccacactccattcgcaaactcgcaaatgcagcacaattaaacggctaacagcagtagcaccaccagcccacctcacctcaccacacacaaacacacaccacgagaggccgggcagccccctccaagggcacacctcaattgcggccctaggggacagccacgagccctaaggaggccacagggagcgtcgtacggagcaggagactcacctaggcagcccccgcgccgggggtgggctagggctagggttagggtttgcggggagcaggggagcccccacctcggggccagggcagtgggcgccgggagcacgcggcggggaggggggaggcacgcgggaggatctccgggtggtggcggcggagacggcggcggcggcggccggggggtcgccggagatcggtggcgcggcgcggcggggctcgcgggctcgcgtgggggggtggtggtggtggtacgtcgtatatacagaaggcagaggccgcgagggagggaaggagaaagcagattgtgtgtttgcgggtcgggtcggggttgcgaccgggtgaggctcgcgcgaggtggtgcggtcggacccggtcggtcggtcgtcgcggagtgagagttcgcggaaaggaagatgaatgcaaactaaaagtgtttcacgtaaaacgatgtggtaataacgtgtgattagttgagttctcacataaaacgcactgtttaacagtttgaaaaacgtgccactttaatccaaaagttaatccattatttttagtggattcgaacggggcattcgtttggcaaaatttgctactacctccgttctaggttataagattttctaacattgcccacgttcatatagacgttatgaatctaggcacatatatatatgtctgaattcattaacacacacatatatatgaatgtgggcaatgctagaaagtcttacaatatgaaacgggggaagtattagacatttaaattttgtgtaatttactaagatatactgtaaaaatgtgtcacgattgataggcatcgtaaaaactggtatttgctggaggacactttcgactcaattgaagagggaaattctttaaaagatgagaatgttcttagggtcttttgagctgaggttggagtgaagatgaaatataatgtatgctagtgatgcacttggggtgatggtaaatttaaagttgcataatatctaacttttttactctaacgtcatgtttgaagcatgtggtcctaggagcattctcgtctttcttaggtctctctaattaagccgaaagtgtcatctagcaaaataatgtctctcagccatgacacatttttttatattgttcaacaaattaaacaaattttaggtgtcatatagcaaaatttgtctttgatcaatactcattgtttcgattatgcttatgcttcttaagttaaattttaaaattgatttttttggctttttcatcatagattgtttacaatattttcttttaaattgctaacgacacatgtataaaaggcttaaccacaaattattttttagttagtaataagatgttcggataagcatatgaataagggccaatcatcactatgaatacgtgagtgacaatagatttatcattaaggaagagtgttgtgagagattaaaccaatatgataaagagtgtcaaaacgttaaatcccttagagaggggagaggaagagctgaatatcatgtgcaccaccaagtgtttcgaatatttactttttaccactctagaggagtggagtggtaaaagatttgctactcatgtgagaggggtaaaatggatgtgtggtgaagagtggaaaaagttaaatcctctagtagtgttgtgctataggtattattaaatttacaaagtagtacatccaaagtaactctttcatcgtcctttgcacgtatggttgtaatgcgggtgcgtaatcaatgcattagtggagcccgtctaaccaggaaaacttcccgttgtgtttctgatcagcctgactctaagtcagaggagtaataataaataaatacttcctacgtctcaatatataaacctgggtaattcatatagttagcatgcaaagatgatgaattgtcgtactagaaataggaaagtgatgagtgtttaatcaatcaagtagcattcatcagccaaacatgctattggctaaaccaaaatttagttttgctcatccatatatggtaatgatagaactaatataataacaattgttgttcttctaaatagaaacaaatcttgtttttaagtgaaaaaaaaaacagtttcattgccctcatccaaacaacccctttggttgtgtttggatatacatttggattgggactgaaacaatatacaagtacatgagatagtggttcatggtttgggatatgagacttttactcttttatgatggttgtgatataatggacttatgttacccactctaccaacggtagcccctagcctcgatcccgtggacgtagctatcagataccgaggttggggcccaccatgttagtgaggcgacgtcttgacatttgctcttctgcagcccaacttgccattcccgacccaatttcttggggcgaaagcatctgatcctgatggatgtatggtgtttgtgtctttgagtttgatgaggtccatcctttcttatatgttcctgaactcaggtgccctacttaggccctgtttgattcagcttagaattattataatctagattactaggagtaagttgaaacaaacaagtagattattatgctacattattataatctataagccagattactataatccaataatctcctctagaggagctttttttagattgttgagtggctaaagacccactacccttagatgcctctaataatccagagaaacaaataactcgtagcttattttatgtcagattattataattcagcttagagtaatctaatttaataatctagattacaataatcttaagctgaaacaaacagggccttagtgtcttcaagggggtttttatgtgggtaataggttggatggctacccaaacctagccagtgatacctactcacaagaagcgctgctgccaacgccgtcgtgccgtgcaccacgaggatcctcttcaagcatcgccaccttcaacgtctcctcaagcttcgccttgtacaagtctccccttcggtgttggtgcctccctaaagctccattgcggatgtcacctccgcctccatttgaccaagcttgttttatttaaaaatgaatatcacaaaaatagtgcaatgtttcatattgatatagcaaaaaaaattgcaagactataaccttgggaggcttataatcaggaaaaaggaaaaaaacacatcaccacatgctgacatctcctacacacaccaatagacgggtaccgaatgtgacaccactatgcgtgaccgaacgccaccaaacctaccacgaaactgtcactgacccacctgctcttgcctcatgcctctaaacagctgaaatcacgatcttttggacacacccgcgagaagggttgcagagggagaaggcgagagagaagagagagaagaagatccactcgtccctcatacaaacccgccgccttacaaaaaataccccatttgcttgagagttgagacagagaatgcgagaaacgggaccgctagatggcgccttcaagaaggatatgatgctaagagcatagctgtcgctcgtccaagggttctgaaccctattttccctcaggggttcccaccaaggagagaactgggtgccttaccaatgccctcaagaaggaccacaacacttagaaagttccgccgtcaagcgagctcagattgaaatgctacaaaaggtaatgaatacttaaacagacaaaccatgtgtggttcaaccattgaaccgcttaaagtagaagattagttgtgcataagtgcgtgcattagaagatgccagatttttcttccatcatggatctaagattcccgttctgcagcaagaaattttggggggaaattttcatcagttgtaggatagtgattcattctaatttccatgagcacaagaaactcgatcgattcagatcgcaatcatgattctctcatgaatcattggagagatatataatcagttgtcaacaagtttgcttcttgtatggatgacagagggcgtaggaggccaagcaagatgaacgagagagatgaggtttgtttctagtttcttggtatattttgttgtatgttgaaattgattattactttttttgtctaaaaatatagcaacttagtattgggttagacacatcctagttactggtaacaaacaaccttgctctagctattggatcatgattcattcttatttccttgagcacaagaaattcgatctatttggatcgcaatcataattctctcgtgaattgttggagtgatgtacaatcagctgtcaccaagtttgcttattgtatggatgacaaagagcgtaggaggccaagcaagatgaacgagagagagagaaaagtttgtttatagtttcattctacatttgttgtatgccagaattgattattacctctctgtccaaaaatacaccgatctattatttgattagacacatcctaatactagaaatctgaacatagacaatactaggttgctatatttgtaggattttgggagtaattcttgtgttataactgttggaaactagccgttgtggtttgtgagagggtcaggcaacgttgctagatccagcaccgcacacccatcacctcataatatcaacaggaagttgcacgatcctctggtttttggcaatcaacagagtaggtatgtatttagattcaggggcaaaaagttttgatgtgtcacatcagatatatggatacacatttaaagtattaaatatagactaataacaaaacaaactacagattccgccgataaaccgcgggacgaatttattaagcctaattaatccgtcactagcaagtgtttgctgtagcaccacattgtcaaatcatagagcaattaggtttaaaagattcatctcgcaatttacacacaatatgtgtaattagtttttttgtctatatttaatacttcatgcatgtgtccaaacattcgatgtgacagagtgaaaagtttttgcgtggaaactaaacagggcctaggttggtggttcatttcctgtgctgcactatcattcacaagtccgaactgtaatcaagtgcttctgaatgatacatcatgtcatcatcacctggatgttgtatcaaaagatccatgactacaacaacaattcattgtacaccatgttccattctttcgtggctacaatcacaatgcttacacatttaaccattcaacttatttaaaaattttatgcaaatacataaagatatttttagtgataaaataactcacaacaaaatagatgataattacataattttttttaaataagactaatggtcaaacgagtatcgaaaagttaacattgtcatctatgaaaagaaaagaaaagtcttttgacctgttatgtatgtatttacatcatgatgcaactgtcacagcatgataaccttcaatcatttcttccctgaggcgctggaggctgttgggtagatcctcctgaaagcccagaggatgctgcatccaatctgcttcagcttcttctccttcctcacctgatgttcatggcttcttgctgcactggccacagctgcttcgtacaccattgctgcagagaaaaaactgctgctttttttcttgtgttcttgtcaagaacagagtgacaaattgcttgcctgcttcaggagttcaggtgactgaaaaaaccaggtagtgaagtctgttatttgtagtggttgatgatgcagcagaaaggaagaattggcttggcagccaaggaattgaaaactgacatgtgtctgaattgaatttctgatggagtcatcggtcaaaagtattgactcaaatactatttcctaagaaaaaaaactcaggttaaaatagcctcttcctggaacactgggagggtcagctggaggagtcaagtgcattgcatgatgctgatggatttgtatctttgtgctttcttcagagttgcaacttgttttgacacgtttggttttctgtgtgcttcgcccctctttccgtcgttaaaataaaatctgattatatttcttcagaacgtgcaaaagacccagctttcatttcgctaagatagaaatataaagttagtggttgcaactggaacagtttcagatctaaggcttagttcgaatttggaatttagcttacatttttaaaaaacgggataagccattagcgcatgatattaattattacaaactttgaaatggggtttatttttttaaaaaaatatatataaaaagtttttgaaaaaaagagtttggatgtttccgtttggaattgcagaaaagaacaaaaagggaactggcggatgcatttccaacttgtaaaatcactcctttattcacatgatgcctcacaatcacaggttctgaacctgtgatagatacaggtaaagtacatttcagcaaagcagcgtccagtgagatacacatgaacaaagcatggaaatcaacatttaacaagtttttttctccagtttcccaccaaattggaactgaactctgaaactcgttgcaattacaaatctttaatccatcaagaaatattagacttgacctttgggacactattttccctgaattcgcatagagccacccacaagactcaactagccagttcatgatgcaaggaatgttgattgatgcctgccatgttcttgggttcatttcaccgacgcagcagaatcaacatgcagcccatcagagcaaggataataataaaaccaactgcttacttatagcctatctatcagctcacttatatagtggttaacttttcactataaatatatagtccacctgtctgtctcacagattttattggttcttgtgcctaagccggctgtaaacttacaacccgcttctcatctctctcctctcctctctcatccacctcagcattcagctttcttatagccctctattatacttgctctcagccacctagaagagatggccgtgcaagcatgcatatactcaccttccattgcagattgcagttgtgcttatgtcattgttggccatttgtgacatactccattaaactgttgctctgtagtttactactgagtatccatatgcatgcaaaatggagcctgcacatgctgcatctcaagtcaccatgtcatcttgtaaaaagtaaaaatttcacatcagagtcacatggtaataagctagtactcgtttcggacaacgataagttctccaaaacatatttttgactatgattttttctattataatacagaaaaaacagtaaatatttaattttatcaaagtattttttaatagtaatctatatgtcttgttctagtgtctacaaactaaatattttaaaagttattgatagtcaaagttataattatttgacttcaaccatgtctaaaagactaaaacatcaagaattatatagagccagagggagcaaactattaaagcaaccagctgtgttcttctcttcttggcaactctttggactttggaactagctatactagctagccatggttaacaaatccgcacgtctttgatggatcctgcctaggtctaatatattcatggtggagcactcacattgctgcctgctgctccatgaatagatttattcatcttgcctggagatctgagaagcatagaagaagaatctcatttaatgccaatattatgatcaatgttgacttttcacaagattggatggaggaagaagttacattaccgcaagatagccggtttgactgacaatacacttccaatcaatttctacaaactaaaaaaaacggcacttcctacttgcacattttgaaccttcagatggcttagctcattctggaccatccggtgcatcattagaccatccatatgcagtcagtagtaatccctcccgtagctaatactctgcagtaagtgcaagtcaatggacagaacatcttttattttttttattaaggctatgatctttttttttatttatgccacagttctagtgacattgagggagaaaacacatcgttttccgcgcgcacgcttccaaaactattaaaccgtgtgttcttttgtaaaaattttctataggaaaattgctttaaaaaaatcatattaatccatttttaaaatttaaaatagttaatattcaattaatcacgagctaatagctcacctcatttcgtgtatctttctaattttctcgatcccctcctcctcaaactcccctagaagtacttcaaggtcatgtgcatcgatcagcaaatgagtgcatcacctcaaaggctcatctctgttccctcctccatgcacaaggtagtctccaaagccctatagtgttcccaaacccaagaaagaagctccagctccagctctagcttctttcacaatttgctccaaacaaggtagagctcctccaagatcctgcaaagggatcactgcgagaaggcggcgcaaacgggagcagctggtgcggcgtgcagaggagaaggtgaaggtgaaggtgatggatgggagcaagtacagggcgaagggctctgccatggtcggtgccagcaagaaggttgcctatgtccttctgctgctgctggcgctggccgccgccgcgctcagcgtcgtcgtcctgcacaaggtcagggagcgccgcgcgtttgctgttcttctccgggagcgcgaccggcagctcatctccacgcggatcctcctccaggtacggtgatggatcatgatgcactttactgctatttccatgtacctgcattgcacaatgtcttgcaaacctgttagtttctgaggtgtcttgtttaagcgaacaaagaagcatataccagatggtcatatctcagttgttatttgtaataactagaaggtgcaaaggaaattattcttcctcacaaccaaactccaaatttttaaaaattaagtaaatgatatatttttaaaaatatcttaaaaagagtaaagttttacaagtttaaagcagttgacgacctgacaagctgttcttactaacaaaccgtaaccattctttgttctctctctctctaataggatgatctcctttaaatcacaaatcttgaccatgatcaccaaacttaactacagcattcaatatattggtgttaaaagaccatttctcactgcacaagaacgtccttttggagttggagttttaacaataccagcaagtacatttgctgactctgaaatgtgcacttattttatatttgtgacattactgaaatgcataattttaatgcagacacttatgtattgaacaatattagcaacacaattttgggctcgaagcataatatgaaccgaatcgagccaactatgcattacttcccgatgcataaagtctgtcaactgtaacaattagggtgctctgttttgaattcttaccattgagaatgctaaactgaacatcattctgttcagtgctagaccttataaataatctgtgaaaaattagtcccagtatcgccagacaagaccatttcttttcaagggtatgtaaatcagagcgctatgcattacacactacttgaattacccccaattaatatgtaattgcgacactgaaacctgtttgtgactgacaaccatctattaaaaaaaactaggttatgttttcttcgtgcttcccacagtccatgtaactaagaatatagtgttccgaacatttattcatttactatttagaaatttgctaatttgtatgaactgtgttccagaaaaatggtttgatggtaagagtgtgcgtagcaaaatattatttggcctggccagcttctgtttttgttttaattcaacaattatcccgtgaatgagtagctaactgcatgaacactgctacattatccttccagaaagagaaggcgtttaacaaggagatgaagaggaagttggaagaactgaaggccacaacatcttccctaaggactcagaagacagacctgaaaacgaagatcaaaggactagaagccacagccacaactctgaagaacagagagaaagaactggaagcagttctcgcagagaaaaatagccgcgtcagtcaaatggaagcaactctcacagataaaaacagccacatcagacaaatggaagagagagccgcaggcacaaatcctgaccagatggcagctctgatggagctcctgcagcagaaggaagccgagcttgaagagatcaaggtcaggttccaggattacaagacaacggaacggaagagcgtcggcagtaagagcactcatgttcaatcaaacaacgcaaatgcaagacctgacaatgctgtagtcgaaaaggtcacaagctccagtgatgctacacccactagagcagaagaaaagagttctaagaataccacaacagcagaaagtagacacccaaaagacacatctttagaagaaaagcaagtgaaatctgcaactagcaaggaagaagatggcttacaagacaaaacagatgatgccattgaagatattgatgatatctacggggaaagtcattcaaagaagatcgaatttcctcggcggaacaaaaagtttttgactaacagtggagtagacagccaagatgaagaactgcataggatagaacacccagggaactccctagaccaggacagtgatcgcgtcaggtacaataaactgttggagaaggaaattgataaagtttctggtgaaaccaagaataaaaagagtattgatggtagtttggaaaagatatccaagcatagcttaggtgatgccaataaaaacggattgaaacaaactgtggaagacatggctggtggtactgctgctgtgaagcccaatatgtctgtaaatgatgatggaactcaacaacagaataagagacccaagaagaagaagaccagatccaagaagaagatgatcgattctgcaactactaatagtagtagtgaagttacaaaagaaaagtaagtagatgccacatcaatcccagagtgagttttggatttgaaaattcactgcactacaatgacagaaaccatggctgaagcctgaagggaatatcctagattttttatagcagttgtgaacaccaatgctatttgatatgctggaaaatctcggagaaacgaaggcccaggagtagctgagaaaatgtactgatgaatttatgtctcagaacagcgtataacatgttttctacaacatcatgattggttgttgtcttatatggacatggtaacacaatgattttataccttattttgttgagaaaacagttttacaagtaactcaatagctcatcataaattttctacaatgttggaacatttgggtaccggaaaaatcaccctgcacctcatgaacactgcaagcaaattttgtgaacaccactccattgtcgaaactcaaattactccagcccacaaaaaaatttggtagttttttaagaaactactgacatgtcacatccagaacttgttaagaaatatgtatcagtgtgacaacaagtttgacatggaacagaccacaatgcagattatgggacatcaacgcaactaattacaagcacaaagtgaacaattttaggccaaaataatgtctagaaacaaaaagaactagctaactattgccattcagatttacatataacatcaagaaactaatgagcattcacatagataaatacaagtcgcacaagaaaaagtgtatgcattatttattgtgtttagaagcgtgcaagcccaaatgttgttgctgttgttgctgaacctaacaaaattcaattatatgcagcatataatggcgtgaccttcttcagatcttgatcactcactattgatatcaaccataacaagcataaaagcagctccaatataaatttaacaactaaatcccgtctgcaattgcttttcttcacaattaggtgagcccaagaacacggcaataacaaggacagtgcaatccttagttgcaattcatggtgaaatcacataattaaaaaaaatcgtcgcggttaaaataaactgattttaacttactacacacgatggaaacacgattgggtatggataaattcataaatcccccaattccatacaaatcaggaggaacaaaaagaagacagagacctggagagcgattgaacagtcccgccaggatctgatctttccgactaaactgaactccccggcatccacctccgggactcccgtggcctcccgcaccgccgcatcccgtccatccggccggccggcggccgccatggtcgccggctcgccgccctcctcgtcttcctgcggtctggggacccgttggtaagagcgggataaaaggagggtttcgttgcaaaatctctcttccccatcgcctcgggttttgatctgagccgcacaggggagatcgaacggtcgagatcctgtcacgggtggagtagattgataatacgggtgtagttcgagggtctcttcggaattaaaccagtcgcgtgctcgagtgggatcgtgaggcccacttatcggtagcacccggtggcggcaactcgccggagaccgaaccgctcgccggagaccccccccccccctgggcgccgtgaagccacggcgccgccagagctcgcttctaggagtcactgggttctacaccactcagtccaatcaaaccaaggcgaggggagtgccgctccgcggtggaaactcagagatcgagggaggaggaagatggccggttggccgccgccgccgccgcatctcacgcgccggcggccaggtggacaggccatggcggcgccgcccattctgctgtttgctcggtgagttgccatagatgcttgctagagctaggaacccaactaacaagatggtcatcacattctttgtttcagtaattgcaaactagtctagtctccttggatgaaccggataatacatacagattcagatatatataaagattcaattaaattctcaaaaggaatagaatgtagctgaaggcttgcatcagctatccattttggccattgatctcattcccatcctaatctcatcttcttcttatggctccatatctgcctgctatctgctagacagagagcaatatcttcagataacctgtacatagcagttacaggagataacttgaatgtagttctgaatatatccatctgaatgttgctgactactacaaaatagtgacaacagagaggcaaagctgcagagaattttacttacaggagctttgcctttcttgccaccatcatcattgttcttcgacggtgcggtacggtagaaagaactcaagtctgtttttctccttgaagattgagagcctccatcgacaggagctggcctcttctggcttgcttgttgagagtgctccttgtccttgatcatggaacagcaaaagcagttcaagatgacatttggcaatgatactagaattgagctacaagcctacaactggttgacgatatttgcaacaagagaggaaaacaatgcatacagaaatttcgataagttcatctgattcatgagtatcttgttcctcatttgatgagcacttcaattcctgaaacgcgctgagcgcgttcgttggcaggctctgagagcacggcatgatttctgatcctcccttggagaggaggggatcttcattcatgcgctcctatggagtaagaattaacaacaccctttttcgctatctttatttttggctgaaatcaaatctagtatatgcagaaatagagttcctctgtacctgcatacactgatccagttgaagtactatatcttcttcagctttcaaatcctttgttgcaaacgtcaactttttctgcaatcccaagcaaacagttttttcattgcaaatatgagatatcctgaatggaactatatgatggtaatatcttacttttgctgcatcaatatttttgtccagacaagaatgaaacgccatattctcgtccttgttgacaaaatcatgcagtgcactgtctaggtcatttttgtcaagaatctgcatattctgtaaaagaaggattaaatgcgccagtgtatttttatttgtttccactaacctggaattatctaaaggaatggatatctgaagcaaaatagacctggccaccatgaattaaaaggacaccaacatgatacactactagacttagaccaggagaatgttaaattagtaccaagttactctctgcaattaattcttcaatactttgctgatctagctcatttggttcacattcttcagaactaccagtgtgttctgcaatataaagagagagtgaacaacacattactcaacaaagattaagatgcatttttccagtcaattaatatcaaaattgttcctaattcctaattattttagtgcagttaacctgaagtatattcccatttttcatgaaacataaacaggtacctcgtgttcgattctgttgagctgatcttgagaagagaataatgtcgtttgggtttgcgacctgtaaagaatacaccagttaaagtatatgataaaggattcaataaaaaaaaagtatatgataaaggaggtatgcatcagtaaatttcatattagtggttgaggtacctttccgacatacttctgaccaaaccgctgtggagttattgtcgaaaacccagagtagtccaccttcagaaatttgacataaagaatttatacaatattttaaaggaaggtaatattttctgaagagcaccctattttacctttactctgactaggggaagtttgggctctgatccactaattgctgttttatcgataagattgctcacctgaaataactctgtattcaatagtactgctgaaaactacaattcgcaaacatccaatttctaacatatttcccatttaacatgaggacatattcagacattcagtgaaaacgagctaaatgttggaaactcatgaaaatcatacctagaagttttgtaaattcatgaaacaattactagaggtatgtgtatatatgaaatacattctcaccaaatcttaagttcaaactcaactttatttgggagtaacaaaaaagacaaattttgaatgaatattaacaggacactatttatctgaaatttgtcatttttgtttctctcaaataaagttgagttttgacttgaaatttggtgagaatgtatttcatatatacacctatatctagtatttttttcgtgaatttacaaaacttttaggtatgactttcacgagttttcaacacttagctcgttttcataggatatttcccatttaacatatcattattgaactccaattgaatgatcaatgtcctggccatgtttatcaagaaactgtgtagaagtatttttcgaacaaaaactatgggctcaaaacttacaatgttatccaaatgctcataaagagctgcttcgttattgagctcaacacccaattgatcttttaattgaacctatatggtatgctactgatgagaatcatctcattgaaagtaaacatgaagtaagtagagagtgaaaatggcttacttcggcatattggaaaggtctaactgattttaatggtatattagtttgcttgtattgcattccctgattcaagggaaacatatataagtgattagacaatgataaaatagtatgatcaatacaccattctgcagtagtgttaaccttgatttccaacaaaacaacattctttggctttgcttcagcattgctcagtgaggtagcaactgaagaacctggatggataatgtgaaaatcttttccagaaacctcctgcaaagtttagctagattaaaaataaaaataacacttgacaaacattagtaagaaatttgcagtagctcaaaatgtgttacctggtgatcaattaggcattcatgctcatggccccatattaccaagtcaagaaaacttggcaagagctgttcattgatgccatttgttgagcttccctttctcctgccgaaattagagagacaaattgttgctaggaagcgcaagtgaaaaaagacaacaaagaataattataatcatgagccactttgcataccttttctgatggaaaacaaaaagattgaaccagtcatcttcactgtctgctttcatccactgtattttgtaatgtgtctgaaaaacgatatatgcacatacatgtgaaattattcataatcaacaagttaacatctccatgtgcacaacacatgagaattcttcaaatcgtaatcatgcgctctttttttattattataaatacctgtaacatcctgctcaatttctcatcccgaatgttaccaagtccatatagagcaacagaagttgcaccctgaatcaagtagcacaagtcacagaattattatcttacaattgttgattacttggagttgtgtatagaacaaaataaatttactttttttataaatactggacaaactgatatttgatcaacatcagaactgccaggatcaaccttcccaaaatagttcacaaaattgcaagcagaaaggatgtcagtggcagacaggccatcctacaaatagagaaaccaaattcgttataagttgaacaaagaattaagaccttgaggatatactttcatgagcagaaatgcataagtgtttgtgagatttcaaaatttgtccaaatagtatttactatgtgttatccataccactcctgctgggccatcatgagtcccatgtacggtgaaaacaggcaagccaatgttgaaatttgggtcttcaaaattcactcgaccaaacctgaatgacatcataatgtgttaagttctgaataatagttcagtagccaggaataaataattggcttggccttcttaatatataattagatgatgattagctaaagcctagtgagataaagtaacaaagttgagaagttaattcagccatgaaaagatcaaataatttaatttactgcacctgttctgcagacaggctgcctggtcactgaccacctgaaactgcacctgatggtcattcaggcagtagcttcttatgatctccatgctcttcaccagcgtagaaatcgaaggtttgttctcgtggaacaaattcccaccaagaaggatgaaatcaacctgcaaatttaacagtgcatctccaaccatcatatcaattatcaaacaactcggattatttaaggtagaagatggaagcttttcatttgttattttcagcttaattatgaaactgaaactctgcattctatgtacaaagttttcttgatgtggtccatttgtttcagtatttttaggtcataggaatataatggtggtgtgcattctcgttaatccaaacaccaggagttattcttctactattttaaaaaaatcaaacgactcataaacctgatcatcacaaacataagatgatatttaacttggcaaaaataaaaactgaattaatatcaattttcgataagatatttttcgaatatgttgggatactaaggagaaatttagcaccagtattgatagagaagaaaattgtgagaaaacctgggtttgagggggatcaaactctggccaatggcatgcccctggtagctctctaccagccaggctacacgttgttctcattttttgataagatataccttgtttataactgctaatgagcagatctcctcaaaagtatcaaatgagtcgaatcttcggatctcgtccttctctaggtagccgagatggcagtcagtcgccaccaatatgcgcagcatgctattttcttcttcatccctgaagaacaaaacacatatatcattgcaagtaacaatttagatcattgcaaaagaatagtattgtaacaaaagataacttgtttaagaaaggatagaagaaaggggaaaaggaattaatgccgattttgtgctgatgatgaaacaattgagcacttatttttaaagtgacccttggcaatatttatttggaattcatggtagcttgtacctttaatctgaaaccaggaaattatatagcccacatgtgttgggacctggatgcattattttgataaagaaacacagaaaatgattattggaggtgtggtgtcaatcatttggtctatctggaaaacaagaaatgcaacatgtttgcccccattctttttagctatttcaccgaattattaccacagattatttgctccacgcctctaaaatacgctttctaaaaaatatattctactatttgtattgcttagactacttgctttaagatttttgttaactttatttatcaaaatattcaatttatccctataagcaagtagataatccactgccataattcattcaatgcatgatttgtttcaaacgggcacgaaatgaactaccaaatgttccaattgaactaatacactacacttgtttctagctagatttcatcttggtcaaaaggaggaggaaaagcaaagaaaggtgcaaatgcaggacgcaactattaaagcgggtggcttgtgaagtacatggatcaatgtatggttgagggcttaatgcaagacaactgcaggaaaccctagctgcactgtttggaagcttcttgttggaaagttgaaatgcagctcattttgagcttctcatgtgtgcataaaaactcctttgatgtaatgatgtagtgtggtaattttgaaggatctttggcttaattagactttgctaggtatgcagaatggtggatttgactctcacgctgaatggtgggatttatggtaccaagttaccatgacaaatttaattgtcttcgcaaacttttgtcttttaaccttcatttctagtgacagaaatgtgagaagtgtgcctctcttcctaaaaaaaagatcattgcaactcaattcatgcaggagtaacttctaatgaaaggagttaattgaagtacatgttcaaacctatggattgtattatttaatataaatataagttctaataaaaggagttaagaagcgtacttctacataatgtttacaaatcaacccctcagtaccatggacactagctttagttgctagtaaaaccgaaaaatacataataaaactatgattgcatcgaataatatataaaatatatgtaccatgatgcaaagctagcatgcattgtgtatgtacaagaaaatatgtttttattttacactagctgcagacccaaacttaaatatgtgacatatatatgtcatgttgattgagctataaaacattgttcaagccatcatattgtatcaaatggagtgatctgccagctaccattttcaaatgtttacaaatggactagatatccagttgttaataattaattgtatatatatatatcgatatatttcctatatgcttgcatgcggtacatatgatacatagcatactatattcatcattgaattcgtgtatgaaatgacaagccatgcaatatcccaaccctatcttgtgatctactagcttaacttgttccaaattaattagggggtttctgactagcagtagaaaaccaaactaataataaagcgataaacaattgattatgtatatatcttaattacatttcggcgtctggtttataatggcatatatattaccattataaatatatattttcaggtatatatacatttacatttttacactaattaattagctgtgctaacgatcatttgtatatttggatgttagtttgagaagttagttttgcatatattaattacacgtaaattaattaatttaccacaggtactcaactaatagatcaggacaccagaactgatgctggatggcacatcgatgctcctatagatacatatatatctagctaggtaaccccaaataatgaatgaactcacacatgcatctaggagaaaaaaaaacaccccaattaactctaatataatatatacgagcatatgcatacatagttgagcatatgagtatatgacagtatttatgcaacaataatgcaagtgcaaattaattaacttgggggggggggggaatcaatatatattcactcagatcgatcgagctcacatttggtattatatcttacgccttaattagctcgatcgatcgatctgtggagatcgtcaacgagacgacaagaaacaatgtgctcgatcgatcgttcgaccgcgtcgtcgctgcagccgtcggcgctagctgacggtcgatctgccggccggccgcggagatcgctcgccgatgcagctagctagctagctctctcgctggccggcagcaaatcgatcgagagaagaagagaggaaacaatggcgattagctagttgcgcgcgaggggagctggatttcgatcagatgagcagatctcctaaagaagaagaagaagaagaagataaaggatagctcgcgagctagcttatatatgctcgtatatatgtagctgaatagtcagtcagtcagccttccagcttccagagcaagcctcgctcagctggtgatagctagctagctggggctaccctagctaccttacgggctcatcgtttcagggtgtgtttagattcctttttttttttctaaaaatgtcacaacaaatgtttggacacatacatgaagcattaaatacagacaaaaaaaaactaactgtacagtttacatgtaaattgcgagtcaaatcatttgagcctaattgcgccatgatttgacaatgtgatactacaataaacatttgctaatgattcgtctcgcagtttacaggcggaatctgtaatttattttgttattagtctacgtttaatatttcaaatgtgtgtcgtatactttaaaaaaattttgggcagagaactaaacacggccttagttgattttgcttatcatggaaaatttgaattttcagttgattttgtggttttctcattttagtttattttttagtctttgcttttaaatcgtcaagaacacatatatgaaagttttattcataaattattttttattttttgtttgcaaatataatgtctggctagaataagccaaatgatgggggctagatcggagtagcatttactgcagatgcatttcatactcctccgagaattaatccaggattaagtgtaatcatttcatttattggctgattataggatatatatagcgcttattattggaaaaagttatggacgagatttttgtatatgtatttttaacgacttaaaattactaccaaaataaactaattacgatcaaaagaaactttaacatcaatattaaatttgtgggtagaattttggatatgcggtttggctgattagccgtttggcttgtggaaaaagatactcaatttacgtattaaatgctataaacttgaaaaatagaaagatttattatttcaaaatcacaccatttgacagtttggaagcgtgctcatgataatctagcagctaaaaaatatataaaaaaacaatggtcaatccaccaactatttaattaattccttggatctttttggaagatacttttaatttagagatctctttaatttatggccgcaacgcttgtaagagtaatagaaggttataggcggttagctacaagtacatgtggaggagagagaagaggagaaagaaaaaaagtgctgcagatttgtagcccagctataacacgaactttaagataagatattgtgtatgtataaaaagtaggccaagtattaatggtgcaatatatgtttatataaaactatacagaggctattaaagtggttgtagatgatatctaaatttttagggaaagaagttggctacactattaaactcgctctaaaacgaagatatgtgataaagatgaataatattttttatgaagaaattttatgcttctaagggccgggtacaattgaggacggagaaaaagtagcggcaaaaaaaaactaattacctttaaaattaaattctaaaactcaaaaaccacagcttaaggtcctttttgtttattcaataaaagttggatgtaggggcggagccaggattttgagccactagggtcatagtttttacttatactaatgtcgtgtttaaaactctaattattctcaagaattattttgagctactttcgtgtttaaaatgacattagctcaaaattattttggatctagagctatgaggaagttgggattgtttcattttgttaaaaaaatgtttaaactctatattctataagaatgtaggagtatttttaaggtccaaaaaattaaaagttaagactataaaactaggcatatcaaccatgtgtttttcagacataaaagtttgttctgaaagttgtttatcacttcctctatctcaaaatacaactacctactctcttttttaaaacattaatgttagggtgagaaatagttatggttggttgaaaaaaaaagtaggtgaaaaaattaaatcagaaaaattgtgattggttgagatggaacggttcatagaaaattctattagttgtattttatgataaattttaatattaaatgtaacatattttgagacggagttagtagcttaaaaaacacatctaacatctagtagttgattagcaaaactacaggcctaatgcattgatatacacaactcatagctaaaacaattagttggttaatatctactttagatttgaaacatagttgacaaaaaaaaactttaaaaaaattgtcatggtttggatagagttcatgaaagagtcaacccttcttctattttcgttgatttttagtataaaaaatccatttgcccccattaagatatagtaatttttatgttggtttttattatcatacttttcaaattgctaaacagtatattccatgtgaaaacattttatatataagttattttaaaatacatgataaatcattatttcaacttagtaataattaaaacgcaacactttcttgtttttcgtacctaactttatctctacctttaataaaacaagataatctttttattaggaaaaaatattattatcttcgctccaaaatatattaactttccattataaatctaggcaacattttgggacagggtagtatcgtatattcaattgttctcactagagcaaaaatagttcagttgttcatcacattaattgcgcaaatcctaattggcgcgcacgcgcccctggcgcgcacgcgccggcccacacgtctcatcctcagccattctcagcgcttgcgctggcgagacgcgcgtttatttttttcggaattttttctctatacgtataaaactgattcggttagttctaggtaatgataataattaagataagatttgtcttttttccgaagattattttaagtaataaattgaaaagaaatatatatgtgaagtcaaattctaaaaactttcaatccagatttgaaaactttcaatctagatttgaaaagtttttgaagttaaattttaaaaactttcaacttttcatcccaaatttaaaacttttcatcctagatttgaaaaatttcaagccagatttgaaaacttttaactcaaatataaaaactttcaactcaaatttaaaaactttcaatacaaaatttaaaaactttcaagtcaagatttgaaaactttcaagtcaattttgaaaacttttaactcaaatttgaaaattttcaactcaaattaaaaaactttcaatacaaaaattaaaaaatttcaagtcaaaataaaaaactttccaattctacatttgtaaagaggtgtgcaaaagattaaaaaaaaatcggaaagaaacggaggaaaaaaaacgcgctcagagaaaaaaaaagaggtgcgaacatgaaaaaaaaatgtactgcgtttttttacacggtaagcgctagggttagtaggaacacgcgcggcttcccgttctggcgcgtgcgcgtgcagtaggaacaccccattaattgggcttcaaatcatacacattgaagcaattaggcttcatctctaaaatgggctgaaggcccaataagaaaagtcctccttatacctctataaagtgattgcgagaaaaagaaaaaaaaagaagaaaaaaaaagagaaaaacacaacaccatcaacccccgcatccgccaccgccgccaccaccccctaactccggtaagccgccgccgccgtcgccggcgggcgccgtgtcttctcccatccgtcgtctcggatcttgcagcgaaatttgacaaagtttccctccttgcctcgcagatttgaagcgaccagaggccgcggctaaggtccgggatggtaagttgtaaaccctcttctcccctcctggggtttcgggtgctcgattggatcgatcccgggtgctagttcttggtttggtttggtgggattgattccggtttcgtgtcttggtggagcagtcggggcgcaaggagacggtgctggacctggccaagttcgtcgacaagggcgtccaggtcaagctcaccggcggcaggcaaggttggttggtttcatcaccagtttaggtctggattcttgaatactcgtagatgtgggtatagttttgtgccaagaaacctcagtggcaggggcaggaaatcctaggtctgcagcaaaattgtagagtagggtatagccagctcgaacagcctcattataagtgaaacggtttaattagcgattaaaaatataatttatgggtaaaacttttatatatgagttcttggtgatttaaaagcaaatgctgaacaaaagaaactacgatgaaaaatcaccaaaatcaactctataatagttttaaaattcaaattttcacttacgcttataagctgaaggctaaatgatggggttggaagaagctactaattatttcagtaaaattcactgtgcgcatcagctccagtccacagtaatgatctgagatgtcgagcgcagcatccatgtggctagttttaacatgtcctctgaatgcttatagcacataattgtgagttttcaagcatggtggttggtaaattaaggttttgtcacaaattggtcatcttttagcatttcttgtgatggatcctgctgtccaagggccatccgccacccagttaaaattaacgagtagcaactttatcaattgacacttcctaattccttaatattctttcataatgaataagtctggaaatgagctccgctcaatcccttaaacattgattccagtgttctgtatgataccacatataaaccagcattccacttgcattcattcagaatttcagcaacaccaatatgtgcatgtggagaggatttggccctactagaagcttaccgccttctcttccagttttttactttcaatctgtatgctcacagataccagattctgtgattgcatatttttgaattacaccttgtattctgtttgtagctaacctcatctagatagtgaaggcactctcatggttggctatcctgataactatatgatgacttttcacctttattttttttcttttttcagtatcattttacggacagagtggtaaaatatcatatgctaactgtatattgaaatagaaactccgtcaagcagatgagcggccccttatgtaatatcttaagttttgacattgtttatagtagttgcaaggaggttagccattagcattgatattaagataaagattgaaaatagactaaaaaatgacagtagaactgtttcaatttccagaaaactcgtttttgttatcctgcagtttgttataatacactaataccacatcacaggccataactttggtatttctacatctgcagttacagggactttgaagggctatgaccagcttctaaacttggtgcttgatgaagcggttgaatttgaaagaggtactgctgcatatgttgatacattgcattgttttgtttgatccccattggtttggagttttgagtataaatcacaaatctatgtatttggaatcttaactaagaagaaatttccatccttcatgcatcttgtatgtttatgtggtgctaatctactgttatgtacaaagaagattgggctggaatacagcataataattacacatagactaaattttagttttcccattgtcaaacaatcatgactggagggagtactacttgctaatgtaggtgtggtacagttgtagataacaaatgccttattaaatcttttcctgcaaagtttagtgaagctctcatacatactttctcattttgtagagcaagatgatccattgaaactatcagggaaaaccagacagcttggtcttattgtaagtttctttgcagtattgatttcaatatccaggactgtattgatttcaatatccaggacttatctttgtcctatattatttatattgcttgccgattgtagttctgatagttcttttctctaatacacgagatgtgtgtatcatttcattaagagaaggaagctctgagagtttttatttccatgctatacgattattttgcactttgctgaaatctgcactagttttttttttttctggaaatgttgattcgatcagatttacaacaaaacagtgattaaacaaaaataatctcaaaatcaagagcttggtttcttgcaaactactagtttgtttctgccatttgatttctttttggctggtttcatcatcctgacacctcagctccaacgactgtttgttgcaggtctgtaggggtacagcggtgatgcttgtatcgccaaccgatggaacggacgagattgccaaccccttccaatctgatggtgcataaacctgcaggagctgatggttctcctagtcaagatccatgctctcccagtagagaggcctttgtattaactcatgtaatctggtgccacagtctcttatgactcgtgtctcttatgaacaccaggtggtggtctgttctgtaccactcgaaactgatttctgaagatccttgctttgtgtcagatatatgaatcgcattatgctcttgttcggtttgttcatatactgtgcatggttggtttctttgcttggttcagctttcacctttgccccatctgtgactgtgagcttgcttgcagtctcttctgcataaactgcgtttgcaacagtcggaaaaagacatggaaaagaacagagttaatttaggcatttgagtgaccttccgtttggtggctgttcctgcatcaggtgattcagatcattaccttaagcagccatgtgaagcttcatagattgcatattcttctgccctgtttagaatgagttcctgttcggattgtgtattattcaatcgacagtagtgacaggaatctgttaccggatcatcaaaatctgctcacgagcgataccatcagatttcatggaatctgttactaaacatacaaactggtgaaatccaaataaattgtcaaaaaaaaaattcagtttgaaaatttttgaacttgaccgaaaaacaagtggtttgtgttttcgacacggtctggaaagtctgtacttcgcgaaattcaaaccggattcccctggaatcctgaatcaacaaaacaataagcaaggaagagttacagagttaaataaatattatacacgaacgtactaacaagttgagatggccgagttggtctaaggcgccagattaaggttctggtccgaaagggcgtgggttcaaatcccactctcaacataatgtttttttaccattttatttttcctaagctattttccaatccttccattttatttacttttttcacaatgcaaacaaaaatgcccctgttaatttctccttttaattcacaataaagtccactcaaacaattttgttccactcccgacacaactttgttaccctttttttgtagctatcttcaaatccttagcaatgacaatctttatttactttttttttggcactgcaaacaacatagcccgtgttattttctcctttcaattcataaattgaacaggcaacagaaatagctgcagtatccctttgtattttgttatactgccaatctcaatctgtacctcgttacacggatctactcgctgcatcacctcatattggctcaaaaatagttaacagttctgtagtattgctactgggaacgagcataattgctagcctccagttctaatcattcatccctacgccattacacagaaatttagagactatctcctcccactgaaattaccatgtcagcattgcagttcaagctagcaaacatgctggctaactgtaaacttggtgaaacttgccccacattcgagtcgttgggtctgaccatctgaatcaactggaaatagaatgttgccacatagcttcactccgataaaagttggtgcaatgcacaaattactctcgatcgcaatcactaggtcataggaagttcgcctgctcttgaacttcgccaactgtagaaaggaagatatcaggtgcaacactaagtcactgtaacagcatgcaaagtgaattctgaaagcaatttctcaccaggaagttcaacggctaagttagcttgagcatcagcatccgtgttaaattcctacataataataagcaaacgtgagtggtacagtgattgaagttctcgcttccagtagtttggagtgatttttaaaaattttaatagtacatgaagaagtgtgatgattgcccattggagaggcagtttcagaggggcaaataagggagttgccaatttccaatggaaaataaagagttaattcaatataatgtaatgtggtgccaaaattcatatgccataccggaatgatagctgatataaaataaaatacagcaagcgtggaagacagcaaatatatggaacacctaccctcaaaacatggttgatttgaaatgtatgaaatcttcccttaatttccttaacccttttgcacaagtcagccatagtatcatgcctagcacgccatacatctgagacctgctccagaaagtcaacatgttacttatgttaagaaacgttaaaattgatagagctgccacctgctagaaaagctcttcaacgagctgtagtgattagttccaacagagtttgttatccattgaggcattgataatcaaggccttgattcaaaatatgtactgatgcctcaacttgcacttatgttgatggatgcagcacagataatttgataaaaaaattctttggtgaggaaaactgaagaacatgacagatcaagtaaagcacagattaaaaattttgcttttaaaaaattctatttgttggaaatttaatgtttgaatagaatgatagactgtgcatagtcacaacaaactgcagtacaacattcagttatctcctgatgattctaggctaaagcatgaaaaatagaagtagtgaaggttcaaccaaaacacaaacctggttacaaacaagcttagaatctccttgagcacgtatatacttgaatcccttcttggcagcatatgttagccctaggatcaatgcacggtattcagcagcattgttggttgcaatacccaaaccctcccgtagttgagcaatctccagtcaaacagtaaaaacacatcaccagttagtcatgataattgaagattaagaaagcaccccagtatagtactgtaggtgtactgtgtacataccacagttccatctagtcgccttattactgctccagcacctgctttcccaggatttcctttagaagcaccatcaaattcaagaagacaagagagctgtataagatgaagtccactggtgagaacaagtcagcatttcgttgtagtgaagacaagtccccaagtacaaatgttagtactgaatatctaggacaaataaccaagcaagaaggcagaagcatttatagctagcacattccattgttcatactcacagaactattaggtaatggttcttgttcggagactttgggctgtttctttgacggtccagtttccttcagcaaatgattgttggtgagagaatgtgatatgtaggcaacacattttctacagcgggcactttttaacacaaacacatcttaacacttagcttgaaaatgatcgatactcaccatctctagtggcctttttaaagtagaagtcccagttccatcaggttgctgaaacaaaaagcggcacacagtatgttatgggcaaacacagaatcaaatagtaacgcaacaaccttggtggatataacttaatgatcaactcaacattcaaggtatgagaaactacatgtgagaaaaactaagaccctgagaattgggggcagtttggcattcagtatttaagtatactatattaatcatgccattatactctgatgatgatcatatatgtctttctaatataatgtgtagcatgattgaagttcaaacagataatgaaatggagtgaaatggtaataaggtcaaacaaatatatagaaaatgcgaacataattaaggaagtggtgcttggtaactggaaaggtaagatccattataaatgtctaggctgaaattgctgtacatcaacaaattagcattgcacaatacactatgggggcacagagaatgatcctttaataggaaacacgttaacatatctatgcaacattggcaagtgcagaggcatatttctgaaaaaaagctgaaatcacaaacatacatcgtctttacctggaaagggcatggaactaggtcatcaaataattcatctcttgcatctgctgcattaatggagtaaagaggatttcttaaaccgcgcgcagcgaggtattcttctgtctctttacgcaaagaatagcctttgtacaccgtcacagaaggatcacatacctagtaagatatacttcacataagaaatggctcttgactacaggtacccgttaatgtcgttgtgttaccagcaagagaaggttaaattttgcatcaatgacactcatcactcttatctcctaatctttacttctctacccactaccacaacaataattttagtatcctgcgaaacgcatgaacaaagctgcataatgcgtactataaagcagtagcccatcttttcgttcaaggaatacagctgagctacaatgaagtgcaaatgtctgcttatggtgtgacattcatagcaaatgaaatgcgacaggagagcaagtgtttgattcctgtacttctgtatttgtgaggagagatggtgaatgcacataaacataatgctagaatgagcagtcaaagaggacggcgtcgcctttaccgagttgctgacttgagcctggcaatcgctgaggctcttgtagatgccgatgacgtcacccttgcggacgacatagaacggctcacctccgtccatcgacggcggcggcggtggctggctgctctgcttcgcggcggcggcggatctcttggcggagcgccgggatgaagcggagaagaagcgctcgagggcaaggccaatgggcggcggcgcgggtggcctgagcaccaggtgacgctgctggtggtggtggtgctggctcagagctcctccggccaccgcgtgcctcctccaagccactctagaaattccacagagagaagaagcgcaactcctcattgggtagctgccagggtgaaacccagtcagggggatggagcttaccaccttgctccctccccggcggcggcccggctctcctcccgcgttgctgctgctgcttggggagcgcgccgcaatcgattccggcgaccggcggccggcgtgtcgtcgggggggaagaagtggtggcgccggcggcggagtagggttccacttccactttggaatgcttgcctttgctgggcttcgtgtcgggtcgatttgggccgccctattgggccggaaattcgaactatatttcggcccgtttacattgagagaaaaatcaagaaatgtacttgacaaacatccaagtcaaaaaataccatcggtgaatgctagtttcacaaaatacaaggtccgacaaaaattgaaccgagaatacaaataatctttagtatcggtactaacaatagcaatgtgccgttagacattttaaccgatgctaaataccttctttagcaccggttcttaagaaaaccgagatatttgtaattttcgccgatcgagcaaaagatcggtttttcagtggtgtacatttctatcgtatgtagttcttcttacctgctagaagggttcagaacaccctatgtttttttctacttaagtttcatcgtatggccaaaattgattatagcttttttttatttagtgaatccaatgactaatattcatcagatatggtatattttagttgtatgttgggtttcacttttcattagtcaggatatatcatttgtacaaacaactttgtccaaaaatactattgtcgttagggttttattgccatccctctgttaagtgctataggattaacaatgtatttaatggaaagggacaaaactctaacaacaacgatatttttaggataaagtcgtacgatgacattgatagaactcacgtttattgatggtatttattggaattgggcactcgttgtttattgaattctcttacaataatgggccagagtattgggcttctgaaattgggccacggcccatgaaggcgtggctcgtaaaacctctcctccgtttagcccacgggctgagccgtctcctctccgcaatcgcatcgcctccgacgagctcgcggcggccggccggcgaggcgactgcgactccgacgaccatggacgccgccgccgccgccttcgcccccggcgggcagctcttctccgtcgatcccctcgagcggcacgcggcgaggggccatggcgtggtcacctccatggctgccggcagcgacgtcatcgtcctcggcacctcccgcggatggctcgtccgccacgacttctccttcgaggacgcccatggcacgtcctcccctcctcgccctcgcagccgccatcttcgccgccgcctcgcgcttccgctgatcgctcctctgctgctgcagatctcgacctcgggaccggccgctccggcgagcactccgtgcaccgcgtcttcctcgaccccggcgggaagcactgcgtcgccacggtggtccacccggggggcgccgagacgtactaccaccacgccaggtggccgcgccccaagctgctcccccgcctccgcaacgtcctcgtcaatgccgtcgcgtggaaccgccaaaccatcaccgaaggtgagctaatactactgcatatactgttcctcgatcgaattgtgtctcgattccggcagtccgtgctgtgtatttgttcttgattgtggagttgtttgtggtttcggtgctgtagcgtcgaccaaggaggtgatcctggggacagaggatgggcagatcttcgagattgcagtagacgaggccgacaagaaggagaagtatgtgaagtcgctctttacgctctctgagctgcaggagggcatcaagggcctgcaggttcgagtttgttgccagaggccatcgagggctgcggttctgtacttgtgttgtgttggtgttatttggttggaatgagcgtgatggaggaatttggttgtgcagatggaaaccgccgtggttgggaacgccacaaggttctatgtgatggctgtcacaccaacacggttgtactcattcacgggcatcggttcattagaagtaagtacaattgctcaattttatcagctccaaatttcggagacatacaccattatagaatgtaatgggagcaatctagatcgaatttagtgaaaagaaagacccagatttttcacttcggatatcaaagtcctcatggacggtgtttcttgatttaataacgtgactcagtaacctcgaaagtgctatactacgcgaagtcagtatgcctcttttcttacagagagatatgcgtgattagaacagcttgtgatgccttttgccattttagagagcagcattgcatgccaacagtttctatagaagattttctcttggtttccagaatttcagccctacaagatttatttgtttactcattttctcttgatgtaatatctaataacaactatattgcacagactgtttttgctagctattctgatcgtgcgatacactttatggagctcccaggagatattccaaataggtgagtataagggcaagtgctatggtagatgtgactaccacctccaaatttatctattttattcactcataaactaagaggcaatccatacaatgtatcacctctagtacacaaataccaatatatctaatactctcacatccttcttgaaatttgtgtggaggttgcctcttgatttaggggtggctcatcatctctctcctcacttctttccttcacatcatcactcaatccaatgtggcattcttaggggcaacatatgggtcattatagtacttgccctaactttatgtgatttatacagtactatacagtggtaactacagtttgtgccacccactagaatactttcttttagtgagcttatgacaatgtatccattgcatggaatccagtgaattacatttctttatcaagcaaagaagggctaagcattttggatggctttctggagctggaatttaccatggtgaactgaattttggagctcaacacaggtgaactgtagtttttggatttaagttgattccatcatgtaacatgtaactgaagtggattattaacttatgttttctttgttatctaatccaaatgtcattgaactgctaagctgctagcattctcttagtgggcatatttttctaatagactgagccttggtgtgccttttgaccttataagaaatgtggcaagtaatgtaatcccccactcctaaacataagttctttagggaaatgtaaagtagctactttggcctcaggaaaaacaataatagttttctcatcaagataatcaaattgtcatcttactaataatataaatataaagtgtggtagaatgatgatagtcatacaagaattaatgatcaatgttatgccttcaagaacttgatgtcaatcatgtcactggatattatctatgaacagaactataggactacatgagtaccttagaagattatatctaatgaatgttcagggttttatatattgcaaaccttatgcacttcaaacttgataattctctgctagctgtttgagcttctctttagagacatgcatgccaatctcactgagccaggtgttggcactggcacactgcatgtgtgcaccttcttacttaagtgtattttgatgattatatataaaagaactacttttacagttttatgaagttcggctccatgaactcttaggatctcaatatgacactgttttttctttcctttgggataacttgcagcacttcttttattagtttgtctcccattctataataataaccatataattacttttttctgtattttctatagtaatttgttaaactaaatttagttttgcagctctacaagtggggatgagaactttgtcgaaaataaaggtttttttgactactcaaaattgggagaatctggtatcaagccaaggtcatttgcattgtctgaattccattttctgcttctcatcagggacaagattaaggtacaattctttttaaaaaatctatactgttttcactgtgattcattttgctttctgtcactattttgtcttccctgttgttttatgtattcctttacaaagcaaaagcataacctgtgatttttaggtagtgaacagaatcagccagcaaatagtggaggaacttatagtcgatagttcaccagaagttacaaaaggaataattggactttgtagtgatgcatcaactgggcttttctatgcatacgatgaaaattctatattccaggttagagactatctgattcttgctttgatgtaataattgccttcagagtccagaattgtgttgctgatgaagctatatatttagatttcatcatctgatgagggtcgtgatatgtggcaagtatacctggacatgaaagaatatgctacggcactgtcacattgtcgtaactccttccagagggaccaagtctatctagtgcaggtgatgtttatttgcacttcgatcccatgcactacttttttctcctttattattttcccctctatgataagctggaccttttttgttttgtgatgatcaatgacttctgttattgtataaatatcttctcttttgtaggctgatactgcattcaatacaaaagagtactatatagcagcttccttctatgcaaaggttaaacccacactgtttaattctgttccttatttttttaaaaaaaaagattttgttgtcctgttcacgttgatactaaaaaatatattctcttggtttcagatgaattatatcctatcatttgaggagatcagcttaaaatttatatctgttggtgagcaggtagtttagtctgaacttctttttttcttttttctttttttttgtgaggagtctgaactttctaatatggtatattattgcatgtttgtgtaagatctatctttctaaaatactcatctgccatttgatattgtcaagagcttctctgagatatctttgcttattgatgtattcaattgttttttttttccctgatctttgtcactgatgcaaagttcaagtgttgctagttccaagattgataatttgaaatataatataatgccgttaacattgtgaaaacatagaggaaatgttctgtcatgctttggtacaatctaagattcattctagtgtaactatttacatgatacatgagaatattgtgattttatttatgaaataattatcttcctcaacttgacaggatgctctcaggactttcttgttgagaaggcttgataacctaacgaaagatgacagaatgcagattacaatgatctcaacttgggctactgagctgtacttggacaaggtaccaattgtttgtttttcaaccttctaaactaatataacagtcttcatgacaagaaggctggtgtcctattttcattgtttgtacgtatcctttttttcctgctcttaatacaaagatacacagtcctctgtattgttgagaaaaaggtaataccagggccggccctagggggggtcaggccgtgcggccacccgaggcccccaaaatctaggggccccctatgcacatacagtatatatactatgtattgtataattctagtccacgtgccatggatctatattaagttagatagctgaatagcctaatacagaaaatgaaatttagtccatcgttaggcctgttttaacgaagccgaagcaatcttcatttgactcctgtcgctttgccttgatcacatcacgccactcacgtcatgccgcctcgatcacgtcacgctgctcctgcgctctcggtgacttctcggcgtctcgcaaacgaaaacagcaagttggcaaatcgcgactcgccagtaaccacgctcgtgtcaatcgtccgccggtcgacttctctgctcgctactgctatttatttctcattggagttttaaaatgttatatatagataattttgtcacatcgaatattaaatggtatgtgtttatcagactatataaatatataaattagtttatgtatatatgtaggggcctccatataagtttttgccctgggcccccaaaaccccaggaccggccctgggtaatacaagatatgttccattgctattggaaatctttcttcagtcttggtttcagtatacttgtacttgtgattattgcgggggcttatccagtatatttggtgcaatatttgtagattaatcgcctcctgttggaagatggcacaggagccacgtcaaatgctgtagcagattctaaagactcggaatatcgttcaatagtaaatgaattccgtgcttttctaagtgatagcaaagatgtattagatgaggcaacaacaatgagactgttggaaaggtatgtggtaccattgttgcacaatatgcttcactggtattttaggttgtttaaattctcatatatgtattgtacaggtaacttacatatctttggatagaacctgcataattttaatattccatacattaatactatatttaaaattgttgaacatttgccaaacaaaggacctgatttaatgtccatttgctttaaactcagggctttgtgtacaaccagtaggatttgttctattaagaaggatatcatctttgagccttcaatagctcatttatttaaaaggggaaatgcagcaagactgcaaactgcatcaatggatagactataaaatatttcattatttagtttatgcaattctgttgacttgtcatgaataagatggcggtgtgttctctccatttgttgtgttgctgattatatgtgttccccaactggtaccttgaaaccttttgcagttatgggagagtggatgagctggtttattttgctggtttaaaggagcaacatgaaattgtggttcatcattacattcaggtcagtgtcaggcatttatcatctaaaggtgttaaatactaatttgtgtcgagcataacaatagtaaatagtataatctgccaagtgctagctagtattaacattatgtttgctaatatgtttgagcaagcaaagatatgcataccttgattatcggcctataatgggtgataagagcttgtttatgccacaaactaattgattattttatagaacagttcatgtaacatgtgctgggatggggcttgtgccagccagatatttcaggctaggctatgctttgagcaggctcaatgccagcatgatcttgcattcttaccatagtctaacatcaaatttcccttctatctgttctcttgagcaactgtagtttctatatcattcttctttgtagaatagttggaaaggaaacatttataatattactggagttcgttgcacatctttctttgaagccaattgcttcaaaatcattgcattcagttatcttgaaaatacaagttttttacttattatatgaggtaccttttgcacttggaacccattggcattagctgagatgtcaagtccttatgcattttctatttactttgtcagcaaggagaagcaagaaaggcattggaagttcttcagcgacataatgttctagtagaccttgtggtacataatggctttacatttattctttgaatgctgcagtatagaactcaaaataagtttattattgattctaccacaacaaggttacattttctgttttacacaaaattacacatttaatattttttaattctagccgttgctctttaacttgtttttgtgcagtataaatttgctccagatttaatcatgttagatgcttatgaaactgttgaatcatggatgatggcaagaaataagttgaatccagggaagcttataccggcaatgatgcgttatgtgagcgaaccacatgccaagtatgatatgctaatggcttcttatacgttcctattcccctattgctataatactatatgaatcctttaatattatgtgatatcttaacagttgacagccttaccgtcttttatcacaccagggaactctgaatgctatatataaaaacattgttactattgaaacgaattttgctactggtggaagtgaatttagatctgttacacttaaatcccatatcagatagtgataattcgaatcaaacctaagaatgcctaaactccctatgttcagaagctctggaacaaactgcaattctatgtagccaacttgatttccataatcaggatgatgtgatgaattcaactcttgcaggaatgaaacacatgaagttatcaagtacttggaattctgtgtaaaagatttgaacaatgaggatcctggagtgcataatttgttgctctcactgtatgccaagaaggtagctcttccagtagtgcattatttgttgctcttgctgtgtgtgaaattacactttatattcttacaaagtaggaaaaatatcatgtaattaattttgttgtgtatgtttcttttttatgtgttggaaacattaaactgtaatagcagtaattgcttactttgcactcaattcatcattcatgtttctggtggttcttatgaggttgtcaatgccataccagtcaagcgtatatttgtcaacacatataactaatgattttgtatgtgtactctggtttattcatgtgcaggacgatgagtctcagcttttgcaattcttggacactaagtttggtaaaggacagacaaatggccctgagttcttttacgaccccaaatatgctctgcgtctatgtcttcaagagaagagaatgcgtgcttgtgttcgtatttacagcatgatgtccatgcatgaagaagctgttgcacttgcattaacggtaaacctcattcctcactaagtctcatcatttctttaagagtctactaattccattcaataagcatcccttgcgctttcgcatattgatggtgtaggattttgaagtgttcttatttttatgaggctttcttattcctttactcaatttggtccttgctaggtggacttagagcttgcaaaagcagaagcagataaagttgaagatgatgaagaacttagaaagaagctgtggcttaaggttgcaaagcatgtcattgagcaagagaagggagtcaagagggagaacataaagaaagctatagaattcctatcagagactaacaacttgttgaagattgaggatatcctgccatttttcccagacttcgtattgatcgatgactttaaagtaagatataagtccaggcagtcagctgctttacagaaaaattcctcctaatgtccatttctctgttgaagatccacaactgcaattttcttattaacaaaaaagttatctgaatgaataaatttcgttgttaattattactagtccacattttctgcattacctcttttctcagcattaacagtgaaaaatattgtctaaacaggaggaaatatgcaaatctctcaaggactatgacagccaaatcgatcagctgaaacaggagatggatgatgctactcgtggggcagacaacatcagaagtgatattggtgcccttgctcagagatacactgtaattgatcgtgaggaggaatgtggggtaagaaactgctcacgatacccaaaatggtgtagtttaactaatgttgtgcctgttcttttctttatatggtgttacatgagtttccttgttttcgtttcaaataagtaaagatgcaaatatgcaacaaagaggaaagatgacccccacgctatattgtttaatatttgtgttcttggtattgcttgttttctcaagtacacttaaaattattttttccattttgattcagatggttttatgaacttatgtactaactgtcttcgctgctatatcatggtgttaactcctcactgtgcattaacaggtgtgcaagcgcaaaatattgactgctggaggactgcaccaggtaggaagaagctacacatctaccggacacatggcccccttttatgtgtttccttgtggacatgcctttcatgcgaattgtttgatcgcacatgtaactcgttgtaatagcagccaaacacaagtaagtccctatgcaacatttcaattgttcatttccttattttgatagttcaatctcttgtaccaattagttacggatgaattcatttacctgtaggctgaaaaaatactggacctccaaaagcggcttagcctaatggacaggaaagcagcaaaggaaaatggcggaaacatgaatggtgaatctattatcagtgcgacaccaattgacaaggtttggtcacatccaaactacgaaatcccgagatctgcatttcttgtactaatgccatgcatgtttcttgtgacagttgaggtcccagctggatgatgctgtagcgagcgagtgccccttctgcggcgatctgatgatcaaggagatttcattgcctttcattctccctgaagagtctgatgaaaaggcttcgtgggaaattaaaccgcaaccaacgggtcagaaaattcttccaatgaccatgtctatatgattctactagtaaaagctgagatggaatagaatgtttttcgagtttgtatgtgattttgtaatgctgaatatatgctctttcatgtccaatttctggttgggtggctttggtttttgataattgcccagctcgtgtatctttctgacgagcagaacattagctatcctatccagaatagtttgtgtacagaaacatcatcttccacttcacttgggctcttgtacatgcctcctttcatcaactttgctcataataaagttgcgatttgttagggcatataggcgctgaattatgtttcctcaatatctgaaataagatttgataacttcagaaaacaaaaacagaaaagcatttttgtgatgtaaacctgcaagaaacaatcgcaaaatggggcactatttgtcacttgattttttttaattacttaaaattaaaaagcacagacgtcctcgttggaaaaaaaaaaaccttcactccggtgctttttactggaagtagaaaataatctaaaccgttgatctcaatggatccaagggtttagatctatttctactaccatctcatataacggtagtagaatcgtggaagggtaatattgtctaggaaaaaatatttgtggagaggtataattgtaattatgcagtaattgtggaaaggccaagaaagaaatagtaaaagtctaaaaatggattgaaaaggataagactggcattacaattaatcaatcttaacccacagcatcacatgggtagggggtaaaagatgggtaaataaaccaactgtaagaacaaaccaagagagaactgtctctgaacaaatgctcctaaatttagcaacttgtcaggacacaaactacaagaacagaaatagaaagaacagtctcatccatcagtgcagccattggacagcattgcgacgctgctttctctgcccataaaaggaattgaaccccacaccccccctcctactcttcctcctcctccctcctcgccggagcttggctgagcttgagctgagctgagctgatcggcggcggcaatggcgggcggcgcgatggtccagacggtgggtggcaagacgtacccggggaagatgaccgcgttcgtgttcttcacctgcctcgtcgcctcctccggcggcctcatcttcggctacgacatcggcatctccggcggcgtcacctccatggactccttcctcagcgagttcttcccgtcggtgtacgcgcaggcgaaggcgagcaaggacaccaaccagtactgcaagttcgacagccagctgctgacgctcttcacctcgtcgctgtacctggcggcgctggcgacgtcgttcgtggcggcgtgggtcacccgggtgttcggccggaagtggtccatgttctgcggcggcgtcaccttcctcgccggctcggcgctcaacggcgccgccaccgacgtcatgatgctcatcctcggccgcatcctcctcggcatcggcgtcggcttcgccaaccagtccgtgccgctctacctgtcggagatggcgccggcgaacctccgcgggatgctcaacatcggcttccagctcatgaccaccatcggcatcctctccgccaacctcatcaactacgcgacgtcgagcatcgagggcgggtgggggtggcgcatcggcctcggcctcgccggcgtgcccgcgctcatcatcacgctcggcgcgctcgtcctcccggacaccccaaactccctcatcgcccgcggctacgccggcgacgccaagcgcgtcctcgtcaagatccgcggcacggacgacgtccacgacgagtacgacgacatggtagcggcaagcgaagaagccgcctcgatcgagcacccatggcggaacatcctccatcgcaagtaccgcccgcagctcaccatcgccatcctcatcccgtgcttccaacagctcaccggcatcaacgtgatcatgttctacgcgccggtgctcttcctcaccatcggcttcgccggcgacgcgtcgctcatgtccgccgtgatcacgggcctcgtcaacatgttcgccaccgtcgtctcgatcatctccgtggaccgcctcggccgccgcgtgctgttcctccagggcggcacgcagatgttcatctcccaggtggtggtcgggacgctgatcgcgctccagttcggcgtcgcgggcgtcggcgagatgtcgcggtcgtacgccatcttgctcgtgctgttcatctgcatgtacgtggccgggttcgcgtggtcgtgggggcccctggggtggctggtgccgagcgaggtgttcgcgctggagatcaggtcggcggggcagagcatcgcggtgtgcgtcaacatgatgctgacgttcgtcatcgggcaggcgttcctcaccatgctgtgccacctcaagttcggcctcttctacttcttcgccgggtggatgctggtcatgaccaccttcgtcgcgctcttcctgccggagacgaagggggtgcccatcgaggagatgaaccacgtctggagccggcactggttctggggcagctacgtcaccgcccacgacgtcgccggcgccggcgccggaggaggaggaaaccgcagaagccacaacgtctagctcttacatatactattaccgtttacgagttacgcgagagagagagaattaatgggtaggttgtgtaattaggtaatgcaagaattaattaaaccaattaatttcaagggacaggtttttaattaattaattaattcggggaggggggagctttagaatttggtcggggcaggttaatttcagggtatttgttgtatagattttgaattttataggtgttttctttttatgaaattcttatgtagtaaattctttggagagcgctacaaatatcgcatggtgttgccgcgcatgtagagtactgtttctctaaccaataaaaaatgtttcaacaaaaatgtatcagttatgtgtatcttgaaaataaaaaatgtttcgttactcttgagaaatgtttcatcgatcgggttaaacagttttaactatagatgcaacacttgaaaactacttattgcaacacaaagaaaacaatacgtggaatatccaataaaaaaaatacaatgaagcattataccacaacctggtgaaacaaaagcaaataatggattgcaattatcgctgaactccaagagaaaaaaaaaacaacaaactttgccttcttcttctgccccagccatccctcagaactcacatgtagttcttgtcggtgagatcctcgactgtagctagagggcattgtgccgggcctcgtcgtacctccgatgacaaccagccaccaccatcgctcccatatccttctgcatctccttctcttgttcgtggtattgttaggcgtccatcacttcctttctctccacgtttgccgccaccggcgccgctgccgtggcctcttttaaaaaacagagttacacctgcgcaaatatttgttagtcctaggatttgagtagtaggtaacatgagttgggataaacagacactagctactcggtttgaagttttttattttatttttttgaaaaataaatttcagtgagcattccttgtggtatatattatggtaacttccattgaaatacatattattttggacaaactttttaaaagctaaaagtgtcaatatgttctaatcaaggctaaaggcatgcttggcacaactccagttctagctccacatctcttggagttgagctggagccaagccaaacagtttcaactctacataaaatgggagtggagctaggcggagtgctatcacaaaatgaaactagagatgtggagctgggtttagactgctccacaactccactccaggcgcaactcctgaataacccgtttgatagagctccaactcctaaatttaactttaggagttgggtctgtttggtagagcttcaactcctaaatttagcttcaggggttgaatctgagtggagttatatgaagctgtctaaatctagctccacctctttaattcattttgtgatagcgcaccacccagctccactcttatattaggtggagctaaaactgtttggctgggcttcagctccaagagaggtggagttggagttggagctgtgccaaacaggccctaaacctagctacacatctctagttcattttgtgagagcactccacccaactccgctctcattttaggtgaagctgaaactgtttggctgagagctggagttgtgtcaaacatgccctatattatgtagagtagatttattttgaaaaatacttaggtgttccatccgaattcatgaattttacatgattttttaacaagttagtccaattgtaaaaagaatgataaattcctcccttgcaaaaaaggtaaaacacaatacttaagcagttcatttcattagctatcctactaataccaaagatttgagaagtagtgaaacaaacactccctattttttttctttatgttctgttttttcaaggacttattaattttatttgggaggatctttttccaaattttgataattcccactcacctagcccacattcttctttttttttaaaaaaaaagaagaatataacagtccacaaacccagttccatctctaccaagaatcagacaagccattaaatatttatttcctcgccctcagttttatattacaatatgctttgatgtttttccatagtcaaatttatttaagttaagcaactttataagaaaacatagcagcgtttttaataccaaacaaatatactatgaaaatatattaaatgttaagtttaatgaaactaatttgatgttataagtgttgcttaatttctccatagatttggtcaaactttgtaggagtttaaccatgaaaaaagggtaaaaatatcttattaactactttaaaaacaaacatagttgctctccttctaaaaaaccgctccctcttcttcaaggaaccgtatcctctgacattacacagcaatgtcaccgcgtgacattccttcgatccacaccatccattctaaatcaacggccacagactaattggcatctaactaatcaaaataactagcagatcatgtaggtatatgtacttaataggtgggaaggatttttttttgttagcactaaagcagtctcttcatctttgaagattcagaattgccccgttttgacggaggatggcagcacaaaattgatgcacagggattcacttcctccaggataatgtgctaatcgctacatctaacaagtaagtgaaacataattatcatcatatgtcgattcttccatcggtcaacgatgtttgcctcttgaaaatgcaatatctgatctagggacactacacaatctactaattagtttggttgattgcatgtcaaataatctacggccgttgatttataatggatggtgtggattgaaggaatgtcacaccgtaacattactgtgtaaatgtcagaggatatggttccctccttcaaaaatggattgggattcggtgacattcccccgtgacattctcggtgacgttgagtcactgacatgggtgacacggagaa

SEQ ID NO: 5610 - DNA, 4005 bp, Oryza sativa
agggaggcgtcctctcatgaataattccaaactcttcgcaaaaggatgcaaactcattggaaaaatactccccacctctatcagacctcaaccgtttgattttcctttcaagttggttttctacctcagctttatagattttaaagtaatgcaatgcttcatcctttgttttcaatagatacacacaacaaaatctagtgcaatcatctatcagtgtcatgaaatatttctttccccctttagtcaacacgccgttcatttcgcacaaatcggaatgaacaagttctagaggtgccaaattcctcgcctcagatgccttgtgaggcttgcgaggttatttcgattgaacgcaagtatggcacttggaacctttgaccaaagtgaattttggaattaaactcatgttagctaagcgcgtcatacaaccgaaattcacatgacagagtcgcgaatgccacacattagactcatcattctcgctaatatggttcacaacattatgattattacacatgtcattcaaagaaaagcggaacaaacctccgttgtcataacattttccaacaaaagtcccatatttagatacgacacatttattgcactcaaacacaagtctaaaaccttctctacacaatagagagccgctaactagattcttctttattgaagagacatgctgcacgttcttcagctgcatggtctttcccgaagtaaacttcagatcaaccgtaccaacaccatgaacagccgcaagcgacccgtttcccatcaacaaggaggaacctcttccgacctgataagaagaaaatagagaaatgtcagcatatacatgaatattagcaccagtatccacccaccaatcaggtgagtgaaaaacagagagaactgtaggtaatattttaccgtaccccgatgttcctccgccctcgctaatgaccatgttcgcagacttcctgtctttgcgctcaggacagtccttagcccaatgcccagacttgccacacacaaagcagtctccctttgcctttctcttgcctttcttcttaaagttggttgcagccttggatttgacatcaggcttgactttcttgttgttgtgggatacatgagggttcttcttctgtaccatattggcactagaacctccctcaacctttttgccccggacgtcctttgccctcgccttctcctcaacacccaaagaaccaatgaaatcagaaacactgaactcttgtctcttgtgctttagagaagtggcgaagtccgaccaagaaggtggcaatttggcaataatgccacccaccacaaacttgtccggcaactcgcagttgttgttctcaagttccttagccagcatctgaatctcatgagcttctactacagaacggtcatcgaccatcttatagtcatagaactgctccatgacatacagcgcactgccagcgtcagaaactccgaacttggcctcaagtgcatcccacatgtccttcccagaaggcatgtgcatgtacacgtccactatgttgtcagcgagtacactgatcaatgctccacggaacagacaatccgaagcctcgaacttagcctcttcctcaggagaaagaggtggttcacttcgtttgccccgtgaaacatagaagcattgcatcgctgtcaaccacaatagtgcacgtgctttccatctcttatagttagaaccatcaaaagcatgtggtttcaatgtagcagcaaagccaactaccgaaaatgacctatcaggtttttggatagttgaaaatatggtcataaatcggcatattttaatccaaaatgttaagacaataatcatggcataaacagtgtagggtgatctaatgacaacatgtaacataaccagtagcatactaaaggcagtagcatactaaaggcatcatgcgcattatgaatatcaggaacaagaacatagcagtaacgcagtagcatgctagaggcatcatgaatatcaggaacaggaatatagcagtaaagcgctaacaacgggaacaggaacaggagaaggatataccttgagaatggccctccgctggattgtgaggcagaattgcctccgttggtgttgttgttcgcggcaccggctctagctcctggcgcaccacctccagctccagctccagctcctggtggcgcaccacctccgccatctcctccagcagcagtagcggcaccggctccaggcgcagacatggtgggcgaggacgagcagtcgtgcgggaagcactctccaaaaacctgatcacccgcctacccggtgcagatctcaggcgaaggtgtggttgggaggaggaactaacacccgggaaagaagcaagcggatcagaacgcgagagcagcataggcccggaggaggaggaatctgatcggactcgcggcctccttatctatcaggagagaggcagttacccggtgcagatctcaggcgaaggtgtggttggaaggaggaactaacacccgggaaagaagcaagtggatcagaacgcgagagcagcacaggcccggaggaggaggaatctgatcggtctcgcggcctccttatctagcggcctcctaggaacgtgggatcgtggacgcgccgttgcggaggaggaatctgatcggacttgcggcctccttatctagcggcctcctgggaacgtgggatcgtggacgcgccattgcagaggcagtcgtgggaacgtgggatcgtggacgcaaaagaatagcgacgtgacgcacgcccgtcacgccctcgcccgacccggcgcgcgcgcgtggctttccgacccccacctcaaccagtcaactgggagcctccaataactccctatttaggttaagatatttcttgcttaaatcctgaggtggtattattatccttaacacttattatgggtctgagatttaataggataaattaagtctagcccaattattctaacactagacacagaggtgcacgttgtttactttagcgccgtcaattttttttagtcccacaccggagatcgaaaggatttcacctcttcttacatatctatcctgctacgctgttgacgtgctcgatcgaaggcacacctcgcacacacggacgtgtatgctgatggtagtgtgcgtatgtcacacgtaagcatatcaaacaaaacccatggattatgaaggccgacttgtggacattgctgtgttgcttgtcctcggctcttcgctcaacaattgagcaaaaaacagcgcatgacacatacgctagcaattttttttatttttgctctgccccccattcgggggctccttgtatcgcaaatcactacaaccaaaattgctttgagtttacatcatgtatctatctacataaataatcgcttgccttactttaaatgagtttttggaacatacaatgatttttcgggaaacaatctaacaaagttattctgctactactgctaattactactactccactactactacactacggagtaccataaaagaataggctaattctcgaatatactatgagtacctaaaaaaatagcctaattctcagtaccatgataaaagaatatgctaattctcgaatcctttgcttttcttcttcaaatatcgctaatcccgattcccgaggcgtctagaaaccgttgtatgcactgtcaccgcgttgctcccagccgttaccgccatgaaacagaggacgaacaggggcgccgccaccgccaccgccaccgccaccgccggctccgcccgagcccgagcccgacggcgacggcgacgtgccaatgctccacgagtgcaagaagcggccgttcccgccgccgccgaagaacccgtccgggacggtggagctcgtcggccgctccggcgcccccgccaggatcctggagtagtcgaggcagtccgcgacgtcgcccggctgcgactccagcagcgcggcgggcgccgacgacgccgccgccgcggggccgcggcgtccgtggcgcgtcgctcgtcggccgcggc

SEQ ID NO: 5611 - DNA, 10631 bp, Oryza sativa
tagatacaacgatcggaaacgagttggtactgtgagagactagtaactcgaggtatttttttttgaccgcagcaaatctcctcaaattaacacgagcagcaatacgcatatacaagttaattaagcctgaggatcaatgggagctccattttatcctgctcgttctgttcctgtgatcatggaaacatctaagctccggaaagcacatgaacacaaccagggccgccttctagtgtctcctaatagcccacgtcgccgagagctaaggcaagagactgagtaccagtgtaccagaaagtgttatggtaatatggttcattactcattagcaggttttcagcatcgagcagttatgggcataaacaataagagatttcaggttgaggccgtagcttatttaatgtcattgtgaacttatttcgttttactatataaaactgagctaacgtgaggcttggatgttgggatatggcaccatcgaatagccctgaatttgttgcaatttcatgcctataatgctgcactttgttttgcctagaattgggctggccggagacggtcaccctctctttctctcttaaaaaaagtatatataaaacactaaaaatgaaacatacacattttttactagggcgatacttcggtgttctccactggttatattatactactagtagaaataatctggacggtttgttattaagggtacattagtaataatttactaatataataattacagataactttattttttttctggctaggtcgatctgtggtcatccaatgtgctggtattgttcatattccgtcgcaaaaaactaaaaaaaaagagaacaaatgtttattcactgttaaatgacaattatacctctccacacatattttcttagataataatacccctccacgtttctactagcactaactaaggtggtagtataaatagatttgaatcctttgataaataagatcaatggttcagattgttttctaataccagtagagagtaccggagtagagctctactaaaaataaactacgataaaaaatttctcaaaatcaacctaaaaagtaaagtactaaaatttcttttttatagcggcttatagctgtagggcaaaggagatgaattttagccaagtaaattaaccctctcacatatgtggaaaagactaaaataccggtgtctttataggcagagtaggacagagagatagtatctactagtatatagtcacatctgagaggccgagacatgtttatgtacaaatcaaatgaccacctgcaaactaatctaccccatctgaggctggtatgtacattgttcatactcgcatggtgcgtgacagatagatagctgagttagctataaagatggtgtgcacgtacgtaggttgcgcgttcagctaggctggcggccaatctctgtttcttgaggcacattaaatcgacgaagtaatgactctccaggcctccataggctcctaggcatgagaggcatcaggaaatactcagccaccttacggccaacatgctcagcaacctctccaatgctcgctgttgctctgctggactagtggggtatgtgtgatcgccactgctagcctctctagttgtccagtgcttatgtttggtttctagcccacatacagctcctactaactcgaccaaccgtcacttgctagacacgagccgcgatcatcgtgtaatcatgtgatcctgttggttgttgctgcgaacactactatgacaaaaaggcacttcagtgccgattgaaaaccgttcataggtgtcgggttttccaactgtcatcgatgccagttatacaaccgatacatgtaacaatatatagttgctggttgccgataagaactggcacttaatagctttggacaagccaagaaaaaaggagggggaagccgatgaaacagattagcggggatgtgcaaagatcaacacaaagcaacataagagagtctcatcagaataaggatagagagagcatatgtaacgctccgcttttcgtgaggcgttaaaaactaattcggcaaaatcttatatgcgaaaatttccgtcctttgtgtgcgagtctaagtcgtgccaagatctcaattcaaatccgtccttgatccctctcgtcaccatcaaaaattgcctcctcgaaattcctcttccgactcaagtctccaaatcaaactctgaaattctatccctctctttgaatcatcgccaaatacttccctagatccaaaatatccaaaaccccatcttgaatcctccgtctactccttcctctcatccagatcccaattccgaaatctaagtcaaattccaagttcaaattctcttcgaatcaatctcctccgaaaaagtctattttgcctccctcggatttttgtgggccgttttctcctcggcccatctcctctcagccgctcctcctcctccccctcgcacgtgcgttgcgcgtgtgtgctcgctctctctgtgtttctctcgctctctcgtcttcttcctctctctctcgtcgaactcctctcctcgacgccgattcccgccgctgccgtttgaattcgccggtcgcccttcccgcgcgcgcgctcgccgcccggtcgccgccaccatcagcccttgcaccgccgacgccacgcgctgccgccttgcccccgctccatgccaaaccgaccgccgccgtcatcgtcgacgtcatccatggccccccgccgctccacgccgcacccatccaagagtgggagaagcagctgctctcctcctcctcctcctcactctccctcctccttttcttgttttggcaagggaccaagctcctttccctcttcctttttccttttgcccgaccaccatcggcgtcaccgcctgccaccgcctgggccacgggcgcgaccgccagctcgccgccccccaccttgaccgcgccagcctgcgctccagcggttcggttttagccgcccgatccatcgccttcgccgctccttgcatcctcggcgtccgccgctcttgcatcgcccgtgaccgccggccgaacgctcgaccgctctatgtcggtcccccctcccaaaccgacatccctccactataaaaccaagccaccccaaacccctcctctctcgttttcactcgcctcagtcctcacacccaccgcgccattgccgccgaaccaccgtcgccgccttgttgttgctcgtcccgctctcgccgttgccgtccgttgccaaagcaccggaggagccggtgcgtgcgtggacgcgtgacgaggagctccgggcaccacctctccctcccttcttccccggccgctccctctcggtgctgtgccgcctcggcgtcgcgaacacctcgccgcgacactgaccgcgccgccaacactgcctcctcttcgattggtgagctccccaccataatcctcctcctgccatgcgatgcgccgtgcccgctgccgctcgccatagctcgccggccgccatgctctgtcccggaggccgtctctcgtcgccagccaacctcggtgccgctccgcccaatccgacgccggaaacggattccttgaaccccggagatgctcccatccctttgaatcgaaccctcgtcatctcgtcgtgttttccccctttttgatctccggtgattgccgccgccgcaatccaccgtcgtcggctcctctcgcgtcgattcctctcgccgccacgctcccggggatccccatgacctccccctggctgccctaaggccgtcggccttctcctttgtctccgcgccgtgtcgccgcttccgccgccgcctaacgccgccgtgcgtgcgccgccggtgaccatcgggtcccgcgtcaccgcgtgtgcgtcgcaacaccataccggttcggctaagcccgagcccgcgcacccttcgctcttctcgcgcgcggccacgtcggcgtgccggcgagcttggtcgccgccgccagccaccgtcgtacctcccctctcaaatccgtgccgttaaacggatcccccctgacctcctctagctgccggcggtggccgctcgctccggtgcgccgccgctcgccggaacgcctcgcgcgtcgtcggccgtccgatcccgggcgcctcctcctcctcctcctcccctttcgcccctgcccgcgtggccgaccacgtggccgccaccctggcccgccggccccgtttgaccaggtcaagcagcgaccggtcagcgtcgcccgcgcgcgcaggcctggctcggctcggcctcgcccacccggccgtgggccgcccaacccgagtcggcccatctcctctctctctctctctctctcgctagccgatgggcctcacctctctcctcgctccttggaacaaagtctatgttgcctccctcttccaaaccagctgccgtggaacaaagtctaactttgctccctcgtcctccccctaccacatccgccacctattggaccgcagcccatctatcctctctcactctcacttcttgttggccccacttgtcaatgagtcaaagatattcttgagaatatcttttccaatactccacaaatatttctcttttctataaattcaataaatcatttttccctctttcagaaatcaattccttattccaaaattccatgaatcattttccttggtaagtgactgtcaataatattcttgagaatattatttccataaattccgacaaaacatttccttgtccagaaaatccatttagacctccaaaattcatatcccttgatccgtagctccgatcgactccgttccacttccaataattccgtaaaattgagatctatttattggcactactaattagtctaaataggatctttcttttggtcctttgtttaggttttcaattgtttgcgtatagttgcggttatcggattttcgtcgatcgcgggttttctcgatgattcgtgaagcttcgtgaagaccttgagcaaggcaagtcaccctttgatcaattgcccctataattgaaaagtcattattattttgtttacaacttgcattattagaatcacacttaacttgcttggcctcagtttgcgtgccaaaccggcggacctacccagtagtcgcactattttccgtaggtcgtactaccctgattccttgtcgctccacccttgtggtacctcggtattcgtgctctctgagcgcgtataccaaatatcccacatacaccgttgtttgtcgaaaacttgggaaatgggtttgtgaagccttcaaaacccgacatgtggtgtcggtgtgtttgataataaaatgaattgtgaaaactcgcgatgcgggggttgtgcctatgtggcactgtcccgtattcgcatataaggaccgattcctgtgggaaactcatcgaacataatcaaagtgcaaccacaaggtggaatgggacaccctggctaagtaactagtcggttcagggaaacctcgtatgccaattgttgggaacaccggggcggggtcggacaaaccgggttcctggtaaggcaaggacgagaagcttgctcacttaccgatcaaggtggttggagtttgatttgtgaacgcctaaaatggcctatgtttatgtgaggatttgatccttctatgtggcatgaggtaaccctgggtcggcttgggaaaggctttgttgcgaacctccgataccgacgggtgttcggaataagttcgtatcttgtgggtaaagtgtacccctctgcagaggttaactaactgttcgaacagccgtgcccacggtcatgggcggatgtgaggtggttcccgctgcgtagatttgtttgcctgtgctttgtgaaaagttgttgtggtgtgggaatcgtaaccagaatcagcctatgtggcagatggacgacctgagtggtcagaaacgaatctgtgtgattcgggatgtctgcgggcatcatagactaggcttcccgagtggaagcggattgttgtgctgctgggcagctggactctgggagtccgagaaaatgaaaaaggctctgggagctgattaatcaagtggaatggctctgagagccgagaagtaatgatctgacccgggaggtcggtacattaccaaatgagctgttgaaaaacatctcttaaagtcgaatcgagacgcaagtctcttttcggcccaaacttagaaagaaataaatcacttagtgatttcaaaatgtcttcaaataaaagatttgcaaaacaaccttgcctctcttccaagcttgcattaaacacctaagttcccgtgacttgctgagtacgaaagtactcacccttgctctatataaacatatatatagttcctccgccctgaagagatgatgaagtgaagtgaagattagggtttcgtcctggttcccagccgtcgcctgtggtgttgggtgttagaccgttggttccgctgctgctgctgttggtgtttcctcgtccgcgtcgtcggttgtattctcgggctgtctgagctgcaacctaagttaaggtaaataagtcctctatttattttaaggattgctatgattcatatttgtcaccgtgggtaccagcactatgtcctgggactggtaccgagatcgcggtttcgtaggaagcggttcgcgccgttttccctacgacacgctcctatcaggtgccgttgtacggcggtatcagattggggtgtgacagcatcttagagctacaacttataaattggaccataaaccataaagacatgcaatggaataacctgacaaattaaccaagcagccttatggaattttgttgagcaaactaacatgggcaacaatgcaacatgcgcattataggcttgagaggcatctagagctctgtttcagccacctcattatattcttgttaccgtgatccctgaagcaagtgaccaccagatatcgacaattcaaccccagtccagggttgttttccggtgtcttttgtgtaccacaccgtcacgttcatgtgttacctctcctgccttagtacttcctgttagcgtggaaccagctagcttgtttaccggtgtaagatttagtgtatgtggcatgagtaagataaattggtgttctctcctcacaaacagcaggcctggtgttgtttgaaagtaacagattattgccatattgttctcactgatttaatacttgattatgggatgaattaaattttttaagaaataaacaaaacacatatcttacagctatagacagtagttttattgaagaaaaaataaagatgcagaggaaaaaatccgtgccacgaattttattatttaaaaaaaaccaagtggtaataatatagtatatatagtagcttaaaagaaccgatttattattcctattagtaccccacattcgttttatattatttgacgctttaatttttctcatagtcaaacttgtctaagtttgatcaaatttacataaaagcgaaataatatttttaacacaaaacaaatatattatcaaaatatattcaatattaaatttaatgaaaaaatgttttagaagttgcgaacttagctgacttataatataaaacggcagaactacctgtaaggatcggtgtgcatgcagtcgcctggagcggctctcgttttttctttagccgaaaatcgacccgaagaaactcgccttaggattctagtaggcatgggaggagtcggaaataagtgggttgccttgaatccaaccgctcacagctgggctctcccctgcttgactaacagggcacctgccacaaactgcggcatatgtggttgccaccactgcccctttgcatatgcctgcggcttcctcactcacgcaaacgagcaacaacgccctgcagcttgctgttggccccggcgtcgatcggcctggtgttttgctgaacccccgttcatgtagatttggaatagagtgcagctgctgtgaatttttcttcttggacatgttgttttgtttcgttgtcgagattaattaattacgtacatggatgagctcaagcttcatcttatacttaatataaaattgaataaaagaagtagattaattaaatgcaggagtggcacaataattattgcatcacagtacaaagtcctccagcatcactgcttatttaccggattattccaatagatcatttgctctacaatccgacttattttaagctacctgttaagtttatttctcaaaatatttgtttaggcctataatcatatcgataatccacgacgatagtttgttttgtaatttcgaatcaaatgacgcttaaataggtgcccgtttctaaaaggggaaagtagaaccgagatgcaatacgtgaatgaatttttgggaagatatttttctacggtactcactacttctctaccgatagtagaaccaatctagactttatatcttttcttattggatgggtcacttatatttgtgctgtcacgtgaactattgataaataaaacatttttttctactagtagtagaacttttgtaaataaatagctacatcacctatactgattataaataagggtaatatccttgtactagtagagatcactggaaaaacagtactcaactgtacacaagagcagcatgaaccaaagagagagatagagagagagagaggagtgtcacccacacaagaacagctcagagctagcttacctagctagttaaaatggatagtaaagacaagggggtggaatagcctttgctacccagagacgtgcaacaaagcaacatgaactctcaggttaggcagagggagggccggcatgggaggtctcagggacacaacagcgtcactgtgagatcatgtctttgaggccggatcgattcgtcgtggccttatgctgtcacattggcaatgtgtgccctgcctgcatgcttgtcttcaccatagatcaccttcgctcaccctgagcgctcgtggaggttcaacctggtaggacgttgggagcaccacagagcagttgtgattcatcaatcaaacgctaattccagcgccctatcatggcaatgtggccaattggccaaacacatggcttataatttggatcatgaaccacaaaggcatgcaatggaataacctgataaattaaccaagcagccatatggaaatttgctgaaactaacatgggcaaaaatgcaacatgcacgtgcgcattataggcctgagaggcatctggagctatgtttctcccaactcattttggttaccgtgatctccgaagcaagtgaccaccagatatcaacaattcaaccctagtccagggttgttttccagtgtctgtcatgcatgtaccacactgtcgcgttcgtcttacctctcccgccttagttttttttaagggaaaacaacactagattgtgccttttcattgaatatagcggtagaaaaaacagctcctaggggcaagaaaagtgaaaaatgttgtacactttaaatattatacatggaggggtagaaggtcccgcaaacgctttgctcctccatcgcccaagtccacgcctcttccttgatctgggcgaacaggaaagatgatatggcattcttgtgctgtcgttgattcctttccttccatatctcccaaactatgaggaggacgagggtgcacaaacctctcttaggaacacctgccgtgttagctagtgtctcccaccaatctttgatagtttgggtcgtctcccaatgcctagggtcgagctgctggtaagccacctagtcgactaccatgctccatattcctttcgtgtatctgcaactgacaagaagatatgggactgtttcgccttctctgcagcagagtgggcagagcccattgttttgccatactctagtcgcgactcgattggaggtccaaacccagttttaaatgactagccaagcgtggaatttacacttccctggcgcccaaactctccagatgagcgaatgaaagttcatggatgtcatgctgaagcattgtgcctgctaagccgacaatgctgattgctgagtattctccatggtttgtgaatttccacacaatttggtctaactgcttattgtttaagtgaatgtctctcacgacaatccataaagagactagttgttcaataaggtccaccgagattgctgggttagcttcaaagtctaagttgttgatccaagcatcattttcttttccctgtcgtagggacttgtctttttttcttcgagattgcacagactagtggcatgaggtcctttgatctgcgcccatctatccacacggaatcccaaaagcgcattgtgtttctgtctccaacggttatttttgttgacacagcgaagagtacctcttttgccttagtacttgctgttagcatggagctagctagcttgtttacaagagtaaattttagtttatgtggcatgagtgagataaattggtgttctctcctcacaaacagcagtgactggtgtagttgaaattaacagattactaccaaattattgtcactgatttaattaatacttgattagtggttgaattaaatattttatgaaatgaacaaaacaaatatcttatagcaagtgttatagacagtagttttattgaagaaaaaaaatgaagatgcagagaaaaaaaaatctgtgccaatagttttattattt

SEQ ID NO: 5612 - DNA, 1972 bp, Oryza sativa
ctgcagccctgtgtgtctttgcaagtgtctgcaattgtgaacacattgtaaactacaaatttcacatgaaatggaaatatataataatatttatttcaaaagtaacgtaaaattaaagtgtgtcagtactagcgaatcctcgcaataatgaaaacatataccacacaagatttgggaccattaaatcgagcacaaaaacccatttatagagcatcctagctaccctcttcccctcatatctatcccctttccattgtactccccatacaccccttgtgccatgtctcaagaaggtcccaacaaccatcctcaaggcacccaagaaacccatgactgccccttcaccatcgccaccaacacaccgttaggctcgacaaagatgggctactccgactctagaaagtctgacgagaataatacctcgtcaaagccagcaagtccagtggtgtctagtgatgttgtagagatcaaggaaacatgggaaaatgttgtcgttgcggatgaagagggggaaggtggcgaggatggcttcgctagcgatgctagtgaatctaagtccaagagctcatctgatgaagttgattatgagctcttggatcttttggcaggtgcaagtgaaggatgcagcggaggaaacaacaacgatgaagtgaaaaactttgcctatgcagaccacaagatgcatgttttgagagagagggagagaaggaaggagatgaaaaacaagtttgagattctgcatgccctcatccccaacctcccagaaaaggtaggatttacaatcctatgggtttgcatacaaataaatcatttaagtatgtttgagatacttacaattttattttttttcctggcttgattagaaattctagatatgtaaataaaagagtatgtgcgatgtatttgcatgtttgttttcttatgacttgattaaattatctgttgttctctgacttcattaaataatctagatttacatagatagattatgttgtgttaattgctagattgtttttattgtttgatgtacagagatagaatatcctttttctattttgcaagggatagagaggtttgagctggccataacttttaggtgacaacagttagaattactttagatgtgtaccgtggtctatgacatggtgtttgagtgatggaatggtttttttcttgttatacaaactatactgccgtgtcatgttcaactacattttagtaacttttgattagatctatccataatccaaatcaaaatcgacatattgcttgcacattcacatatttatgttactaagatgttgtttaaattacttgtattggatttatggatgtatgtactaacttgaatgtcatcatatttattaagataagtaaaacccatgactagtccatagagttacacgtgatgttactaaggtccatgaacatacaaaatgcacatttagctcggttatcttggtttaatccatcacaacaggctcaaacctcgcgcggttgactatatgactggccacttggcgcttcacgctggcaagatttttgcgttcgctgccgttcgctccctccgaagcacaacgcggcagtaaatttgcattgaccgatcaattgattgttgttgctattgttgatgttgttgttgccgttgttgttgttgttgttattgttgttgttgttgttgttgttgttgttgttgttgttacttttatgcatgtagactgacaaggccactatagtggaggcgaccataaactatatcaagaacctccaagacaaaatccataagatggagatgctcaaggtggagcgcgagcatgccatcgctctcgccaccgccgcaaccgccaccgccgctgcctctgcggacaccgcgctgcaggcaccgccgccgtcggaggaggagaatgaggagcacgactccgtggtggctgcagcgacgagggagatggccctggctgacatggtgcacgcc

SEQ ID NO: 5613 - DNA, 3460 bp, Oryza sativa
ctgatggtaacgacgttgcggatgatcttggtcagatgttgcaggacgccaaggaggactgcgaaagtgaaaagggagcccataaattggacaagatgttagaggaccacagaacttcgttgtacccaggttgcgagcaggggcacaaaaacttggataccactctggagttcttgcaatggaaggcaaaaaatagggttagtgacaaggcatttggcgatttattgaaactcgtcaagaacattcttccggagggaaataaattgcccgagacaacgtacgaggctaagaagatagtctgcccgctaggactggaagttcagaagattcacgcatgtccgaatgattgtatcctatatcgcagtgaggagtatgagaacctagaagcatgccctgtttgcaaagcattacgatataagattagacgagacgatccaggagaagttgacgggcagctaacaaagaagagaattcctgctaaggtgatgtcgtatttccctataataccacggataaggcgtttgttcaggaacaaggggaatgctagaatgatgcgatggcacgctgaagagcgtcaacaggacgggatgctgagacaccccgccgatggttcgcagtggcgaaacatagacagaaatttaaagaatttggaaaggatgcacgaaacatacggtttggttttgagtacggatggcatgaatccttttggagagatgagcagcggccatagcacctggcccgttacgatgtgtatctacaacctcccccctggctatgcatgaagaggaagtacataatgatgccgattattattcaaggccccaagcaacctggtaacgacatcgatgtgtacctaagaccactggtcgaagatcttaagctgttgtggaagaaggaaggtgtccccgtgtgggacgaggacaaacaggaggagtttaacatacgagcgctgctgttcataaccatcaacgattggcctgcacttagcaacctatccggacagtccaacaaggggtacaaggcttgcactcactgtatggatgaaacagaaagtacgtatcttaagcactgtaggaaggttgtatacatgggtcatcgtcgattccttgcagcacaccactcggtacggaagaaaggcaagcacttcgaacataaggctgaccaccgtacgaagcctaaacatcgcaacgggaaaacaatgtttgctatggttaaagatcttaaagtagtgttcggaaaggggcctggaagccagcctatagagagcgaagatggtcacgcggcgatgtggaaaaagaactctatattttgggagttaccctattgggaattcttggacgtacgccacgcaatcgacgtgatgcacctcactaagaacctttgcgtaaaccttcttggcttgctaggtgtatacggaaagtcgaaagatacactagaagcacgtaataatctgaagaatatggaacaacgcggcgaccttcacccggaaccaaaggagaaaggaagccattacttgagtccagccagctacactcttagcaaggcagaaaaggaaagtatgtttgaatgcttggagagcataaaggtaccatctggatactccacgaatatcaagcgaataataagcacgaaggagaagaagttcacaaacctaaagtcccatgactgtcacgtgttaatgacacaactgctaccagttgtaataaggggtatccttccagacaatgtccgggcaataataacaaagctatgtacattcatgaacgcaatttcgcagaaggtcatcgatccggatagattagaaacccttcagaatgatgtggtgcaatgtctcatcagttttgagttgatatttccaccttcatttttcaatataatgacgcatctgctttgtcaccttgtgaaagagatcagtattcttgggcctgtgtacctacacaacatgtttcctttcgagaggtacatgggcattctgaagaagtatgttcgtaaccgtgctcatccagaggcaagcatcgccaagggttatggagcagaggaggtcatcgaattttgtgtagaatttatcaaagatcttcgcccaatcggggtacctgaatcacgccatgaagggagactacagggaaagggaactctcggaaggaaagcaataatgacggtagacaacaatttattccgtaaagcccattccacggttctgcaacaatcttcattggtagctccttacatcgaggagcacttggctctagttcgcgccaggaacatcggtaagtccgatgcatggattacacggcatcacattgatactttccccgcgtggatacgacaacatctcatgggtaacaagtcgatcaaccaacaacttgccttcctggcgaggggaccgtctggatcgatcgcgacattccaggggtatgagatcaatgggtacacattctacacgagagctcaagacatgatgagcatgaaccaaaacagtgctgttcgtgtcaatgccatgggacacgatggaacaactggcacgtattaaggtgccatctaggacatatgagaacttgactatggtcctctcaaggtccctctgttccggtgccaatgggttaggttgactggtggaggcataatgattgatgacagtgggatgacaacggttgaccttaacaaggttggatactcggacgaaccttttgtccttgccaatgatgtaacgcaagtctttttcgtgaaggacatgtctagcaaaggaaagaagggcagagggcctgacgagcctaagcgtcacgtggttctcccaggcaaaagaaaaatcatcggagttgaggacaagactgacgaggattacgatcagttggatgggcaaccccctttcacggtgacgattgaccctagcatcctcctatcaaataaagacacccctcactcacatagcgatcacaaggagggaacaatagtgaggagaaagtatgtgcggtcaaccgtcaccgccgatgtattgccgtaattattgtgtacacgatgtaaactattttggatgtattgattatccatataaatcaattgatgtatggcatatgttaattacgcacgattattagaggttttaacaagtttaaatcatgtgtatgctagttatatgcgatacttacaatttttaaaagttttaaatcacgcaggtggcaatttcatatgttaattagagtttttaacatttaatttactatcattctgtagcgcccgttccgttgtggcgcctagcgggaaaactatctcctaaaaaccctatttgcgaaatctgtttctttgcttgctgtctagtgtccgtgccatctcagatctcaaatccacaatctatcgtcgagttcaatcctgaatccaaatccttcccaaatcaatccctccgcaaaagtctattttgcctccctcgggttcgatgggccgaatccctctcggcccatctttc

SEQ ID NO: 5614 - DNA, 13140 bp, Oryza sativa
gtcatcgcccggcccccgccactccacgcgctagcctccaagggatggaggcagagctccccccctctaccgcgtcgcccccgctccctcctccttttcccaaagaggcaaggggcaagccccctttctctcccccattttccccctttttttccctctcgccggcgtcacctcctgtcgccgttttggccgctagccggagcgccagctcgccggcttgaccgtccaatgtcggttcctctctcccaaaccgaccttgtcgcccatttaaacccaagctccccccctccaatctccctcgtgttcgtctctcgctgccactgtcgccctgttcgccatcgccgttcgtcgttgcgcgtgtcggaggagccggcacgagcaaggacgcggaaggggactttggccgcgcaatcttcctcctcttcctcggcccgaggccgaaacgatcacgtttcgcgccgtcggctctcgtcactgcgcccgcccgcacggtagtgcctctctccgttcttccacctcgttccatctcctccccttagactcaggtagtagcacgagtagcctccccgtagctagccggcgccgccccgaccgttgccgccgctcgccatgtgctcgccgccatcgccgcccgagctcggaagcgcctttcgtcgccggccttcctcgatgcgtttcctcctaatccaacgctagggacggattcccgtagccgcgtagatgctctcgccgccggtaatcggcccctcgtgacctcgtcgccgtttcccccttcttccgccgccggttgccgccgccgcaattcgccgccgtcaagctccctccggcgaatccgagccgttggctcgtttcccctcgtcctgtgcaaccacccggtgtgcccgctttcgcctgtatcgccgtggttcgctccgccgctcgccgcggtcgtctgccgtccgttccggctggcgtcgtcgtctacctcccgccggcccgcgtggcagccacgtaggcgccacgtcggcgccagctcggccaagaccgggtcgagtcgaccccggtcagccgctccctccggcaccgctcacgggcgcggtccaccgcgagccatgaggctgcgcgtgggcccgccgcatccgtgccctccgcgaaccgcgcgcgtgcgccgcatcccttccccaaaccctagcgcacgccgcatactccctccgcatggtgagccgagccgctgacaagcgggtcccacccgggaccacgcgaggtgagcccggtccaccggctccctctctcctcccctcccgcgcgcgctctgggccgccttctgggccggccggcccatttagctcggccgagccgccccttttctctcgggccgcgccctagccgcccgagggaagtctaattcccctccctcttccttttctttttccaaaagggtttaaataaattctttttcctttagaccaaaaaaccaataatcttagaaattcaatatgttcccaactgtaaatccgttggactccgttcaacttccataattcctcaaatctcgagatctatctaatggcatgcttagaggtcattaatagggctttatttttcgccgtttgttgagttgtcccattttgcgtgtcgtttcggagcctgaagacccgcagtgcgaggatttcgaggatcaagctcaagatctcgagcaaggcaagccacctttgaacatattgagccaatatttgaacttaattatattgcttgcaaaatattatgcattgataggattacacttaatttgtttgcgctgtctgaaaggcagaccggtgggcctacccaacttgttgcatctgatccttccattgttaattgttatatcatgttcccttgtaaccatctagctgcgcctcgatattcgtgcactctgtgcgagtatcgacggtcgccttcaaacttaaaatctgagtaacttcttgggtaaaacttgggttttacaaaagacttggaaaacccgacacctgggtcggtgcttgcgaactaaatgaatttccaaaaccgcggaccggggaacgtaccgggtgtacggtttcccgctcttgcacataaggaccgtttccttggaatttcatccaaacataagacaagtacgaccacatgggtggaatgggacacccctggctgagtaactagcttatcaggggagccttgatgccgagagacatgtggattcgccggggtggtgtcggggaggacccctgggcttcctggcacagtatggtctgggacctaacctgttgttagtctgggacccctctcgtcggcatatggtaaacctgtgtcggctttcgaaatgccttgtcatgaaaacttggaggtctcccgacgtggctgatccccacgggctgggtgatccggttagtaatgtcgtgtgggtaaagtgtaccccctctgcagaggttaacaaactgttcgaacagccgtgcccacggttatgggcggatgtgaggtaattcctagcgtagttttgtttgactactgccttgtgaaactgctgttgtggaaaggggatcgatgttggaaaaatctgcagctgatgggatcagctaggcccgggtggccatttgaaagttgttgcccgggtggccgtttgaaagttgttggccgggtgccaatcttgatcaattctaaggactgatacattgcacatactccgaccggacgagacgcactgtctcatccgtgtcgtttgagaagcactcacttagttgatttcagaaaagagttcaaataaaatcaatttgcaaaaacaacagcctttccttgaagcctgcattaaacacttatttcccatggcttgctgagtactcttgtactcacccttgctctatataaatatccccccccaattgctgaagaagatgaagcggatcccgctgacgaggagttcttccaggagcaagccggctacgatgagttttagggtttcagcctagttcccaagtcacgcctgtgatgtttggtccaagtcttggcttctgcttcccttttgtaatgcagttgtgagctcgggatctgtccgcagcccaacatgactgtacctctactctataataaagagacctctgttgctgtgatattctgtcttcctgtgataccagcactgtttcctgggactggtatcgattaataggttaatttggagcatcacgggctagttccggtcgggactagttcggggcgtgacacattcatatgctaattataattgactagagaatttttaaaagtttcaaatcatgcatgtggcatttacatatgttaattagagtttttcacaatttaatttactatcattcatatgctaattatatttgactattcgaatttttaaaatttttaaatcatgcatgtggcatttacatatgttaattaaagtttttcacaatttaatttaatataattcctttgctaagtatatatgatgattacaatttttattaattttaaatcatgccgtatgtatatacatatgttaattagagcttttaccaatttaataatatcattcatatgctaagtatatatgattattagaatttttattaattttaaatcatatatttgcttattaagttttatccacttaatttattatagacaacaataatttttcgaagtaattgtcattaatctttgtactttaaataattgtaatgcattatcttctattttagaaacacatatgtaatggaaaataatatttagtgtgcttatcagtagtcccggttcttaaccctaaccgggtttaaaaagaatttggaaatagcgggaaaatatctttagtcccggttgatagaacaaccgggagtaaagatttctttactcctggttgttgagatcttttttttagtcctggttgttctcaacaaccgggagtaaagatatctttaatatctttactcccggttgttctcatcaaccgggactaaagatctagggctatatatattcccagtgcgcgccctcatcttctccaccaacacttagaagtttttgcccgatcgatctctctcggcttctccttcgccgccactgcctagggcatccccgcgccgacgccgccgccatatctcgccatcatctcgcgctcgtcgtcgtcgccgccgccgccgcctcctccgccgccgccgcatctctggggtgagagccgccgcgcgccgcctctctctcgatctctctctccaatctcgatctctctctctccctctcggttgccgccggccgccgagtttcagacgccgacgccgacctcgtcacgacacgacgccgcgccacgacgactccacgccacgagacgccacgtcgccgcacgccaccgccgcgccacgccgatgccgcgcgcggcgccacgccgccgccgcgctgccccgccgccgctccgctgccaccacaccgagaacgtgaacgagcgaacgaacgtgaacgagaacaaggtgaatgaacgtgaacgagaacgagcgaacgaatgtgaatgagccaacgaacatgaatgagaacgagagaacgaacgtgaacgagaacaaggtgaatgaacgtgaacgagaacgttgtcggacaaacgtgaacgagccaacgaacgtgaacgtgaaatgcaattataggcaggttaatgaacgtgaacgaagaaacgtaggtgaatgaaacgtgaccttaacgagaacgcgaacgtgaacgatatcgtgaacgaaatgtgaacgtcaaatgcaatatatgttacttcgcgtttatcctaatacatatttttgtatcttgcagaaaagacgttgtcggagtcgtccctcaagccggagtggtagagctagccctcgaaggaattcgcccaggcaagtaacgtaattatatatatatgattgatatatttgtaatgcaattaagattattagatttgtaattagacttaattagcatataagattatgtagtgttctaatatacgacagttacacttagaatacatgactatttgagttttagtagaagattattggagttttagtataagattattagatttgtaattagacttagcatgtaagattgtgtagggttctaatatacgacagttacacttagcatacatggctatttttgtcttagcatataagattatttgagttttaatataagattattatatttgtaattagacttagtatataattattgactagctagggtcctataatatacgtcacatagacttagcatatatcactatttgagttttagtataagattattagatttgtaattagacttagcatgtaagattgtgtagggttctaatatacgacagttacacttagcatacatggctatttttgtcttagcatataagattatttgagttttaatataagattgttaaaacataaatgtctcatgacttagcagatatttcctgtataaacaggtggctgatcgcgatgaggaacagatattgtacgattcaatcgcggagggaagcagccagtactggaacgaagaagaggggaacgaggatccaaaccagtatttgaacgaggaagggaacgtggagagggatgcggaggggaaccaggaggggcacgtggaaagggatgtggaggggaaacaggaggaggaggctagtggaagtcaaccctccgttggacagaagagggcacgcgggcaacgaggtgccgcgaagaagcttgagggttggcacatcataacggaagtggaagaagatggacgacctagtgccccggcagaagccgccaagaactatgtacgtcacagcggttgggttgtgcgggataacgtgcctgtcagtacggtgtactggtgaagaacaagggcacgcggagatcatgagagctttgtcctagattcggagaaagagatgctgtggaccacaatgctcgagacattcacccttcccgtgggtacagaggacaaaatggaaaggtggactctaaagaaaatggcagaacagtttcagagcttcaagggagagctgtacaagaaatatatcctgaaggggcagacaccgaacttcgacacattcccaaagctaagggatcaccgggacgagttcgttgcatataagacaggtgaacaagggcaggcgatgatggaaagaaacaaagaaaatgccaccaagaagaagtaccatcaccacttggggtcaggcggctatagcgtcgcgatgccgaagtgggaggagatggaggctagcttgcttgagaggggtatcaaaccggccaccgctaattggccggaacgatcgaagttctagtactatgctcacggtggaacgctcaacccagctgatggctcactggtcttcggcgatcagatacgagaggctgcgcgtcgactaacagatgcagttgaagcctcttctcaggacacattccgaccggatagagagagggacgagctgtcactcgccctgtagactccagagcatccaggacgaacacgaggcaaaggggtgattccttggaagattgggttcaaggaggacatccacacgtacaggagtcggatgaggagcaagagagataccgaggcgaagattgcagatcttgagttcagggtatcgagctacgagctcagcatgcaagaggaggtggcaaggaaggttgatgaacgcatggccgcacatcggtccactgatccccagccgaccattcctcctgcaatggtgagcccgttaggaaaccgtagcagctgcgcttcaacggggcaggtaggatcacagagcatggacgccatgcaaacccaggacgaatccacctgccccgttgatgacatcactcaacggacaccatgtgagctacatattcctttcaagaacttatcaataaaggtaagctcgtagtttatatattttagatttgcccattccgctagttgctgcttatatatgttgattactaataaataacctctcaccacatgaaggtggtgtcgggcatggccatcccaacggaaccttcaggtacttaccactgcaggccgattccagcaggatactcgaaggtcgaagttgagttggtcaaaggcgcgtacgaggacctcgagctggattaccctagaggagacggtgagacgcatctatgagacacaagccatgccattattctatgggcgacaagcggcgtctcgtgcaccatctcctccggccccgccatctcctcctcaggatcctgcactgtctcctcctcatgctccagcaccgtctccacctcaagctcctgcaccgactcctcctcgggctcctgcaccgactcctccgcaagctcctcttccgacaccttcaaagtcaagggccccccaagctccaccacctgcccacacaagggcaacgaagaaggcgaaagttgacgccgccaagaacaaggacccggggtacgattgcacgcaagaggagcttgacgcttacgtggcatcagaagtcaagagacaattcaagcctcgaagaccagaaaagaagattcctatagacccgagtgtcatgaacttcttcaggggtatgtctgcacctgccaaggaggccattaagctatcggactatgagcgaacgctgaagaaagcatcttctggaaagtccaaaacagtccctcagcttggagagcaaccaaaccaggacatcgagccgttggtgaccggtaaagaaatgacgatagaagaatttattactgacaccggtctaactacggatcaattgctaggagtcgcaccaatcgaaaaggcagaagtgaaatacatgtacgaactcggtaaaccgcttgtcaaccctgagcttctgcagtccctacccacacaaatgtacaagttccatcagctgtacatggagatgagcgccaccggtagagagatgatcggagcgaggatcagggacacggacttcttgcaaggagatgacattctctggatcaatttcaagggaatctacgaactataccagctggacgccctcaacgtctctattatgagttgctggattttgtaagtatatcattcagttagatttcttactacgtctcctttaattaattaagtccttgtatataagtagactatagaaaataatatactcccttttatcgttgtagaatggagattcaaagggcccgacggcggggggttttcgatactggattcatcgaccctcggaaagtaaacgtcgcaatgctcgaccaatatccgcaagccacagaggacaatatcgtccatctcctgaaggcgcagcattacaagacgttcatactgttgccgtacaacacagagttagtttaattttactgtcttcctataccaaatttcattcccgtacgaacttgctaagtgtttcatatgtaatgcatcccacgcagattgcagattccactgggtgcttttactcttcgacctgtcggcctgcaccgttaatgtatatgactcaatggataaaaaagagtctacgtttgacaaggttttcgaacttatagacaggtattgtcataagttcctctgttaattaagaaaatcttgttatgttaattgctactacgaatcgtagctttaaactccatgtagggcttggtatcagttccgtcatttggtccgtggcaaatggagagaaagacttaggtggaagttcaaatttcctgtgagtacacatgctctacatttatatttctccgattcaaatacatacaagtgtatattaattagatctctcgttgtttgtcatttatttgtagtgcgcaaagcaaaagaagggaactaacttgtgcggctattacgtgtgcgagtattgccactgccttgcagaccaaatcatcaccacaagagagctcaatgtacgtacaaataaattcaaaatttcattacgtatcgatttcttgttaattactaatcaatttcatacattcatatagtttattcgcatgagggataacctgaccacgcacaaggaatttatcgcggcggttcaagaacaactcatgggattcatcaacgaataaatccttgatcccaagggtgaattctactacgacggaaacacaattcataggtccttagcttctgagctagcgactactactacgtcgaaatcgtagctagctaggacatataatggattgtaattaatacatgactacatatgtttctatatgcatgtgtacacattttctataacgtaaatatattttggtcatatatatatatatacatatgcatttgcataacatatatatataaatacatatatattatgcatgtacatatgtattgaatcatatataaatataatataatatatatatatatatatgcatatattatatatgcatatatgtactgaaacatatatatgcatggtttatatatatatatataaaccatgcagcaacagggccatgcaaaaaaaaaggtcagctcgatctttagtcccgattgggattaccaaccgggactaaagatagcgatctttagtcccggattggtagtcccggtttagaaaccgggactaaaggagggttacgaaccgggactacaaagtgtttctccaccagtgtaccccttgcgattttctcggtgacccatgcttcgtcttgtcgactgattgataggactttcttagaaatatatgatgcaaggaactttcttttatgacggcatatcacatattgtatacattcatctaatcgtccaccacgatggttttgaaccatgtgtgaatgccacgacatggtcttttaactatagcgaccaaattctcctcatagctccatgtgcaaaaatcttaaatggccacccttactaacaaattaatttgccaccacggttttcaaatacttcattgcagccaacataccagaggacgatgtggttgttagcaagaccattacaagaagcatccggagatagacacatatatattgctgtttgagttatggtagtctcagtcctaaacaaacagccaattcaagatgttcagaaatgcaagtgtactcacaagtcacagcaactcaacaatctgcatgcatctcctgcaaatgtggcatagatatatttctctcaagctagtcaggcatgagaggcgtcgggagtttgggggcctcattttctcatcaactagtcaggaaaatgtagatgtgcagtgccgtataacatgctgagcaagcagcgttctccctgtactctaccttttgttaacgtcagtgcagcgtcgccggtggtggacgatgcacgcaggtgcttcgctgttctaactgatctcgaacagctggatgggggttcgatttcatcggcgaatcacgattgggtgcctgttcgtcagttcttgcatgctctgttaattagtgagatcagtaacgttgacacatatatactgtaaaacatgtgtaacagattgatgctgatatcaaatctattttgagatagcccttccgtattttgagacagccatatgcctctttaaatatgccggttaaaggtgccgatttttttttcgatttcaacccacggaggttgggaaaggcatataggtgccggttttatcactaccggcacctgtagaggcgatagctatttgatgttttgtagtagtgtttgctttttcctagtcttccaacaagcattgacatactacattgtgtgttcaagatagtccaatcaataggtgtttgattgcatataaatcttctttgtttgattgcattcattacaaaatcgcatcgtagtgttagcaccgcatattactagtttaacttgaatgaattgaggcaattgccacactttatagcgtacactgatgttgccagataaaatcagcggctaggaaagaacagcccggattgctagacaaaaagcgcatgccattggaatagtcaacgaaactaaattgggtgatcctatactaccagaggatccatggttggaaggcagcaggaaatcatgaattacgtactttgaactggtgttatagataatattatatgtaccagttggtgaaatggtatgctttggctagaccaaaagattatgcgatttgctccggtccaacaaaaagtatctcgagataccggtaccttatggtaccaaatcgtttgcgatcgttggatctaagaatgaccatcttacctagttggatttaggaccttagagtactactcaggtcactataattactgggctacatgctctttcgctgtcctgatccttttgtaatcctctatgagtatgtttctctcgtgcatggagatcatccctcaaggacgtgtcatctgtcgcaggtttgaaagctgacctagctagccatgttgcaagtttgacgctcgcgtacgtgcatggcaatctgtttgcaaccagccatgtttacaatactagttcgttgttatgtgtaaataaaaggaaaagatgtttggtgttatcagaattattgaatcggtacaacaacatgtatcataccatgcatcgcatcatggaggagtggtgagaccgtgagactatgagctaagagtttttaatgtttcattaagtatcttgtagtatgctttattgattgaaatttggtgttttattattcttttaactgatgtctatcttcaagtattgatgaatgttgggacaaaattaatacaacaagcatatgtgtatcacttctgtattcaatgtgcccaactgtaagcagtgtttatatatttatacaggatgtacaagagaaaattacatcgctaccctaatcgctgatttatctaggtggctggatggtgggcctgtttatggctctttggtaaactcctcggtgacaggagggctgcgcccattaagggagcggcacagattcccgagggcgcctgctattacccgggtaaaggcgtgctgcgggtaatagcgtacgctgtctgccctcgtcagcggcgtcagaggtggttggcagatgcgtactgtgtatttatggtgttccactatatatccgttcacccatcttacgcctagggctgttgaggccctagcttcttctggagcccttgtacagctccggaggacctggaaggctttgaagtccttggacagctccggagtccacggacagctccggaggccttggacacccccgtagcccttaggtggctccgaaggccttggatgaccctggagcccctaggtggctccgaaggcctgggtcggctccgaagcctatgtttagctaagctccggagtctaaatcagtagatgccttcggtcattcttctgatgtggatggctccggtaggtgctgcatcacaggacggaggctagctccgctacccggagccactccccccaacaaagcaaaccactcaaaaaaaaaaactccagctattctaaataatctgtcctactcaaataaaactaactctttgccaaattatgacactaacaagctgcactggagtaataatataatggaatttctacaattgtagcgcctcccattttttttattaatctcgttcacctttttcctatgattattctatatcctatatatatgtaagcatgctcttatctctcatatctcctcatttaagtagggtttaatatattatttttaattctaattctcttgtaccctgtgtatgaaaatatcacaatgtaaatattgaaacttacaatataatttttgaaatttacaatgtaagtgtaggtaatttacactgtaaaacaatttcattattttttactgaaacatacgattcaatatattctactccatgcagaaatatgatttactatctacgtgctcaaaattttctgaacggttgtcagaccacaaaactaatgcctgaattgtaagatcaactatttgtcttataatatcgttcctcgaggaaaatattgcacgcatcagattcagataatcaatcacggtctgatccagggattataacacgaaatccggacttcctgcactgcgtcaaacacaaaatctgctcggtttttccgggaaaatacttagtgcaaaccatatatgtagtcgaaatttagaaactaccgttggatcgagaaatggacgttcgagattcgtgcacgtcaccatgagttaaaatttaactcgcagattcactcatgagttaaaattttacttggagttaaattttaactcac

SEQ ID NO: 5615 - DNA, 35166 bp, Oryza sativa
gcaccgcaaagtagtcgaggttcctttgccagacgctaattccagcgccatatcaccgcaacgcggccaaatagaatacatgacgcaattctgcggtgcgtatatggacagcggacacattagttggtagtgttaagctagttgtagtttaattaggacagctatttgattaaggtgtttgtggtatacatttatttatgctggccagattgtatacagatatgtatgggccaaggattgagtcatgtagttttagtaagttgaatcctacttcttctatcccaaaaaactcaacctatttgaggatgtgacataatttagtaaaataagtctgaacagatggttatctatatttgtcgtactagattagattatgtcccatcctaaattagattaggtttttttggacggagggagtacttgttatacttagtttgagtttgcttagcaaacctatacatttatgtatatgtaattgtggtacatgagttgcgaaaaagaaaacggtgatagttgtgtctcgccagaaaagttatgtattgtttttcgttctagttttcacttgtgttattcgattctggtgaaatcccaacaattcttttgtcactcacaattaatcgatttttcagctattcgatctctgttaagacccaaggttgcctcgaatccaagcgttcccctgcttgccaccagtgcggcatgtgcggtttgcatatgcctgcggcttcctcactcactcacgagcaacaacgcccctgcagcctgctggttggccctggcctgtcgatcggtcaggtgtttgaagtacaaattgtcccgttgaactgagggaaatttgggtgaaacatctacaggtcgtcaggtgatgaattaattaatggctgcaacatctcagcgtagaaggttggtttgtcgtggagatacgggttaaacatcgtgctaaacagttctaacaatggctctatgagtcagttgtttgctttgtttctaattaaggctccaagtatttttcagttatactcacaatacatatgtatgtatatatgtgtaaaagatcaataaaaaaaagtaaattacgatagaagtctcaaaatcatcttaaacaattaagttctaaaatttatttttttacaacgacttattagctggaggacaaacgatggcagtttatagataagtaaattaacactctcacatgtgtgggactcagtaaaatatagtaccgatgtatgtctttaccggcagaagacatagagatactattcaactattcacatattcacatgtgagatgatagcaacctttcaagctaaactaccccatctaaggctggtcgaaatggcgtgccatctatataatagtacatcgttcatatttgcatgatgtgtgacagatagatggctaagtcaactataaaggtggagtgcacatatgtacatatagcgtgcagctctagcggcccgtctctcttaatttcttgaggcaaattaaatcgaccaagtaatgaacctccacgagattcctaggcacgagaggcatctagaattactcagccaccttgtagactataaggtcagccacctctccgttggtcgatcgctagctgtttgctccgctctactagtgtgggatgtgcgatcgacattgcaacaccctccatacttgatcattccctgttgctacgaagagcacaccatcatggatgccgtcgagaggcccaggcttggtatcttttgcggtgccaatctgatgtgtcctggttgaaaagattgaatctaaacgattagatcatttcaatataataatacacgtagaccatcgccaggtgatgcagggactaggaaaaagatgcagtagggccaaatgaatttgtcaaaccactccatctcaaaatattattcaaacggtgcctaactggtggcagtttctgaaagggaaaaaatagagaagcaaagcacaatgaactttggcatggtaacattataccgtagtctgtatggaaggtacaagcattgtatacttttacatcttttgttatgaatgggccatttgtatctacgctgccaccttaacactattgataaacaaaacaacttttttctgttagtagtaaaccttgcaaataaatattagttacatcatttcttaccgatataataaataagattggtattgttataccagtagagaccaccgaaaaaccactccactgtgcactagagtaacacgaaccaacagaaaagagagaggagagtcacccgcacaagaacagctcagagctaacttacctagctggttaaaatggatagtaaatattaggaaaggaatagtctctgccaaccagagatgtgcaacaaagcaacatggactctctggtaaggctgggcatgggaggtttcagggacccaactgcgtcaacgtgggatcatgtctcggaggccggagcgtttggtggtggcattgtgtcgtcacgttggcaacgggtgccctgactgcgtgcttgtcttgaaaccttcactcaccatgattgctcatggaggttcaatctggtaggtcgtcctgagcactgcaaagcagtcatggttcgtctgtcggacgctaattctagcgcctatcacggcaacgcgagcaaacagaacacatggcgtaattctgcggcatgtagtatgtggacagcggacacattcttggaagagttaagctagctatagtttagttggaataagtatttgattaaggagtccgtggcacatttgtttatgctggcaagattgtatatagatacatatggggccgaggtttgtgtcatgtagtttaagtaagttgagtgtcctacttgttatacgcagttttagtttgcttagaaaaagaaaagtttgtcatttatatcttgactagaaaaaatgcctgtgtgttgcgacgggtgaatgctattttaatcatattattgttaagatttttctaaaaagtacatcctccatttcaaaattatgacgccattggcttttcgcacaacgtttaaccattcatcttattaaaaaattagtataaatatcatttattttgttgtgacttgttatcgtcaaataaaatataatattaacatatacttttacatatttatattaatattttaaataagacgaatggtcaaacgttgttggaaaagacaacggcgttatacattttgatagtattgatatctagtttgaaacttttattgggatgatggtcatatcttgtacgttgctttcttatgatttggcaagagttttgaagcaattaggagtctgactcttctcctaagttaacatgcgagtttttaaagggatttcttatatcaatccttatgtatttctgaaaacaaacgaacctgaaaaccgacttaaatatagatgacataccaaaatatcagcagaaacatcttcaatttttatgtttgacatagataaattaaaatgggaagagtgctactaatggtgcatatttttttcttcttttttttgattaatgtggtataataattcctagtctctagagtgaacatgttggtttttagcaatatttggaacaaaatttgaaatccaaaagtttgttatattttagcacaaagaagtttttttaattgcgatctaaaataaataacacgctcaaatattttttttatttaaatagagagaactttttggcagcaactgaaaaattactcctcgcaatatgtaagtatgcatgtatatgtgttgacaccaagactgactcggctttcgtcaaagtgttctgtaattgcaatctagagtgaattatgcgtgcatatgtgttgacactgagactgactcggtttccatcagcagtacatctttctttttctctcccagacgggaacacaatcagacttgtatgcatgcacgttctcgtgacaaacgtgaagaaaccttgcagctagcttcatctgttcgagttaaatataaatacaaatagagtgtttcgtaataccatcaataaatctatatctttataaaaccaactcaaacacggatgacgtatcaaaatctcggtaaaaacatcttcaatttttataatagtagagatagagttaatcttgttgtagttcaattaggataagtatttagtaatcttccataacaggctttgtatactagtcgtcaacccgtgcgttgcacgggttactatcatatatctattataaatgtgataattttggtcatatattaaattcataggacattatttgaattatagtattttaaaattacaatgattgaaagaagagcatatcaaatactacatgatatttgtgaattgcttttttaaaattaagttactaaagtactaaatttcttcgtattattaattcagagtgttagaaacattttattttggatggaaaagctaacactaaaaattaaatagtatttctaacacgaagtatattatctacaatactatgatatagacggtcatgactcacaacaaaggctatgcaccctgttgttttccgacccctaattaatctattacattagaatcggcatctccagtaaatctattactatactatgattttaaattcgtttgtactacttgttttaaagcatgagaacaatttttaatcttgcgttcatataatgaactaattaagaccgtgggtcatttgtcctacttcagattgttggaactctatttattacatagtaaaaccaatacaccaattgcatctacttaaaaaaaagtcgtattgtcttgcaaaagaaaattaatttaattacttgctgtagtgtttaaaatggctggtgcttagctagctgaaccccaacgccggcaccgtcaccgccgatgccgacgctccattaactgtggagctagctaggttaatcgtactagtaagagcaagtataatagtgagttataagcttactataagcttacgtggaggagagagataacaaaaaaatcaagaatgctggctctcatgcaaaagctagcttaacataaactcctaagtaaatacattaaatgtataggtgagagatagagagatgaggagaaaattatagccaaccttatagctaatccactatatatgttggctttaaaataggctaatattaggaagtgagctctactattgtcctggctctaacaaacagccgcagccacaatggttggtgtttttggggcacagaaatcatgggcatgagtgacttaatttcctagattgatgggcatggtaaacgtcgggaattcagttgcctccgatgggattctatgcagctttggcattgccctgcctggagcacggtgcatccacagatacggtgtagcgtgtgcgttgtccactacttccttgttggtgccacacggcatacctgctctggtacaacacgcagagcactgcttgctgcgtgctgacggttcgtctagttcttccacgtcgtcgattctggatgagtacgtacgggtctctcaagagatgctggatggtctggccatgcgttgggacaattggactgatctgatcgatggttgttctatctttggttgtatcctgactgtattgttgcaatgtttctctgttaaggcttacacacaatggagtaaaaaaaaagcgagaaactaaaaggagaaaaacaaataaaacgaattaagggaaattaatttgagcgacaacttttacgatgatctggtagctaaatgacccttttctcaagtacaattttattttaagaattttaccatacctgagaaggtaccaccaggtactaggaggtaaaaactccatctgtccgtccattcacaaagggtatgatcggaatagcttgtgataatcatctagtcctacacctggcatcgtctcttctacatcttcttctccttccacatcttgtagtcccaaacaattccgtcccactctatagctccgcgacacactgttgagacctgaagcacaccgccaatggttatagaggaggctacaatccaggatccagttttggggcctcatcaggatgggaatagtgggagggcaggcgacgctcgtgaggtgagttcatgtgccaccgacacctctgagggggtggtttgctggtgaagaggagaggcagcaaacatggacagacggagctcgccaatgattcagctagtggaatggaaaaggatgaacaaaagaaagagcaagtaaaaaatggaaagaagggctcgcctgaattcgggaaggagaatggtggattccttccattgtgatgatgaggattgggcatttttgctgtttgagcaccatgtcctgtactcctgtacgtcttcaatggtgatagactatctaacagttcggatcaagctaataaccagaaaaacatattcctggtcattaatccaatgttatctcaactagaattttcaaatactcggctctatcattgtggatcaacttctttaggtacatgaaagcactaaatttccagacaatatagctcatgcacctctggttcgcatggttcttggtgccaccaagactaggagttgaccccaagcagagagggcactgaattcgcagttgctgctggcctcggcttcataactgatggatgctgggtggcgtccccctcctctttattgcacaaccaggacagctgacatggcaacgcatgactttggaggtgtccagagcataaaagggggtggtaggtcccagctcggtctgaaccgcggctgcagcggtgtattatcgatgaggggagaagtgctaaagcagaggttgccgttttgcgagagtgtcagtgacagcggaaggagagacagcctgagaggacgagagagagctagcggagaggaggtagtgttggtgggaggataagaaaacaaactagagcagcgtgggggtgggggtggggattggcgacgggagcggactggggaggaggaacaacgccatgggaggaacgacaccggcgtccaccatcaaatcacctccctcaagctcgaggtaaacgttgtatcggccaagtcaagcttgttgttgtgtgcccgtgttaattacctctacggttctcgctcgatttgaggatagatggcgctccactcccacctgcatgcgaaagtacaaatttgctctcctaccatcaacaacatttggtacctgctagatgccatagcgccaggtaccgagcctttccaagccgttacatagaatggaatggacgaccaagatttggtacctcctcccctcaaggactgtaaaaggcctcttattattattttgatggttccaataattgcagatatcctcactcgtacgaaaaaagggtccaatttaaagagtgtagttttggctgatatttcataccacgtaggagtatatgtaaatggtacccaaatttaaatggaggtggcagtggtaaagaacagcattagaaacaaaagctttgcaatgatcaagacgtgtccagagctctagcttaggcaaacaggcatgggaggcactgaggacacgattgcgtccacgctggccttccttgcaaacgcaaagtcatccagaagcagcgcaagatatctctatggacaaacctgcagtgttctgcttgccgccctctgcatccgggagcagcagcagcttcatgttccccggtggattcaccctcgcccctgattattgattgatccgcgtagaggtcaatcggcatgcagggccgagccaagtacgtatatacgtagtgagtttaacactaggatagctaattcgtccccaaccagccgtgaaggaagcctgccaggaattcatgagatggatattatcgatagaactaagtattgtttggttttgtttgtattttccaaaaaggtgaaagcaggtattatcagaactataaaagcccatgaagctcctcgtttcttgtattgtcacgttgagccgggggggaatttattttaatattttaatatttaatttgtaacatcgtttattttcatgctcatttggtcttctctttcccttttaacgaaagtttggtgtttcttcttgcaacatagccaagcattgagttatatggtctgtgaaccgcgacataatttttaatttcaccatttaattttatatttaatttagggacctttttgtttttcttctatttcttagacttggcttttggaccgctataagtaaaagcatatgttttatgtttaaattatatgttgttgctcttttttttaataatgtaagttattctagccttcgcaatgttttgttgcttacttcattcatgttttccttcaagttagccgtaaccattaataaatagttgttgttgtattatggcacacaagacaccatacattatgtagcgctctagcttgtcataaaaggtagtagaaaaagataggctagcaaaatatatatagaagggctgaattatgtagctatgttactatgtaatgaattgcaacaggtaactacgtataactagtaacagtaacaaagggtaatacaaagctatctgcttgttgctcaaataattagacaaagcagaagcattgttctctaatcatatctccccaaactcacccgtggatgtaacacatctaggaactggaagcatcggggagggcgatcgatcacttcttcatggatagggcgaggtcattggctgagagggaggcctcgacgaacttgccgatggtgaacttgtcggccgctgcagagcgcactgtagcgcgccgtcctgaccaaaggcctctgcatccacaagctgaggatgaaggtgatttgggatggcaccgagaggtgcgagatgaagatggtaattaccagaggatgacgtgtgggaccaaggatattttataaataattgttttcttcatttgtagatcggactgatctggtgaaatagctgccgcacatattttgtaaataccggttactttacacctgaacttcttccacggtatggaaaactcctggtgtaaaaagtttagggtgtaaagtaaccgatattagagtttagtggtgaaaatcgaattaccgacatcaaacgtggtctttgaaagttgaaatgtggttactaaaagtcattagcactactttctaagaggactcgcgcgctaatttaaatggtagccaaatttaaagaggtggagcgcaccaattttaattgtctagattattcagaattttgggatagaagaagacatgcaaggagtagtaaattagctgaaaagaacttaatcccactattaccacactcacatgtacacacggctacttatatggaccggtgtgcacggctcacgtttttgacccaagaaatcgacgtgacaacgatcgagctctccgatccgatcccctctagctaggattgtaggcatggaggcattggaaattactcggtggcctctgatccttccctcgcagcttggcgatctcctcctcgaccaaacccggcgcttgcgtctaacgcggcatgtgcgagttgccacaaccacaccattgcgtgcgtgcggcttcttccctgcacgccacgcgcgatcgacgacgtacgtgttgcagcactttgttctggccctggtggcggtaccggtgatcttggtgtttgctgagcccagttctgatggtggatgagtaggtcagtccctctgttgcatctattccttgcaacagagtgcagctgctgtgaatattttttttttcttgaccatacggatgagctagctcatgcttagccttacgcttgaataaactggaacgtaataaatagaactcggctcattaccatcaagagaccttttgcaactaaggatacatattttcagcttttttttaaaaaaaatgattaaaagcctgacctctacatccaacttggatgtacccaacacatacagtgatgtcattgataaataaaataaattttgacaagttggaaaactcatatattagtaactttcactacttgactaaatttggtgctactcccccgtcccatgatataaaggattttaggcggatgtgacatatcctattacaacgaatctggacaggtctgttggagccttaagtttttgttggagcctaagcaagatgggttgagttgtgatccaaattcatttacatatgtataaaggtcaacttcggacggagcgaagtggaggcccgtcgccggtggcttgggccgtcacatagctgaagaggtctgaatatgatagctgtgtgtatattaaatttgttaatggatcacgcatatatatacttactgttatatattgatgatatgttgattgctgccaagagcaaagaagaaatcactacattgaagaaactgttgagtagtgagtttgatatgaaggatcttggtgctactaagaaaattttaggtatggaaattactagagaccgaaattctggtttgttatttcttagccggcaaagttacattaagaaggttcttcaacgtttcaacatgcatgatgcaaacactgtttgtactcctattgcaccttattttaaattatcagctttacaatgtgctagtattgataaggaggtagaatacatgtcaaggattccatattctagtgctgttgatttttttatgtatgccatggtttgctcttgtccggatttatcttatgctatgagtttggttggtagatacatgactaatcctggtaaaaaacaatggaaggctatttagtggagtttcaggtatcttcgagacacagcaaatgcttgcttgaagtttggcaggactgataagggacttattggctatatggattcagattttgctgctgatttggacaagcgaagatcacttataggttatgcgtttactattggtagttgagccatgagttggaaggcaacattgaagcctgttgttgcccagtctaccactgaaatagaatacaaggctattactgaagcatgtaaggaatcagtttggctgaacggattgtttcctgagcttcatggagttgattcttgcattaacctgttttgtgacggtcaaagtgccatatacctcactaaagatcagatgttccatgagaggataagcacattgatatcaagtaccattatgttcgcgatgtagtcgcacaaggtaagataaatgtctgcaagataagtattcatgataatcttgctgatatgatgacaaagtcagttcatattgctaagtttgagcttttctcaagcttagttggtataatggtttaacccaatagattatttggcgtcgaaagtgtttttctttgttgtgttgagggtgaaggtttgatttatgctacaagaaggaatttgtctcaaggtggagtttgttgagttttaatccaaattcatttgcacacgtataaaggctaacttcggacggagcgaagcggaggcccgtcgccggagacttgggctggagcaaagcggccgttttagggtttcacctttatatatacttctggaatgtaagctgccgttcggcgttctaacctcatccgatatatagtgaagatatttgctagctggcgcctatggtttttctctcctaatttaagaggggttttcacgttaaatcttgtgtcttctgtgattggtgtatcattttttatcgtttatttgccgatcgttttctaaatatatttgttggcatgcagcaagtaatcaaagacagtagttgtagtacgtacatattctctctgtacttgtgctgttaagtcgccgtagtaccttgattgtttatttagccttatacagacttgacgtctcatgcatgtctcatgacagagggagtataaatgatggcctttccgattgtattttcatcccatagttcatctatttataaaagacaatgctccacttctaaagctgcgtgacacacatcgagagctggagcgaactaaagagctggccgggtcagtgtggatgttagcatgtatacacgtacacgcatccgtagcgactctattgatttgttgaaactaattaagatcctagcttagatatgggaggcatggggaattatttagccgccatggaactaaagcttcgccctcgcttgtttctgcgcttcttgtgcaaccgcccatgaacatacgagcaatattttcgctatgaagagcacggggaggatgctggctgcgaggcccgttctggcctggccttctctttgtccagccatgtcgggatggtcgtacgatttcatatgtcctaatgtattgctcgaagttcagtttgtactattggagaagtgattatcccatttagtaccggttataacaaccgcgactaaactttcatctgtcctaatggtattcgaagtgcagctagcggccggacgagacgagttcgatctcgatctctcgctagtagtcttctaggcatgggatgggaggagtcggaaattacttggctgcgtcggatccaacacttggcagctcggcatcgctctgcttactaaccgggcgcctgcgcgtgtgacgccgaatgcgcggttgccacggctactccattccagaattaaattttaaaatatacagtattttcctagaatttgcacatatatacatgcttttgaaaattttacaaaaatatatgtttccgcggattgggaatgcggtatcgggcagtggcgcgacgccaagacgcgcgaccgcatccgtcggtcccgtagattggttgtgcggcaccggtgctgacataatatagtcgtttcactgcctttgttcaattcgagctgctagtgccaagaagtcatgcatgcatgtcagaatagtgaatgctaaagctagctacctgttaatacaatcaaagttttatgagtatatcctttgtttgttgcgggatttggcggtggtggcgcggctccgcgcgaccattccgcgggagcgcgtcggtctattcttctgcgcaactgctcctggtgctgggaatggacgccgtcgcgcgctattgtcacgcgggatcgacgcgatcgcgcgttttggcgtcgcgccaccgcccctcccatcggtcaactgtacggtgccgtatttccaatctgcgggaaaggtatatttttaaaaaaattacaaaagcaggtatatatgtgcaaaatcgaagaaaataatgtatattttaaaatttaattgatccatgcctgcagcatccctcggcaccgcgacgacgcgctccggctaatcgttctgccccagtatggtgttatgctaagcccagctctcattctcacgatgatgatgagccgtcggtcagtcctgtcctatctacctagctattccttgcaaattggagtagtacccacctgctgtaaatttttcttgaccatatatatgttgttttatggtcgagggttaatacatttcaatgtaataaatggaactcctcttgttagcataatgagttcgtttttttttgttgtttccaggagactgtttaaaaacataggtgtgcctggttacatgacaaaatgtgtccatcactaaattattgaagcatccatgactttggctataattaaatagagagttagacgaaagttttgtacatgcaattgatgaatgagaaagcataccacaagcttatatctttatgtctcttacattcctagaaattatgcaacttgttttgactaggcatataatacagggtcacacgatgttctaccgaatatcgacgaagaaaactagtaaaaattcatagattccttttgcatcttgctgatctaatcacgaaaacgaacttctcccctattccccgttccgttttcgctattcccaaagaaatccactaccgtctgacttggagtcgtcggtgaaagctgattgggaattcgtgaaacagcttgcgggctgtgcatgtcacaacgcccacggacaccatattgcgccgggaccgcacgacagtgaggtcacaccgtgccacaacccaggcgtcgatgtgcaagcctcagcgtccatgcccactgaagccacgccgccacaccaagacacatgtaatgtactgtcgtgaaggtgctggccggacatgaagagggaaacagaaatatagacgaagaagaatgaagaagaaaagggaaaaagtggcgaacaacaccagctagcggagccacttatgccgaccattcatggcgctgccatacccacagcgcatgccgaccacttgatgtgtggctgcaggaccgtcttgtaatgactgaacgagtaccaaaggcgttggccgcgcctccacgccgtgtcgagactgttgcttgcccgtgcctagcaccgctgaccggccgagctactccgccggttggccgcgccccgccacacgggcgcgcaaccaccgctcgcggtaccccgccgaccgaccaccgccacacatggcaagggcggtggttgtgtggaggtggggtgggggaaggaaaaaaacgaaaggaaaaagtagaaagagttggtgattttgcaaaaatgcgtccgtattttctcgaaagtaagcacatgttcttctgcattggaaaattggactttaaatcctgaagtttttagagaatacagatataatcctctgcattggaatatttgttggactaaaaaaaagatgtgaaacacacatgattttcctttgcgtccagtatatatagtgctatgattataaaagaaatacaagaccgaggtgatagtgagaccagacaacaaactatatatatcctagtgagttgggaactaaattttccaacgaccgtcgagacgatgatgcatcgatcgctctagtttaggcatataggcatggaaggcatctgggacaaagctgcatcaactctagtactccctagaaacgcggaagcgttttagcctcgcttcgcgtatccggccagtggtgttgacagcaagtgcgccgtgcatcctagccttcctagcgctgcgcacacccccggccccatttcagctgcattttctcatggttggtttttagcgagcaatgtgagcgtaatcggtcctgcgaccgtgcgtcgtattctctagccgccctaccacaaacagagacctcaatcggtcgcattttggtggaaccccaaccataaataaatctagttttcttagtgtgagttgcagcatttgaatgtgcaatgttctggttactgcaattcaattgagaggatgcatggagatctttttctggtcgttctaatgcatgtcatgctcttttattttttttgtttctacgaaaaatattagacctttccacaatcctctattttaacatggtttaatctattcatgataatgtggtagcccctccgacgacaaatattaattgacctttggttctttttacggtatttgaggttctaccttagactacaattttagtttataaatctagtcagagatatagtgagactatcaatgtgcattccatgaaaaatctactcacactatttttacgttttgaactaaatatttttaaaatatatttttttgagaaaattgtagtatttgaaggttaaagtttaacctgattttatccaaaaagcaatgttctaataaatctccagctatagcggcaagctatagatagcggatagggaggggaacaactaggatacttcaattttgacgctaagatttgtcggcagctaatagctacacttagttagagatagcatcaccaaaatagccaaagatagctgcacttagctgctaaaagtatgaattagaaactatgaattccatatatgaagtatgaactacgaattggtgatgaactctatctgtcaatttttagctcaaattctatcattttttttaattttttttcttatattttcaaaaaccgctaaatttcttagctatagctatagctggtcttagtttttggagagctcaaccactaagaggcttagctgaagatttagaacattgccaaaaagtcaagtactcgtgaccagggaatataccctcatagcttgttggttggactgaatattttctttggctacatgaagatagttgttgagttattatagttgtcgaaagatggcaccccagacaccaataatgcacattaatatgtagtgataggctatagaagacaaccaaagtaacataatagtaggaggtagagaaacaaggtgcatagctcaatatgtgaaaaaagaatttgagaagtacatggccgtcgaatgattgtgtgtgtgcaccattgtgtgccaactggaagattccatcttcttaacatgttggacaattcatcctatgcttctaggcatgggatgcatcaggaattattcaacagccttagattggacccttcgctacagcttggcgttgctctgcttgactaagagcaacttcaacccgagcctcatccctagatccccatcatccgttgcaggacgcagctccagtagatggatgtggcttggaagctccctccctctctccatgactaggaccttccgtggcgtcgtgcatagaggtttgtgaggtggcggatccgaagtctgtggcggggccgacggatggagacgtgcaggccagcggtggcgtagaggcatgcagtatcgtcgttggagccttggaggcttgcaaggcggcgactcatatgcaaatgacgatggagggatttttacatttccttgtttttcctagataagtgctaatgactaacaagaagttgtacttgaagaagggcatttaggtcatttcatgttagtactaaacttgcattgggaatttagggatgggtttttttgtgagacagagggggtagatctcatgtaatcaagtagggagataagggaactgtttccgtggtcatctctcttcatgtgagtgctattcatcccatagactaagacagttagacgcagtcatcattttatagaaggatagtactccacttcaaagatgcgtgacacacatcgagagctggagttaaataaacaaggtcaatgtacatgtacacttgtgtacagaacgcatcgatagcttatctctctcaatttgttgaggcaaattagttaaatttgacgtgaggatcgactctccaagcgaagctctcagcttagctagatatgggaggcatcgggaattattcagtggccatggaactaaacatcccccctcactcgtttctgcactgcttgactaacggggcgactggaggaagctcagcgtctacaattgccgcttatcccagcttgatagctttgatagattgtggcttcgcagctcgcgcactgcacgcgcgtcgcacgctgccggagccgacctgatattttcttgcaacattttcgctatatgaagagcacgcgagcctcgaggttgtcaaaaaaaaaaaagctcgaggctcacgagctgctcaagctcgacttgtcttaggctcgattcgagcttggctcgagctccagacgagtcgagcaagagcctctcccaaagttcatgagcattgtcgaggagcttgagcttccaatgagtctaatataagaattttgttgttatttaataaacttggagatcaaatattttatttgtatatcttgtattgtcatcatatatttattttattattttttctcttttattaatatgatgaactagaaattaattatttttaaaagattattcttgaaatatacattgttttacataaatattaagttcaatagtcgagcttgatcttgatcgagctcgacatagcctgtataaaagctcggacgttttataggcttgaactcgagcttgtatgagctcgatcctatgcaagcgagctagctcgggctcggctcattgacagccctaccgcgatcgatgccgacgagaggcccgttctgtccttgcccttcttccctttgttgtgtccagttgggatggacatacgatttgatctgtcctaattaataaatgtttttttaggaacatcactgttgagaagtcttagagttggacacatttaataaaaaatatatagaattaaatagggagaggttgtgattggttgggaagtggagataggtgggaaaagtaaatggtgaagggttgtaattggttgggaagagaatattggtgaagaagttattatattttgggataaattctaagtgctaaaagttattattttttgggacggagggagtagttgttttcccatggtgttgtgccaaggccgagattaatcacttacactgctaagctagtttaagcttcaacgaaatttggataagacgcaaaaaaaaaaatcagctcgttacgtcgtagactattgcaatatactccatccttccctaaatatttgacaccgttgacttttttaaatatgtttgaccgttccttttattcaaaaacttttgtgatatgtgtaaaactatatgtatatataaaagtatatttaacaataaatcaaataatagaaaaaaaattaataattacttaaattttttgaataagacgaacggtcaaacatttttaaaaaagtcaacggcgtcaaacattttaggatggaggtagtagtacatataggtagtcgtgaaaatttggtctttgatagttcccggtgataatgcacgcaaataaaatggagaaggaaaacaaagaaacaatataacaaataaatttgacaaaccattaattccaccacaaaaggctcaattaatttagtctaacccgaagtacgctcccaatatttgtgctctctatttataaagagcaagccgaactgagtcatgacaaaaggacaacgggagtagcttaaagttaacagcttaaaatagatcgcataagcatgtagaatggaattgcttgcggagcagatataaggtctaagaggcatcggaaactctgttgtgccatggttgttttggttactgcttaatgcttatgtttatcataagagccccactacggtgttctctattgatagtagagaataatgtgagccattattcttatttaatcgaatagttcagatctatttatattatcgtctagtttaaggtaatagaaatatggagatgtattattgtaaataaaaaagatgaggaggggtacaatcattatttatctgcgactaaacttttttccttcttatttgttttttcgatggaatatgagtaatgccattgcaatggatgacctacatgacgatctagctgggaaaaaacataaatgataaagttacctctgatcactgtattatgaattactgtcttatccttaacaataaacgggatagtgtcttatccttaacaatgaacgggatagtataatactatcgtagagagcaccataacattgcttttttttaataaatggaagcttatgtttggtaatacgggacggaaggagtacatggccagactacttatagataactccagctgcctccaaccctcctatgctgtccacgtgaggcttaaccggattttggaaagggtttttggacacgaataaaaaaactaatttcataactcgcctggaaaccgcgagacgaatcttttgagcattattaatccgtcattagcacttatggctaatcatagactagtcaggcacaaaagagtcgtctcacgatttcctccctaactgtgcaattaatttttcttttaatctatatttaatgctacatacatatcttggaagattcgatgtgatgtttttagaaaaaacttttggagaactaaacggggcattatataggacatccaattcgctggacagtgtcactatcagagatcaattcagccgcgtcggatccatggaacgggcatcgatcgatcgatcgagggataggccacaagctaggcaacttgtgcattcgctgctgctggctctaaaacaactctagctgctctactattgcagagttgcgccccttaggcatgagaggtgtttgggacataccagagaccagctgtggaagcactttgatgcatcctcgcttcgcgcattaaaatgtggcacgggccacttcatgggctctgcttgttttagcaactggagtagtagtagtattactctgttgtccaaacatattaaaccaatatactcgagagtgctattttgatgtgctttagtgcggctagtagtagtattcagtagatccttctaaccaaatgttactatctgggtggccggtgcaattgtccggtatgattttacttgaaaatttattaaatagctatcttgtttttttaagactttgaaagaccaaaccttatcatccctgtgtttctaattttatagttttataaaaatcacaccagttgctaccacttacttttgtcatctctttttttatttgtttgcttgatctaccattgattttattaattctccttggaatctttataaattggatagtatagtttttagagtttattgtctcattcggttttgtttttataatttctagaagtcccattaagcgctgccattatactcctccatggtccgtccactgtcttttctctttttgtcattgcgattttaaaagtcgaatataattattgtttgggttcattttttactttttataagtccccccaaactgtcagtggctttgccactgtactcctctacggttcacccgctgccttccttcttattgtcattaagattttgaaatcgaatattattatcattgtggtttattttttttacttttagaagttctgaacctttaaaaattggaccttatagtttttagaggttattgtcttgttgggtttcagtttttataattttagaagtctcgtcaaacgatgccactatactcctctacgcagtgtccgccgccaactttttattttcattgggattccaaaaatcaaacataactatagttggaatttattttttactttctagaagtcccgccaactgtcgacggctgtgtcactgtactcctgtatgacccacccgctgtctcttctttttagtcattgggattttaaaaattgaatatgattatcattggggttttttattactttctagaagttccgccgacagcgttgactggttacttgacggcctgcctgtcgtccctctttttaatcgtcattaggattctatttggtgttttattaatattttttagatgtcccaccaacctccaacactttaattctttataagtatgttacttaattactctcgtcatgaattttagatggtcttttctttcaatagtctttatgttttatcaccaattttagttatttataaattatattcctagttgaatatttttttaattttagaatttattttatttttattttgaattttaattaatactgtattatgtttttttagtatttttatattttattttcaatttcagctgtttcgaaatggtattcctacttgaactatctttttaattttttctaatttcatattttattttatttttttattccgaatattaattaatgtcatattggtctcgtacatggaatcttctttcaatagtgcatatttttaattctgaatttcaattatttttaaattgtatttctacttgactcttctttccttttgctccaattaatgtgggaatttctagctcccacagtgaatgtggttcctccttttaaagctgttttaataatatattaatagatagatttctttgatggttctatctgcataaacattgcagttaagttattttatatctgttttgtgtaattgcacataaacatatactccgtacatagtgctaggccatataggctatagccatgtaacggtaactagagagacagaagggatagcacgaggtagagaactaagttgtgtggctgtacatgtaaactgtagagagcaagcaaagaacaaagtttgtccctcttcaatgtatcaacgaactcatccatatatcccatatatccatgtaaacatataggaacagaggaggtatcggaaatctgggtttagcagtgatgtagaaacgatcgtacaacggaaaactggtaataacttgagaaagccattcagccctcgctcatccttgtataacttattcgcgttgtaaaataaacttcttctcatatccctagaatattcgttctagctaagagcttatcgtctccccagacagtttcacccgaagagaacacttctctacggctacacgttctcctaatgcctaagcaagatgaaggctaacgatgagaagtaccgaagagctatctcctacagggtcccttgcataaactctcagccagacaaataaactgggatgcacaaaagaaattacttcatataacacgagcaaatttacatacggttttccctttcgggaacccccgagcttacagacttgctccatgcagtcttgcgtgtttatgagggggatgaattctaatctctcgggtggacgtccacccgtttcttgtatgccacctaaatgattatgaaaaagttacaaaaaaatttataagataggttaatatgtaatatatcatctcacaaacatgcaagttcaaattcgacttctacaagttgtaacaaaaataacaaatttgactgtgaatatgtgtgtagtagttagagtttaattaacaaataaatttgcgtgtactaatttgacttttatatttgtgcaaaagattttacatcccgaatatttcttaaaaaaattgaatgaacaatatattttcaaatttaattcttgttgcaatatagttcacataggaactcgtgaaaacttggttttagatagtttccggtggcgatgcacgtgactaaaaggaagaagaaaaactgagaggcaatataccaaataaatttgacaaaccattccacctcaaaaggctccatttattctaaccagatggacacttccaatatttgtgctctctatttataaagagcaagacgaactgagtcacgaacaaattaaaggacaatgggagtagctcaagggtaacagcttaaaatagatcatcaaagcatgtagaatggaatagcttgctgaacagagctaaggtaatatccttgttgaaatagtatgggcaagtggcaaccatgcatagtggcggatccaaaaaaaaatcgattcgttggtgtcataacgtgtctgttggtgtcatagtatgctaattatacttagatcgtgatggtataatatatggataaacagtttcgctatagattttgacaaaagtcgttggtgtcgaaagcatgcattacactgtagatccacccctgaccatgcagcatgtatgttaggtctaagaggcatcgaaagctcagttatgccatggttgttctggttactgtaatataacaagcaatttagtactgtgcagcaccaagagatagaagtacaagtccattagtcttctaaaagatgggccatatattatgaacgcattcaatgtgaccaagaggtgctattttttaataacataccggtacctatgatgggaggagagccattgtggtcagaatcgtaggtgttggttctatatgcgaaccagtaactgtgtgatttttatttagcaccaacacctataaggtgttttgtaattgtggtactaatattgtcctgcagggtggggcaaaggtatggagatgctgagaataaccatccgtttataaatgatgtactttcaagctgaggtacttataaatcattcgcctaagagacataagtacatgtctttaggtttccagaagacaagccatatattaagagcgcattcaatgtgaccaaaaggtgctaatttttaataatatactagtacctatggtgggcggagagccattgtggtgaggatcatggtgttgattctatatgcgaaccagcaccaatgtgcttttcatctagaaccagcacctataaggtgttttgtaattgtgataatgaccattgtcctgcaggttggggtgaaggatatatatggagatggtgtgaaaaaccatccatccataaatttcaagctgagctacttaaaaagactctgagaggatgtgccatctatatacatagcactcgactgccgcgggccacttagatagctgagttaacttaaaagggccagcagatgtgcacgtatatgtagctcagttttggaggcaaattaaaattgacggtccgacgactctcatcagatcgagtctctgtcgctcctagctaggatcctatatatgcatggaaggcattgggaattattcaacatcccttcatcggacccttcgctgctgggcgttgcatttctggactaatgtggtggccgaaggcagcgcaacgtgtgcgaccccctcttcctgccaaatagcttgtggcttccccactcacgtactgcacgcccaccgcgcccttccaacattgtggcgtggtgttcgtgcagacattagacctttaggcagagcaagtggcaagggaagttctcacgcctgctctgcccggttatctctttgatcaccatcacagaaggctcatccatagctggttccactgctctaatcggtgctagatttgttgcatcactactcttctgggagactcatctgtgtcaactctcaaaccggcattgatgggagagcacgagtgaaaagaaaaaaaagaataataagaagagttcgacagccccattgtttggttgtttggtggaataggtcaaacggcatatttgcaaataaaaaataatttgtgaataaaacttttatgtatgtgttctaaacgatctaaaaacaaagactgaaaaataaactacgatgacaaaactctaaaatcaactttaaatttaaagttgaaaatttaaattttgactgataagcgtaagcataagaaaaagacgaggacgctgagcatgtctcgatgaacggagctgacgcttcgagccaaataatcagaatcgttaccgagacaccgtagaataatcacatttggatgcaatttttggctccaattaaaaaaagcacgaatgttgaaataaaaaccacaggaatgagtacacactgggacatactcccaatcatatttaggcttcatcctcgtattggagtatgggaagcatctaaaattaggaaataaccaacagacgaagagaatgaatactaatataatgatcaactatgaacagggggagtatttgtttttatgttttcacaactgacccaatggttatacaacttccaatcttttaggtttgatcgatgatccggttcggttttttcgactatggataggacacaccctgacagggatgccgagaggcccattctggctcggcaactcttcattataatggacgaattgttctgccctattgtattccccagagtgcagctatactatgtgaaaataaattctcatcatgttgtttcttggctgaggtcaactacactgctattttttcaataaaatatgtataccacatcgtttcaagataatatatatatatagatatatacaccctcgtgaaatatgtttaagatagttcccggtgataatgcacacaagcaaatggggaaaaaaaatcagagctgcaaatgaaccaaatgaataatgaatttgacgaactgttacaccatataacggcccattttcttttttttagagcatctccagcagggacttcaaatccagcccctattcaatttttgagagttaagataaaaaaactagatccagcaggggccctactacagcccccaaagtgaggaggccctcaaatcctcccccaaggccccagtcctggggactccggagcacgcccccatcgtcatttttttttggcgcggatataattttgcttcgtgcattttcttgttattcccgcacggctgcgacgacggatcttctccggcgagcaccgacgaattcccagcacctccatcaagactgccctagaaaggtaagacttttccatacctttcttgcccgccgttctcgaggccttcggcggcagtccatgcacatgcccggccgccgatctcccgccatctgcctggccacacgccggccgtcgcgtgccctccgaggctgcccgcacacacgtcgcccacctgcacgccgcctgcccccacgctggcctcctgcccccattgatttttctggagaaactctaagtaggtcatgtggtgcgggggttcagtggtagagtactaatcaattttctgaataactctgttcttgacacctgtggacatgtggtggtagatggttctggtggagactgacttgtttttaatatttttttggagaattgtagtggactttgtcggcaagaaaaatctaaattctcagctagtaatggttgtgtttagttcacactaaaattagaagtttagttgaaattgaaacgatgtgatgaaaaaattagaagtttatatgtgtaagaaagttttgatgtgatagaaaagttggaagtttgaagaaaaactggatctaaacacggtgaatatatcactgtatttatacttagtagcactgtacaattgttgcaatggatcgattagaaccatatatatatatacaggagtaagtggtactgtactagtacgattccactgcttttcatagattgaatgttgcatactgtatatggggtatactctgtaccgtgtatgtgtagttggatgtgtgcatatgctctaaattttcttattaattttatgattttgtgatggcagtgttttttatatggacttctacgacgacgatgacgacgacgatgatctcattaccgattggtgggatcaggaggagttgtctgacgatgatgactactacattgcagctgctcttcttacagacatagagcataagaggaccaaaagaaagcatcatggttcagtcccaggtcgtgagataattcatagggacaggtttgctggcaatttacgcatagtggctgattattttgcagatcctcctatatatagtgcaaaattatttaggaggaggttcagaatgtcaagggagctcttcttgcgcatcgtggctagtgtggaggctcatgatgactacttcaggcagagaccaaatgcagtgggtcttctcggtgccactgcattgcagaaggtgtatggtgcaattcgcatgcttgcatatgatattccagccgatagtcttgatgaagtcgtgaggatttcagagagcaccatgatagaagctttcaagcactttgtcaaggctgtggtggatgtgtttgctgatcaatacttgagggcaccaactgctgaggacactgcaaggttgatggctataaacactccaagggggttcccagggatgctaggttgtattgactgtatgcattggaggtggaagaattgcccaacaggctggaaaggacaatattcagggcatgtggatgggccaaccatgattcttgaagctgttgcatctaaagatttgtggatttggcattccttctttggactaccaggttctcttaatgatatcaatgtactacagagatcgccactctttcaaaggcttacatcagggacagctccagagttggagtttatggtgaatggaaataaatacaccatgggttactatcttgctgatggcatatacctttcttgggccacttttgtgaagaccatttctaattcacaaggtaacaagagaatacattatgcaaaagttcaagaaggagtgagaaaggatgttgaaagagcatttggtgttctacaagcccgctttgcaatggtgaggggtcctgctagattttgggatacagagaccctatggtacataatgacagcttgtgtaatcatgcacaacatgatcattgacaatgagcgagatgaaaatgtagattttgactatgatcaggaggacagtgaggtgttgaggaaggaggaataccaacgacgtaataaacctgtgttagagaaatttctaaagatacataaagaaattgaagaccgacgggtacatgagcaacttcgagatgatcttatggaacatttgtgggcgcttcatggtgctcggtagtttgtttcattgcattttctatcatgtgtgggttatgttcaatatttgcttctaggatatatcattttcatgtttgaaaattttgaattcaattttgaatcgtggtgtttgaaattgcaaatttgaatatggttgaattccatgcgctagaattatttatgtttaaattactatgtgttaaactagatataaatataaattctatactaaaataaaagagaaaaaaaataggggctaagatatggaggctactgctagacataaagacatatttagggtcctagaacattgagggcagcccctatttaacttttagggactcgaaagtaggggctactgctagagatgctctttagggaaaagacatgagctctaccattcatttatagaggaaagcaagtaaaacaaacggaaaatccttttacaaacagaggaaccaaggttttcccccacaatacaggaaccgatttttaggtagccagcggccacaagcagcaacaaacgactaagggccatctaatttaggggactagctgagctgccgccatttgtttacacatttccaagatcgaattcacaacatgttccaccgtgctgtaggttcagttgaaaattctgtcatttcattgcagccaaatgacccaagccgtgcaaatgattattccatcgaaaatattcctttgatccttcaccatatcttccttcagcaagtgtcccaccagctcatgaagttaccatcaaagcaggaggaggtcggaatgtgtggaacttgatttggaacggctgcattttcttctcgatcagccgctatactgtcccgttgttcgtgttctgtagtttatatacacaaatagtataacatgaaccaacgtagaagagagtcaacaacataaggacgacgaggctcagagctagcagctgataaaatggatcagaaaggcatggaattgaatatagcctgctaagcttaaaacgatggcaaattttgctcctcaagtgctatgattaccgttcttctcagaaccagggctgggaagcaacgatacaacgagggctgctttcccagtctgggcaaatagcaattagataaattcaggctttagatcagagcacacatatgaccggccatatgccaggtttcaacttttgtaattgccagttatatatagcgtgcaggcgagatgacacctctggcaaaataacaagacgtctatatatgacatgtttttgataatgcagtttctttacaaatttactttgaacactcaactttcttcaatttccctttgtgatcttttttttttgcgggggccctttgtgatctaatataatggtagagcattgtaaaagaaagcacccttcaatcaagcaccatccgtcttaaataccatagccacattttttattttgtgactaagacatcatgcacgcatccctgaaaaaaaaaagaaagacatcatgcacgcagcggtatatctatgatttttatataggtggtccaacttatatatatttttttaaaaagaccctaattataacaaagctaaaagccttttaaaggaaaaagtacgagttaccctgaatcatcgtggtcgactaaataacccccctaacccaaaaaccatattagaaacatattagaaacgagtttttgctttgttcaaaagtttttttcatagatgtataaatatgcattaattgggctaagattttttttggtggcaccgggatcataaggaccaccctgtagacccgcctatacatgcacgttatgtagtgatgggccataaaaggctgccaaaaagagggtagaagaggcagaaaaacaaggtggctagctatgtgaaacaaagagcaggggatagtattcaggcagtcgatcaagcatttgcactatctgcgcaagtcaggcgattgcaacagccatatatataacatgtaggaattggaggtaccagaaacctagctcttgcttcgaagaacagattgacaagtttgactacccaaaaaactgtagaaattaagcctcgcggccctttttcagttcatcttcctgtcatatcctatgctatatgcatatcagacagaagcgtgagcctctagctagtacaagcatcaacaaagtggagaagctgcgaatggtttgtacgctagcttcttccatggaagattcacccgccatgatatatggaacttcaatgtggtgatcgcttgcgcttttttctgaagactgaattctactacgatgctacctgaaaaaaattagccccaaaaagattctttgctgctttgatttactatactagctagtatgtgggcatagcacatgtttttgtgatttatatttgatcgaaaatcgctggttataggtgaaataattgtccaacgccacatatatatatataacaaaggctgcatcgtggattgtttccatttctcattaaaatgattgtgaacaaaatagcatgcattgtcgctattttatttcaacataaatataataactgctactctaattaatatccacttcaataaaaaaagcgcaaagcctcgatcttcaatctccattcaaaaataaacattgaatagacaaacaccacaaaagtacaattattagataaaaagagtggagactaaaaggatgattaaatgcataacttgttggacatatatatccttgtggaaaaaatctagtatgttgtattctgatatattatatcactacaagagaagtgctcatctctcccggttcgcaaccctctttactcccgggtagcgaaccgggagggagaatccgggactaaagatggcggtctttagtaccggttcaaatacgatgtagtaaagctccggctcatccccgtggctggcttagccatcctttagtcccggttggactaaagatttttttatttttttaatttagttgtgatgtgtgctgcctatacatatatatgcatatatattatggatatatatgtttaaatacatatatatatatatatatgcataatctagaaatgtatatattacaaatatacatatatgtgtacactatatgtatctatacatatatatgcaagtgtgcacatatatgtatatgcacttaagtaaatatggcctatatatatttacttaagtacacatatgtgtactatatgtttttacacatatatatgcaatgtgcatacatatgtagaaatacatataatatacatatatatgcccttaagtagttataggccacatgcatacattaacaaaatatgagtttgcacctaagtaaatatacacatatattaccaaaataaatacacaaaagtaaatgcatgtgtacacaaaagtaaattagtgtgttcactttgcggggaaacaaaattgagctataaacaatacttacaaagtccgcgcactgagaatagagacgtcgagggcgtcccggtgctataagtcgaagacttctttggggcggatccaaagaacatcttctccttgataataatctgagtttcgcaccatcgctcggaacatctctctacccatccctgatttatccatgtaccattgatggaaccggtcatctatgatcttattaggcgtgactagcggttcaccgagtttaaacttgtacttgaccgaagcagtttcaataggtgcgtcctctagcaactgctccatcttcagactcgtttctttcaagaactttcgtatctctatttctcccggttctatgaatggctaaacatcttgttgtggatgctgcctcagctgagggacttcctttccgcactttattgctgcagactttgctataagagccttcttcaatgttcaatcatagtcagaaactacgattggtttgcccggttccatcattttaataaagtgctcctgagcctccgggtctataggaatcttcttttccggactacgtggattcaattgtgccctaacttccactctaacggcttcatcgagctcctccggagtcttgtcgtacgaccttttcttgagagctgggagccttggctcgtcagatttggccttcttcataggccttgacggcgcaggttcatattggcgggaccttgacttggcagccggtgcaggctgaggagtcggtgcagacttggcagctggtgcaggctgaggagtcgtttgccatggaccagacggtgcagacttggcagcaggtgcaggcggaggaggtggtggaggcggaggagccggtgcaggcgaaggagccagaggagccgatgcaggcaaaggagccggaggagatggaggaggcggaggagacggcgcttgcggcggggatggaggtgtggacaccccatcttgcccgggaaacatgatgtacctcttcagccagagtaaaatggcatgggctgtgtctccaagtctcgtctccccgtctcctccggggatgtccagctcgagatcctcgtaggttcgttccaccagctctatctcgaccctcgcgtatccaggtggaatgggcttgcaatggtatgtacccaaagggtccgtggatattgatcgggagaggcatcgaatttgcaatagcctgcaaagaagacgacggcaattttctcctcgagctaacataggcaccaaatcaccaatgcagcatgcttgttaggtttgaggggcatagctagggtgatcgatacaaccgtggctgctttccgttttgtattcctacgtactatcacagcattgagagctatgcagctaagcttcacattaggccaaggaaacgagacaatgatcttcatttcttcaccttgaccagcaatatatatagtttaaatccatgcttccagatcagagagagaaagagagagaaatccaactgtcaatcgtcaccaacgttttgttttggtgccaaatcatagtaaaaagaacaaagccggtcagtgaactgctagagcccctactcaccgggtcagtggtccgaccaccggtttgtctggtccgacagataaaccggtagagttatttactatatgcatattttcctaagacaaggtcagttagctagcggtatggttgcgggtttacggcgctctgctaagagcattacaaacagttcccttattctattctctatctttaaatttaggaaattttgagcaaaaatcgtattcaacagattccctaacctatctcctaataatccaggttcccaaattcggatatctcgttacccactttcagggagcgattttttcttcccaatcacggtcttcactctcttgcacacgcacgatgaaaaaggttcccgcgctccttttctcgcctccctcaccccgcagcgaacgttactcttcctcgcaggcatcggcggcagcgaagcagcaaccatgcaaccccttccttgcaagcatcgtcgtcggatttccaggtggcaatgcagcggccgtccctttcctctcagtcgcaggggtaagttgaaatgggagtgtcaattgcaagaaagttactatgttcccttctgaaaattgtggatcgcacacagggatccatgataatcgcaatgtgtatatgcatgggagaggatagtgtagtacaaaatatcggtgaaacaaaaattatttttgacttggtgttaataatcattttgtgagactagagcacgctagctaagccaatgcaaggcactttaggtattttattggatactttcttgggtttttaggtgcaacacagaatcaattgatgcaccctacttggatcattagcacatttgtagtgtcacgccccgaactagccccgaacggaactaacctgtgacgctccaaattaacctgttaatcgataccagtcccaggaaacagtgctggtatcacaggaagacagaatatcacagcaacagtggtctctttattacagagtaggagtacagtcatgttgggctgcggacagatcccgagctcacaactgcattacaaaagggaaagcggaagccaagacttggaccaatcatcacaggcgcgacttgggaactaggccgaaaccctaaaacttatcgtaactgacttgctcctggaagaactcctcgtcagcgggatccacattatcttcttcagcaactggggggggttatttatacagagcaagggtgagtacaggagtactcagcaagccatgggaatttaagtgtttaatgcaggcttcaaggaaaggttgttgtttttgcaattgattttatttaaactcatttttgaaacaactaagtgagtgcttcttaaacgatacggatgagacagtgcgtcacgcccggtcggagtatgtgcaatgtatcagtctttgaattgattcaaggttggcacccggccaacaactttcaaacggccacccgggcctggctgatcccatcagccgccgattttccaaacatcgaacccattccacagcagcaatttcacaaagcagtagtcaaacaaaactacgctaggaatcacctcacatccgcccatgaccatgggcacggctgttcaaacagtttaataacctctacagagggggtacactttacacacacaacgttactagccttggtcacctcgcccgtgtggatcagacatgtctggtgacttggggctttcacgacaaggcatttcgaaagccgacacaggttcaccatatgccaacgagaggggtcccagaccgacatcaggttaggtcccagaccatactgtgccaggaagcccgggggttctccccgacaccaccccgttgaatccacatgtctcttggcatcatcgttcccccgactagctaattactcagccaggtgtgtcccattccacccatgtggtcgcacttgccttatgttcggatgaaattccaaggaaacggtccttaagtgcaagaacgggaaaatgtactcccagtacgtctcccggtctgcgattttagaaattcattttagttcgcaagcaccgacccaggtgtcgggttttccaagtcttttgtaaaacctaagttttacccatcgttggatattttaaattttgagggggggttccgatgcgcgtacccaaaggcccgtgcatcgaagcacaacagttgacaaaggaggtttaagtgttcaataattcaaggagggtaattgcagcaattaggattgggggccggcaagatatctcgcaagccgcggccgaattacttgtgtaaatcctattcatgcaatatttgcggaaaaaaatacttag

SEQ ID NO: 5616 - DNA, 13496 bp, Oryza sativa
ttgttgaataacctgcacttgctttgtttttgatcctttgttagccatgctagttatttttatgctcactcctagcttgctgatctagtgagtttttcctgtctttgcttgatacttatctgaggtacatagataatcattttatcaacatagcaactatttttctttctgccattaacgtgtgatgtgcatgacagtttgtattatcccttgtatttgcaataatagagagttatattagatatcatacattctggagactttttctatttttataccacttgttgctagttgttgcatgagctaacaatcttttcaaccctttcagagccttgatgagatcccagacaagtccctcaagagcaaagatggttcaagagtctgcaaagattttgttagtttggtaaaagagtggcttcaaaagattcaggtatagctgtaaaacctcgtggcattgcttttacttgctacagtacccttatgttactattttgttggtttcagttagcagattcgttatgtggtgtatttggtgagacaaatcaaagtgagctggcagcatttgcatcctatgcattggcttttccgaccaattttctagctcttgtggacacatatgatgtaagttgttgcgatgttctttaatcattttattgttgagatgcatatatgagtgagtagttctgacccttttttctttttgaaacagaaagtaggtatggaacttcacatatcatactttgtcaataaacaacttgacaaaaatctcatatttgtcctttggagtcttccttttttatgctagcatttctcagtggcttcttttacaaaaaatcatttttctttgaacgttttgcaacctggattttacaaacagagatgcaaccagttttaagtgtgcaagtatttagacttgatgatgatgttcaactatggtgatttcgatgtcataattaatctggcactcctccaggatgcataaactctgaacaatcagtgtgtacatctgtagcctttgtttcatatcatttgatagtctgctgtgcgtagtgacatgcccttaccggtaccctgtaagtctgtaactctttagtggtgtgcagattttcaatgcatttatgccgcacatgtacgttctatgttctctagctttaactcaccaagttttccctttcaggttatgcgaagtggaattccaaacttctgtgcagtagcgctagcactccatgacttagggtaggtcaaatcaaacgtatccttggctactgtacatttgcattttgattgaagctcgattgaattggagcttatcttctcatggagatcttacatgacagtgtcttacagaaaatataaatgaagctaaagattaaggcaaagttcacccaatacaatccaatttaagatggtacaagtttatatcaaatttgtgttttccaaatctgaatcattctgatctatacttgcaaaataatctgtaatatcttagtaatctagacaccatcatactttgggcatataagatgccagttggttgcaaatttgtagtttttaacatgtgttcttattgtaacattagaaaacatataatgcatcatgtgcttattgttttctcattaaatatttgaatcatcaagttttataaagatgtcttattttgtagatcactgtctaataaaaaagaaaaatcttattttgtaggtacaaggcatctggtattagattagattctggtgatctggcctatttgtctattgaggcccgtaaagtgttccgtacactagaaaaggagtttaatgtgcccgcttttgggaagatgataattactgctagcaatgacctgaatgaggaaacaattgatgccctgaacaagcaggtaataaaattgccaagaacttcattgtggcatttatgttatctggcgcatttgtgtgtgctcctgtggactacagggcttgtttttatttccaatccttctaatatgatttaaatttctatttatttcagggccatgaagttgattcctttggtattggaacttatctagtaacatgttattcccaggctgctcttggctgtgtctttaagctagttgagataaacagtagacctcgtatcaaactttctgaggatgtggctaaagtgggtctattttttcttttcatgttgacaaagaatttcatttctttttgtttacttatagtgtcatgatgggttccaggtatccattccatgcaaaaagcgatgtttcagattgtatggaaaagaaggctaccccttagtagatatcatgatgcgtgaaagtgaaccatcaccgaaggtaactatgaatattgtccaaattatccctatttgttaccatgcaatgctgctgtcacttatatcctttgctgacccttttttatctacactaattattctcgattattaaactgatcttgtttacacctaacatttcaggctggagaacgaatcctttgtcgtcatccattccttgaatccaagagagcatatgttgtcccccagcatgttgaggagctcctacaatgctactggcctggtacatcaagtatgtatcgtggatctttctaaaaaatgataagttcttcagttgacatggctaattttgaattgtaaaggaactaatcagagttggtattctatcctactgcttattgtgcaacaattacatttgcatatgtgtccctttcagataaacctagggtagagttaccctctctagaggagatcagagggcgctgcatgcaacagcttgaaaaacttcgaccagatcacatcaggcggttaaatccaacaccttacaaggtttgtcttcgtttcaatctttctttccctttttgcttccttcagttcccttttttttttacaagatctttacttcgagcaggtgagtgtgagtgcaaagctgtatgagtttatccattccctatggttgaatgaggccccagtaggagagttacaatagatttctacagaagttgggaaaaacagagaagcgtattctttgaagcatagcaaaatagcaatacatcaaagaaaagtagagctctgttgtaaaaaaataaaaaaaatcgtcagttcatgggcccaaccttataggatttttgctccccaatttttattagtacaaactagttatcagtatagagataggccaacctatctgactgtacatccatgatccattgtactatacgtcgttatggaattgaacatcctttttggagatttgagtccatgagatgatgagaacaaataatcgctgtaaaaggttgagatcatgcccccctttgtccttccagaaacatttgcaggtgattgattcagaaactaaggcagccaagcattggtataatatccgtactccatgtaagattcatagttttttttttttcgttttgatttataagattcagagttgaaacttgagcagaacaaaaatgtagttgcaccctgtgtcggctgttgggctgggttcctcgttgtgttcatggtacaaggaaaattgaagatccctgaataataaggtcaacagcacaagctgagaaaaggtgggtgatgtacttcccaactaccattgcattaacagagctgaacataggagtactggtcaggtatttaagtggagacaagttggcaaccatggtcatttgaccattccctcatttgccattattgccatcatagaaagaacaaaaaaagggaaaaatatctcctcatttgccaataataagtggaggcaagtaggtcgtctatttcatttcacccatatttagggccccctttgaatgcaaaaatagtggaatatgaaaaatgcaagattttaataggaatataagtacaaaacagaggattgcaaaatacagaaaaagcaaaggaaggaataggatgagagagatagattcaaaagaaaatttcttagaggtttgaagctcttgctaaattttctctagaatctctatagaattgtctatttcaatggaattttaaagaataacataggattaaatcctttgttttaaaggccttcataggaaatttttctataaaattgaaatcctccaaaattcttatgtttttcctccaaatcaaataagcccttaatgggtattgtgtaactgggaaatcaatggattttgcaagcgtacgggacctaattataaaaaataaaggttaaaaacatactcctcagcaacaaataccaagttgtacctcgctaagggctttcataatttaaatggttttaaaatgccatataacctacgggcactcattaaaaaaacaattctcccataatgcaagtggtatctttgatcggcctcatcttttcgtttatacttatacttatcagccaaaaaataaattttaaattggaagttagttttggagttttttcatcggagtttattttttaacttttgcttttagatcgttaagaacatatatataaaagttttattcacaagttatttttagtttgtaataggacatttcgcttattccccgaataccccgaataagtggaatgatgggaccggatatttcatatcagcctctagcataaaaataattctaccactcgccacgtcacagtgttgttcatcccctgaggccacgattgagaagccaaaaccgccacctaagccaggaactgtgcaagcaaccccctccacagtgcatgtgaccttccatctattatagtgggtcccaccactcttcattcctcttctctctccacctttccccaccgtcggacgaagcgagaggagaccaagatgtgccagcggggaatggagcagcgatgcgccggcggggaacgagcggcggcggcgcgacaccacgtgaggtcggcggcgggaggaggcggagcagcggcgtgacctcggtgccgccacgcggtgcctggaggtggcgctggccccgctgcccgccgcgtcgctcctcccgctcaccgaggcccgggtgcggctgcgtctcgcggccctgctgctgcgttcccgctccaagggcttgccaccaccaagtcccacctcgagcgtgccttgctgctcccctcctcccagagctctggcgtggatatccggcgggcggagcgatggatccagcgacgacggagcagcttcagggcggccagatccagccgagcggcgatggagcggggcggagcagcggtgagggcgccgggcgaagcagcggtgagggcactgagcggagcagctgcgggcgatggcggctcgccggatctccttctctcttcagctcgcctgcgccaaatccctctcccctctcctcgtcggcgcctgctgttctgggcaacgacaactagcagcggggttgcggttgtgcggatgcctgacgaatcctggctattccctgacgaagaacgtgtgtcccattttggctccccgttcctcgcttggtcacggtagcgtctgacatggaggggaatcttggctgaggctgggtgaggctgaataccacctatgcgcactgtgaacgccctgagtcaccggcagcaggagcctccaacccaatgttggctttcctttttgtttgtgatgaagtagtagtatatggatgtactgtcaaccttgtactaatattttcgctgcagcttttgttaaagcaaaagccaagattttcccattatcgaaaaataaagcagcctccaaaccctgtacgggcaacggactgatgaatgtacgaacttctacagcgcagatatggactgtttcttctccctaggaacccacattgtcatcagtacatcgtttctgttttcaagggcatgtctactgcattagcattactactaaattaatagtggtactaccaaattcagcagctttttgtaggtaatgttggtatgattagtttaactgcttagaatatttatgattagccgttgaattgcgttcatgtactgtctacttccggggtttgtttgatataggtggatattagcttcgaactttatgaatgaatggacatggaagttgaattgatccacaacaacctgaatggattgaattaaaatccacaacaacatgaatggattgagctgaattgggttactcccatccacaagatcatgtcatgtttgcaatgattacaggttttatgtggtactcctatgattacaggttttatggagtagtatgcagtatcaatgttaaggtcctactcctatgtgaggtctgtaagttcaatagtactactactttgtgaagttgcttttcaacaaaatttctacaaaagaaaaaaaaatccataagcctacaaaagtgattagtgacaggagtaccattgtggcaaggagaaatgtgctagtacaagcctacaaatatgcaattaatttgcaacttctcttcaaggctataatggagggaaagcgtccacctaaaccgtatgcagataacaatacgtccttgcatcctgttggtacaatacacacaagttttgtgtagaggctgttggttactcatcatgcaccagcacacgtacacacacacacgtgagtcggtgagtactaaaataagattgaacacaagcttcagcttcaccattatccatagccgaaatttaaattttagaatttaatttaaagttaatttaatatttttattctagtttaattttcagcattggcttttaaatcagtagtaatacatatttaaatgttcacgtatggatttttttttgctaataagcctcagggtttataataagcaatttagcaccagctacactaatggtcaaaagaaagaaaaaagtaacttctagccgcacaagaatttagtcctattcaaagaataccacaaaaattttagagtaacaatgaatgccaaaactaatcatcaagtatatcaaaaatgttttcccgaataaaaaccctccatagtagtaaaaacattacaggatagctttatcgtgtaggtgttcacaataatattatgtctgaaatgaatcaaactttttccttgccctgtgctgattactgagaatatggatctaaccacaatgctcttcctccatagttcatggtggctactggctacccttggttaggttaatttcaaaacgaatcaaggtcgttccatagcctctggtctaaattattggatcccactgcatcaaaatcataactttgataaaacctatactttaaaatatattttctgtcttcatatataatatatttctaaaaagaaaccctttaattacaatgaaagacacaacacagtaggtgtgtgtagtgtgaaaaatatttccatggaagagaaaccctaatataatatgttctatttgttgtacagacatcaatacttaagtctaagggctcctttaatttggccaaaaatcatagaaattttgaagaactttaataagagctctatccttttggaaacttttttttaagtctatctatctcatcaaattcttatgtttttttctatgttccaatcaaacagtcatttctatttttttctatatttatatttttctatttctttgtttttttcattcctataattcaaagagcacttaaatgaaactctttccttgtcccatcccaattactaaaaatttccctagatgtagccacaaatccacaatgctcttcccatattgacacagctatgataggctcaaaataaatctaaggtttcatggatctggcggcaccgtgctgtccgctagctcacccaccgcagctcaagaagacctgcattcctcctcccccaaatcacccccatcaaaaatatcctaccagtattctgtattcccccatgcctcccttctcttctgacttgatttgtttattactgacgataatcttgacttctctgcctccaaatccgattctccacacatgcaaaaagaattaagaattgcatattgcatattgcagccttgcacttgcagttgcaaggcagctgctgctactacaccctgtcactcactcacacactctcatccctgcacacacacacacacacacacacacacacacagtggcagtacacactacagtacatgctgcagccagcagctacctatacactcactatcacttttgcaagagtgtactactccatctaataattgcatccttctcctctacatttctgattgatttcttttctccccctttgatttgttgtttgttgcttcttgtgctcctccctccaaagatcaccaccaccaccaccaccaccaaccacccacaccaccttcctttctctcctccctctaatcttctccccctctccccaccaagaaaaatccaggctttgtattagggaccagattaagcagagaaccaccaccttttgcctttttgcagtttgctgttttcacctcctcaaagagaagaagaagacactccaaattcttcaccccccacacaacacacattgtttcttcccaaaaatccaatcttttggttttgggcccaatttgtcctcctcttaaatcccacttttccatcactccattctgtcataaatcctctcctcttcccctctcaaagttccagcttttcccactaagaaaatccaatcttggccactccatttattcgctgagcaaatttccagccttttttgcgcccaattccattgggagatggagaagtagattttagcgcaaaaaaaatcaggtttttttggcacccgattttggttgggagagctcgccggagatccgccatttgaggtaaggcgaggagctctctctcccatgtcggactcggagctgtcgcagagcacggtggtgttcgggctccacctgtgggagctcgtcggcatcggcgtcggcgcggcgttcgtgctcctcctcgtcctcctctcgctgctctgcctcgtcgcctcacgccgccgccgccggcggcgaggggtcgccgtggcgacccccgtgctccacctcgccaccgccgtcgcgccgcccaagcaccccggcaagccgcccaaggacatccaggaggtgccctcccgcgccgccgccgccgccgcggcgcccaaggcgcagccggcgcaggtaatccaggcgccgccgccgcagccgccgccgtcggaatccatccagatcgagacgggcaaggagcaccgcatcacgttccgggagcagcagcatcagccgccgcagccgccgccctaccaccagcggagcgggggcccctcgtcgcgcggcggcagcggggagagccgcggcggcggcggtggcggcggcggcggcggcgcggagcccggcgtgcccgaggtgtcccacctcgggtggggccactggtacacgctcaaggagctggaggacgcgacggccatgttcgccgacgagaaggtgatcggcgagggcggctacggcatcgtgtaccacggcgtgctcgaggacggcacgcaggtcgccgtcaagaacctgctcaacaacaggtagtacctaccactcttaccacctgctgctgctgctgctgctgcttcccatgaactcaagcataatagggcaaaatgcagcagcgtgcgtgtcgaattgggtctcttttttaagaatgcgtaggttcaaggttaagcattaaggaaaggcttgcttagtttcgtgagggcattaagcattacttgaatggagatgttgacaattgtagatggtgacatttttgctgagaacttgggtagtagagacgatcatgtcgtgttccgcactgaacattttcttatggttcacatgctctgtgtggaagctgtcgattttagaggccgaaatatatgtcgcgtgtgacgtgtgttggttcgttctagtgctctctctctgttgccaaatttagtaaaattttgatgcttgctttgttagggggcaggcagagagggagttcaaggttgaggtggaagcgattgggcgggtgcggcacaagaacctggttcggctgctgggatactgcgccgagggtaaccaaaggtaccttgaaatcaatggattctatgactgagtagcttgcaatgtataatattttctgtacgaatccttttcaggatgcttgtgtacgagtatgtcaataatggaaacttagagcaatggctccatggtgatgttggtcccgtaagccctctcacatgggatatgagaatgaagattatactaggaacagcaaaagggtatgcatctttcagttcattaccgtagactatagacatattggtaacattatttacattgtgcagcttaatgtatctgcatgagggacttgagccaaaggtggttcatcgtgatgtcaagtcgagcaacatcctccttgacaagacctggaatgctaagctttctgattttgggctagcaaagcttttgggctcagagaggagttatgtaacaaccagagttatggggacatttgggttagaaattagcacccttgtaatgtgataattgtacaagacacatgaatattttgcttatgcatcttttgttctttgcaggtacgtagctccagagtatgctggtactggcatgttaaatgaaactagtgatgtctatagttttggaattcttatcatggaaataatatctggtcgggtaccagtggattacaacagaccaccaggggaggttagttattgtttgccttgttataaggattctaaattaagatcttgtcgaatgcatctatgaaatcagcacattaatcctttcaggttaatcttgttgaatggctgaagacaatggtgagcaaccgaaactctgaaggggttttggatccaaagatgactgagaagcctacttctagggcactgaagaaggctttgttagtagctctgcgatgtgtagacccagaagcccgtaagaggccaaagattgggcatgtcattcacatgcttgaagttgatgattttccctacagagatgtaagttaacgtggcatgtggctccttttgtcttatgttcagtacccatcattttatatagtgaaaattgtgagcatcatttgcaatgcttgtgtggcccctaattcctctcgcacagttatttccaaggaaaaaatgacatcgtagtgaccatgttgagttctgtacacactatttagttttagattattataccaacccatttttgtttttcacatatttttgaatgtcaccttttggttcattgctgtattggtgactgtttttcttggacaacggaaaacatggttccaaaatcttcattccccaattttgaaatgccccatcattctccctgtaaattatgcatatgaatgacgtgttccaagtcagtctttaagaaatgaccaaaaaatatttattataatgtgcttaaattccatttttaatcttttctgaaaaacaaaaggcaggagctttgcctatatattagtagagcagggaaaaattccactttttagttgttgttatcgcactgaaatcgtgtacattataaacatatattgttgtcactccttttgccaggaacgtcgcggtggcaaagctccaggtcaagtgaaatcgggagaaataccgccagttgaagctggtgatagcagcgggaacaatacgccaaaagaaacaccaaaaggtcaaccgaaagatgaacctttcaagtggagaaatcaagcggcggcctagctattagcaagatggtgattcttctgaattcagtaagacgacgatttttctgaattcttacacctgatcaagaaaccgaatgccgcaaacttgcaaacagctcatttgctgctcgttagttgggttggggcacggaaacatggaacgcgccgagatcgtgagagcatctgtacattattgggttagtatgttagccatagcgattttttggttggtttatttggttatatttatgtactaagtgataattcttgtatgacaaattcatgttactcttgaggtaaaagttgatgagcggtgcttagataaaaccttccatgtagcaatatatcccccaaatgccagtttgctcatcagtcatcatacaatgctcagtttcttatacttttgagatccatacttgtcacctaaattgtgatgattcaatataccagactgaatcctcaggtgtgtgcccacatttctttttcctgtatgtaacaaaatgaaatgagcagcactacagtagtctgaattttgctgtttcatcaacctggagaagaaaaggaaaggcttggttgtcacatgatggagcctcaatgacctacctctggacactgatagcacacacaatcactcattatttagcaaagcttgataagccagcaagcttaattaagtagccactgattgattgccccccctgctactcagatcttctccagagactccagagtggcatccagctccaggcaagctcaccagcagcaagcaagaacccagacagacatgcagtgcctactactcctagtactccctcgtcccaaaataaatatagttttgtattgtttatatcaaacatttgaccgttcatcttatttgattttttttatgattagtaatttttattagatgataaaatataaataattctttatgtgtgactaattattttaaattattttataatttttttaaataaaacgaacagttaaacattggacacggatatgtacagctacacttattttgtaacggaggtagtagtactacctgactggaaatgcaggtgacagtcggttaacagatggcatccgggggcaagtagtattagcgtgaggtaatccggattagtagcagatgtgatgtgacacgaggcgacagcgaccaacaaacggaccaggctaggctacgttggatggtttttgcggatgatgaaaaggatctggatggacggtaggctggtggtggatagtggtagcagtagcagttgtaagctgggggccctagtgaaagctcagcttcgcctacgcctccggtggcggtggccgtaccgtccgtgatgccttctttccctcgtgtggccgccggccggcgccgacggcgagggggagttgctttccgggcatctgttgctgcatcattcctctttgtcgtgttcctctctagctcgagactgaggctgagttcgtttcagctttttgaaacactacttccttgttctctaacgaacatacttcctaaactactaaatgatattttttaaataaataaatataaattttaaatttatatactcgggtaattaattttatatttttaaaaggaagaattattttagtgtcgggtacttgggttgtactgacacttcaatgctgcagcttgtaaaagtctgaataacagagcggttttccatggtctgtgaataatgaatgaatagtatttgcttttaaaacccagttgttcctcaaaccatcattgaaatgtccgtggtttttttttcaacaaaaaatatatttcttccaaatatgaagctactagctatccagtttagagcttgtcggtaagtgggatttaagcaaagccacccattttagtttggtttta

SEQ ID NO: 5617 - DNA, 7350 bp, Oryza sativa
tgtaatgcaatactgcagtcaactatagcaaatcttgtgcagagtgtctgctttgccttatgcacaatagggtgactgaatttctaatagtacacaactcagaatatcttgattcgctaactgttaaaactgctctggttcaagtagttgttctcttgtagtcattctttgaattatgggagctctctgttcatgcaatgccattacattgtacaaaaggatgtaatgtcattttttttcatctatccaaatgtacagggcacagagacagaatcaaatgaagactatgggatgttattcaggttatcacaggagggaggcatcacctatacaaaattaatccagcaagtctctgtctcacctaatgcaattcttcctggtgctcaggtggcagtgactagaaataaaacacatattaaatgaaaatgtttaaactaaaactttatgtgcacagtcataacccccaatgtatttttttttgcaaaacagggtggtcttcccttgctccaaaacacagagattctaggtggtggaccaattgggatatttctaattccaaaatctttgaaatcaagataattaatctaaggaaacaacacaaaagaaaaagaataagtcaatctttagaaatattatgggtttaaaaaatgacttaagtaataaagaagagatgcatacagcaagtaagtgtccgcagccaccaagggtttttgatgtttgttcctttgatttactctccttttggaacttggctatgtatgtcataagccattcataaacaaactttgaccagttccactttgagctggacttgatattaatcagaggttcaaggtattttgggctggggtgagtgtctgagttggggcaaagaaaggttgatagtgcaaccaccatgaaacaacgtaggacatcatcttctgatagtttgttcacacccttgtcgctaagcaaccttgtcattcttgatctctaaacctccatttgggataccaagtatgaagttggtggtgtttgggttgattggtatggatctcccattgacaactatatctgagcagctgacatcagtgtgactagctatccatttgacaaaagatagtggtatagcacacctttgaaagtttagaagagaaccaaaagcagaattctcaataattaacctttgctcgttgctgagcccttcaatcaaattggaaaagtatgtgatgtttagtctgcttcttggttttggggactctgcacttctagatttattcatgttttgtgtgctggaagaaaaaaaatagagatgtaattatgtcttgttaacaaagaacaacataaactaattaacatactagatgtggaaaaaaatgtttaggaaaaaaaagacagaaagtgataccttttgtttttgtctccttactggtttgtctgtcctagctcttttccttttgatcgatcctgaaaactaacagaggcaaaacaagtatgaagttattgatagctgtctgtggtagtagaaaatgatattttggaaaaaaaggaagaaacatatataccagatcttttaatgtgctgacgagatctttttttgttatgtatttgtcagaatcactggtttcttcctcttctgaaatagagttggcataatcagaatctgccactttgttgtccgacttgctatttgatgaacattcatcatctgatgatgtcctgtcacttgccatgctggaaaaaagaactagagaagtaagcacattaaaaggaaaaaagagagatcttgtaaccaatcaaaccaaaaaaaaactctcaatgtcctgataggctgctaagacacatgttaaactatgccaaaaaaaaaagaagtagtgccaaattcaaacaataccatttgcatcttgttgctttttgaaaattcgtgcaaaggttgaaatcatgtgcaaaactgcatatgcaggtataacattattaattcacaaaatttaatgtgttgcacagaaaatttgattactatctcatataagtaaatgtcaactacaacatcttggtattgcgaaaaaatgtgttaactactagcatgattatagttgcacaaaatcataattaaagttgcacgaattaataaccaaagttgcacaaacattaaaaaatggcgactgtaggaataggaaggtgcaatttttgcatataaaagtaacaaactggatagatatggcattatattattcgaccgcccacatttccaagctcaccagcaaaatcaaaaacttagcagaaggaaatgtactcttcttggcctgcagcaagctcctccccctgtagatccaacgctccctgaaaacaaaattgtagtgagctattacatctgagcatacaatcaatctgaagttgtgcttgtttataaccaaaattaggaaaaaaatcataaagtagtcagctaaaaaagaattagttgcatgatttattaattgaaattgcatatatttataacataacttgcgcgaaatgtatagtattagttgattttgctatttggactatgctgctggggtgtagatggttgaagcggaaaaacacagtaaatgaaaaaaagagacacacttgatgtcgtgtgttcatgagaaaaaaaagatacaacatgaaagtagtatgggttgcaaaaagaaaaaacacatgaaaagttggacaaaaaatctttataaaccaaacttgtagagacttaacctagaagttgcccatgtttgaaaaaaaaggcaattactaagctatataaaaacatattaatggttgcgcatatttagaaaagtgtcaactacaacatcttgggtgtgcaaattgtaaaaaaagaaatcagtactgccaaagggatttacgaaaaatgaagaaaaaggtaactaataacaagggaactaacttccagccacaagctccaccatcccactgtcaaaccactgccaatccttctatatccaatccatccttagactactccccaagttacagccaaaaaattgcaaagagagtcactgttgattatactactactgtattagcatccgcagtttgctcaagtttttcaccagatcaggtttttcaccagaaaaacctgagctcgccaaacatccaaaagaaccgccgatttgttgtggcgttgatcccgagtcccgcaaaacaccaaatgaatccccttcccatcataataaaaagaaaaagaaaaggcaatgaaattactaagaaaacaagttgtctaccaaaagtcctcacttgtatgcatgttttcccaaacaacaaacgctatttatcaaagtaaacggaaatttggttaaaaaaacattagttgcacaaaattattacacgacttgcacgaaaattcaaaatggctactacaatagtcagggagcgcaactagcgtagatacataattttcagaaaaagaaataatgaaaatttagggccatgtgctgatcgaaagcataggttttagtttgaggccatatttaaagcagtaaataagtgaatcacttatacaacataactgtacgtagcatatgaagagatatgctttatactgtccatttatacagtactatcgtaaattatattgtccatttattctctatattttagtttcagattaatcttactgtttccattaatctcaccctcgtttgcgtttgccactgtcatttgctgagttgctaatgacacagaccgatgcttttgcgaattgcgattactctcctctctcagtgatctactaagattaaacataattgataggagcagagcctggagttcattttcagggaggcttatctcagattgatcactgatggaatggaagcaaaagtggcttagtatgtcacagttgagcaggagtatgtcacagttgagcaggactaccgttaaaaaaaatacacagcacagaaaacaaaagatagcttttttctacaagcagaaaacacaactcctccctgtatatagtgacactgaaatccaaaaaaattgtggtatccctgtatacagtaacctctgattaactccctgtataatctgacaatactgagggacaaatgtaagagcatttgctgggatttaatgaaatattggttagttcttgagctcgaattgctaccaaatccctaaacccctttctaaaatgccacggcacagaggtcatcactggcctacaggattaacgactaaatctagagtaaaaccatgtgtgtgcattccatgatatatcagatccaagtagtgaaactgcaaaattccctaacaaatgaagttagagagaaaataattagtgccaaggtttagaaccaggcagcggcatagcccacctcccgccgactatatcatacacgatgtgcagtaaaaccctaaaaaaatttcccaaactacatcgaacaaaacatcaaagcacacacaccatgtggtttcaaatccaggatgctttactcgacattgggcaaaatcaactcaaaactcaagcaatgaaacaaactccacgggattccccctccccttgaaatggtagccaatccagccctaatagctcacaattcacaggatagaaatctggaccaaaggaaatcaggccgccacggcgtgaggatttgaacaaaaaagagagatgaaaaacctgcagtgcatcaactcctctccccccgcctctcttctccggcgccgtccgcggccgctcgcggtgcacagcccacctatcgccgcccccctccccttcccctccactgcctgccttagaagaatctccggcgccttccgctcgcaggactccgcctgctgctagagaaacagaaacgtcgagaagcagaagcgctctctagagagtcacaggtgtggtggatttttccagagctatttgtgggctgtgggctgtgggctgcgggctctgggcttattagcgaggaaaaggtgatggaaaagcacgacccatataaaaaaaagagcctttccactagcccgaagtgcgcacaaaagttgactgatcgattaaaattttgcaggcgactgcaaaatagcaaatgcgatatatatatatgcactgcctgcaacatgctacactcatctcctgcaattttccgtatagtttgctacgaagaacactcgccttaaggacgcctagctagcagtctcgttgctgtaagcctagttcattgatctctcagtgctaaccaagctttgttcaaacgattgttcgtgtaatcgtctacggcgacgattctgaaacgtatgtaatgccatgactgggtccttaattttaactgtacctaactgtacaatgggccaaatgccccatataaatccttgcgtcaaatcttaaatagctgaaactaattaataaattagtgtggccacagtagttttcaaatacactttattgcaagtttgcaaccaacatacagcaggggcagacacagagttgctagcaaagaccatatatataagaaagcagccatggacagacatacacatgggcggctgtttctgagttgggaagcgtctcagctttgttataagtaggcagtcctacaggcagcttgacatgttcgctaatacacatgcttggttacactcgcaacccagtattcaagttaggaacgagaggcgtcgggatattgggagtctcattttctcgtcaactaggcacgggactcgttggttctcctgcttcaagtaatctgtaggggagcttcatatcccggtattctgtggcttttattgccgttcacgaggctgggccaaggatgcatcaagtttcggagatgactatctctggactaacttgatcagaacagcattggatcaagcacattgcagtgcgctggtagagcggtgcttgcgcatcagtttctgtaggctctgtcagagaccaacaaggatgttgagacagattgtaaacacatgtgagtaataaacgttgagataagcccttccttgatctttctggtgtccatttttgtccacactcacggtatcgttgcacaaaaaaaataatgttgcaagtcggcaaaaacagagttggcagagtgacgagcagagtgtgaattgtgtggtattgagtttcccactgggaaaattttgataatttgacacttttttcgttgcccaattgctttaattgacatttgtgtggatgtcattcgtgtatgactatgtcaaataataaaaataatttaaaagagtgttaaattatcaaatctctcccccactggagacactgctgctgagttacggtaaggcaagatccacatgtgtgtatatttcagcagtaagtaatcaaagggtattggccatagccaatcatcagatcttaattttgttacaagctaagagctgtgaacaggggacatcgccccgtagatcttcgatgtccatgtggtgttaagtcggtagttctggtcggctgtttaattagcgtattaattacaatggctttatgtcgtatgtagataggttagctctttaatttgtaagatcaatactgagacatactcatacacgagaacataatagcagtttattaaaatcaattttacagtacttgtggagttatcatgagacaccattttttctattacaaatttggtacctaggtactatgaggtatcaatttttacactaaattttggtatctcatgatatctcaaggattgtaaaatttctctatttcaaaagggtgagtgttttatgttctgtctaatttcgtgttaaaaatagcccaaattaggggggccttttcttttctggtttatattagttgtatctatttttgggagcaaaaccacttgaatatctaccactggtggagaaatccatctttcgtcggtcggccgaattccacaatagtcccggatgcaataaaaaccggggctaaaaataatctttagtctcggttaaaaagggtaacgggcatatttgatctttagtcccggttggtaacaccaaccgggactaaagaatgctgtcggggcctgtcaggtccccccgggatcaaccaaccgggactaaagatcgtaactttagtaccggttggtagactaaagatcccggggatctttagccccggttggtaacatcaaccgggactaaagtcccacccctatatatatgtcttcttcctcctccagctgcccgagcaaacttcaaaatttcttcaaaaaagaggggaggtcatgccaaaatttctagtgaatttattttggtgattacatataaatcggaggtgcctaaaaggtttgcaacttcatcctccaatgttttttttgtcatattacatttgtagctatgttttgcacgcttttttgtctccaaaattttgttgtaagttgatgagggagaaaa

SEQ ID NO: 5618 - DNA, 5217 bp, Oryza sativa
caccaaactacatccattgatctaaatgtcacacgataagagaaacataagggaaacaagcattatgaatagcgcaggaaccaaatctagccattgatgaatcctgaattaatgaaacataggaaggttcacttgcacatacaatatctccatttatagtagccacaggtgagagaggcaagcagtagaaattttcgaagtccaatgacagctgtgcaaaacaataacaatgagaacagaaaatcaacagaagtgataaaaagtactaagcatgctttcaacaaactgcagagagcatgtgacacacccccaccaaaatatatttaaattggtcaaatatatacagatttatcatcaatacatcttccataataccatacttataatggcatacatatatagctagataaaataattgtcaaaggtgtgtacagcaacatgcatttggtaaaagatagagaagaggacacattaatcgtcacaacatacgagattaggagcatagttaacagctacaaaaataggggcataggtatctaccacagatgaacaatttctgcaagataatatgctgccaatagtcccatcaaagggaccaaataggttttgtttccatcgcttgcattcaggctggttaccttccctttgactatatactttggaaggaaacatggtgatgtctgccagagaactcctatttggtacataacaacgggaaaattcatccctcagtgaggtcaaaagatgatgaaaggcttccgaagcatcctatgagggttaaatagttctcatcatttaaggacatataatataaaagtaaaatttaaagagaagaaatatacaggattaaacatcatgcctgctctcttgtcaaattaaagtggccgacgtagaagctcaaagcatccattactctgtgtggactcagttcagtccttttgtctcgaactacgctcaagtctacaacatttaagtaaagttcataaactagtaaaagaaattttatgagtaaccaactaaatgaagttttacaagtatagaacttgaaactgggagcatcacaagttatattctttttaagaaaaataaaacaacagttaaaaagacatgctttttctttcatattgaaggaagaaaccgtgatgtgtgaagtggagcaagaacatcaaactgtgagctgcaagcaattcattttaccaaccaatgcaatgacatgatatgatgttcagcaatttatgtaaatagattcataaatgtcaacactgcatcagagtatacctgtaaaaacgaaccgtgtttacagtattacagtatgtaacgattccaccagaccaccactgctcggtaattcctgagaccactagggtcacaggaaccaacactttattttccactcaaattatgtattgcacagataattacagacaaatcaataaaaaagaacttaaaagttgctaagtactgattccacaccaactcccttccaaaggtgcattttagaaagagtaaacggtgtaccttttataagagaacttagagcaaaaataagaggcattttttcggacttttcctcaggtagcacatcctcacttccaagcaaattatctagagaggaaacaaacccgtcacagctagcaagtgcctgtcaaacaaacattttctctagtttagcattttagctccagctgatgacagtgctatacataaagagtaccatatgacggatcattcaatagagaacgacatatacctgcaggataacattaagaaagcaattgttgccaagatttttcaggcctccagtgtaataaagtctatctgagttcgaaagtaacttcttctgagaaactggtggtatcaccaagctgctatgcagcgccttgcacaacccagcaactcctattgccaggccaactgctgctgcaagactataatggggcagcccatcactgagagataccagtagattgccatgctcggattttcccatgactcgacttatcctgcccccaatgtccgttgcatgaaacaaaatcaaataccgggacacaggacacctaaagttgtttgcaccagggacttttgctttctatccaactacctcacacttgaataaatagatatataacctgcatccaatgtaatatttcagaacaatggctaaaaaataaacagtgattcatgacctatgtagataacaattaaacggactaggatcgattctggttagcaatttacttaccatcaaaccgatggttactattacaaaacacaaagcaaggaatagtaattttacccaaaataataaaaaaaaacatcaagatcaaactgcccagctacatgtttatgaaccagtataataccataatccgacaaaccagtggcggatctaaactttttgggagccatcaaactgttactaccattaaggttaaggcaaatttctagaacagaagctagggttaacgcgaattcgagaagaagtgcgtgggaagagagagagagagatgcggcggaagcagcagcacgaacgacggcgacaccgctcgctcggggatcggcgcaggcggggcgcggtggcggaggatgtgctcaccgggatggatgcggcgggagaagcagcagggcgaacgaacggcggcgccctgctccgctcgcggcgcgggatggatggggatcgccggaggcggttgcggcggcggtgcgggtgggctaaagggcaaactgacgaggaagtttatcagtattccgatccgtatccctactctcttcctattctacggatccctacccttctacgactccgatcagtattacgaaattttactgtcgcgtttctacaatcctacaaaatattactccctccgttcctaaatatttaacaccgtttactttttttcatcgtattataattattaattatttttctatcattgattcattgttaaatatacttttatatatacatatagctctacatattttaaaaaataagatgaatgatcaagcatgtttaaaaaagtcaacggcgtcaaatatttaaggacggagagagtatttagtataagatagattaaaaatagtatgaacaaatatgcttaagtttacataaaccaattaaatttatcggaatcaatttatatgctttaatttatataacatattatctattttatatcaaattttgtattttctaaaatctggtagtatctcgatcctatgatactatccggatcctatgacattataaatcagaaaacgattctacctggtatttcgatactgattacctttatcaggatacgcacaaaatggtaacagtaattagtaatttcgtctagcacatcctattcccaccctacctgaacaatggaaacctgaaaaatggaaaataatattaattagttttaatcgcattatccaaatggcttggatagacgagtcatgctagcacgatccacagccaaacggatcgtgtagttcctagtttgtcatgacacatgcacttgtcatgttggtacaccgggccgggtagcggcccaagcatggcttggcgacgagtcatactagcacgatccacaaccaaacggatcgtgtagttcctggtttgtcaactacacatgaattttcgggcgggcaaggaaagacccagcccaattgataacctactgctacaatcaacaaacaatcgttcctctcagaaagaaaaaacaagtgatgattgatcacaaaaggagacatgctacctagacagtcccaaaaaaaataatggctgatctccaaaaaaattcttgttacagtgaacaaataatggctgaactaaaaataagttcaaatggtggcatatggaccacataggcgtaccgaaacgcagacatggagtagacttcgaaatttgtaacaccaggtatttcagggtttccatgagtaaacatactcacgttaatggtatttgcaataagaaaaatatgaccttgcataattttcttaaccaaattgtatcagggaagataatcccctaaacctcaactatgtctgacaatcaatctctagcctttttctagcttttacaagtccaatttgtaaatcggttcatggaccgttttccaagtacatcaatccattttgctctgtaggggccgcgtcttcttttgatcttagaggtgtggaagcaagattcttgataatggaagcatacagatcaaaatcagctttgtacttgcagcagctagcctcaatccacttctctgcaaggcttgtggccacgctgtcttgactatccctctcatgctcttcgatcgccggccttatctcgtcgtacaggctgtcaatttcagcagcagcttcattcttcatttcctgacatttgatttggaaaaaaggtcattgcaaagcctaagctttcctagagcaatgttcaataaaaagggagttacagtagttctttacctcgcaatacaatatttcttcacgtgccacctctgatgctaaccgatcacagatacccacaacattcagttgcttgcgcataccacgtttagcttttccaccacgaagtgtgggtctacgtttcaccgcaaccaactctgtatggttgttgtcccggggcgcactttgattctggaggtttgcaactccacgcgttgagttttgcagagcatcttcagcacattgcgcaccatattcaattgatccattctgagtaaaatcaactcccattggaatagcattcaatggttcaatagtcattggtgtcaattcatttgagctcacattcaatggttcaacattcatcggtgtgaactcatttgaactcgcaatcgatggttcaacattcatcggtgtgaattcacttgaacttgcaataataggaatcccagtattttggattgtgttgttgttgccatcctgtgtatttggctcatcttttattaagatgtcctttggaatgctggtaggttcatcatcagcagaatcataaaggggaacattctcaacagaaaacctgcaatttaagatggaaagcatatgttaaccggtgctcagatttgttgtatccgtcgatatttcggcatttcaagaaattcaggctttgtttgaaatgacaggttgacccaggcaacacaaatctgcatatttttaaccaactaggatcttcttctatgatgataatgcaagacatgccagtaatatggatctgagagataataaagcaag

SEQ ID NO: 5619 - DNA, 6929 bp, Oryza sativa
ttatagctggctaatagcctgctattcgctcttagagtaagcccgtgccttttggctgcccacctggaccaatcggaaacagaaagggcaaaaaaaaactccccgaaaaaggtcggagtagttgtagctttcggtcttttgttcactttctctctcgttttcctttgacacaatttttaaactactgatggccctttgatttagagaagaaaaacatagaaattttgaaggattttaattctataaaaaattttcctatgaaaacctttaaaacaaaggattgaattctatgttatcatttaaaattcatataaaatggataatcctatagagattttggagaaaatttagcaagaactctaacctcttgaaaatttttcttcgagtctatctctctcatccgattcctatgtttttcatgagcttcaatcaaacggtcattcctatatttttcctatattttgcaattgcatttctattagaatcttgtggtttttctattcctctatgtttgtattcctacgattcaaatgggcgctaaacgatgtgtgttttaaaaaattaacgaaaaatacttttaaaaatcatattaattcatttatttttttagtaaatatttaattaattatgcgctaatgaacaatatcgttttccacgaaggaggtggagttcacctcccgaacacaaccttcgtcaggaagggagcggtgcagaaacggaaaccatgagaagaagcaggaggaaatttgttcctcgttcgatcctgacgaaatttgcccggaatccatttgaatccatgaggttttcaagtttcgggcgacagttttctgaaacttcgttgtctgaagcagtatttttgtagggctggcgattggtgcagggaaatagtagtggcaagggaaattttgccaggtttgtctagttctgaagtagtttgggacttgggatcaaggtgctataaattgcgagagctactggatgaaagtgacgatacatcgaacggtggcccagtgctgaaaaagggcgaaagcaaccagtagaagataggcaagggaatgaaacagccgatgtgtataatccccaagtggtccttgggtttgtgctgttgttcaatccaagtccttgaccacctagctttaacatgatttaaattcattggtgcaacttaaatataagctaggtggtgtccgtgttttgctgcgaaaattacaaagcaatcttcagaatgtttttttttccaacaatcaagctaggagtccaaacgatattagttattaacaataaattaaactggtttaccaagctatgtttggagagaaataaatttagtagattatataggagattgtagatgaaatgttatattgttggctaaaattcgcattgcaagaagcagaagatagaaaaaaattaatgaaacatcagggtttatcaataatgatcataaaacaaacaaatgatactcacactttgatacaaaatatattgacatgtatatgttttaagtattatgttgaaatattatggaaatgatgtgagtggtgatgaaaggatatgtttgcatgttgattaagggtgtgtttagttccacgctaaaattggaagtttgactaaaattgaaagtttgaagaaaaaagttaaaagtttatgtgcgtagaaaagttttgatgtgatggaaaagttgaaagtttgaagagaaaattgggaactaaactcagcctaatttgtagaattcaatagattgtagattatgttacatgcttacataaggtttgatatgtaattattattagtgaataatgatgtgacacggatacatgttgagtttagtatatgttaactatcctagcccctattatcaatggcccctatggcagcgtcccagtcagcatgaacagtcatacacatacgaggaattaacgagctgtagcttctgaacaggcacaatcttatctcattttaattcacttatatgcatatttttttgccatcacattgcaacgtccaaacttcaaacagtacgtggcaccaactaacagaggtgatgtgcatctcacccaaaaaagaaagtgagattgatgctttaaaattgaggccaaataattggattcgtcgtgatatagtcaaattctagaaactacttttaagccaaatggaacattcttagctccatcgtgcaaaacttggttcgtgttacatcaaacccttggacaaaaaatgttgaatttctcgtccatccagaactttataccttgagtaaactatgctcacaatacatatacttacgtggtgattataaataaatactcgtaagtatcaccttgtaaattgctagttctggtacaataacttatctaatccgtgcaagcgtgtgccgaaacaatcaagggaagcaaattaatttcatataacatggcgcaccctgataacgcctttgcatgctccggatgtttgtagttgtgtagacctgcgcacgctagtttaatttcagttttgtagaacttagcagttaacagtaataattttgttgcaatcttttgcaggtgcttccactactggagtacttttttaaaaaaaaaaaaacaaaacaactgctagcttgcattgctgatcaatttttcatgtgcgatttgttttgtatcaggttcacatggacgtactactatacgcaagttattctatccgaataatcaacttgtaagttgttgttgtacatattagcatccatcctgcaagttcattcgagtgtatgtattaacaagtacttgtctaaatctttagttagaaataaagtttgtgtgggagtgggacagagtaattactgccggtggtgtttgaatctcctgaagatgaatataaaaatgaagattaagtgttttacgtaaaacgagatagtaataacgtgtgattaattaagttttaattattacaaacttgaaaaatggattaatctgatattttagaaaaactttcatataaaaaattttcacacgaaacacactgtttagtggtttaaaaaacgtgccataaaaatccaaatcttaatccaacctttccagaggaaatgaacggggccgacacagaattatcctaaggccctgtttagatgggactaaaacttttaagtccctatcacatcggatgtttgaaaattaattataaatattaaacgtagactattaataaaacccatccataatcttggactaatttgcgagacgaatctaatgagcctaattaatccatgattagcctatgtgatgctacagtaaacattctctaattatagattaattaggcttaaaaaatttgtctcgtgaattagcttttatttatgtaattagttttataagtagtctatatttaatactctaaattagtgtctaaagacagggactaaagttaagtccctggatctaaacaccacctaagtactccgtgctggcagaaatgttaaatttatttatcactgacagcctaaaaacactacaagtataaataaggagtacatttaatagtattaaaagtactcgtatttatacaggaaatggaaaatgggcccagctgtcatcgtaggttttccttcggcgtacgcccgcgaatctcccgccgggtataaatagcggcccggaacccacccaaactcccaaattccaatccggtccctcgcctcgcctcgcgtctcctcctcctcctccttcccctccccgcctccaatttcttcctactcctcccgcctccccgcgaagcttccccacgcctcagccgccaatccagccctagtgtggcggcggcggcggcggcttctaaaagccctcctcttcccggactccaggatggcggcggtggcgggtagcgcgagcgcaggcgccaacggttcggcggcggcgcatcgggtgggggcgccgacgaaccccatggcgacggcgctgctcaccgatcagtaccagttctccatggcctacgcctactggaaggccggcaagcacgccgaccgagccgtgtgagcgctccctctccttctcctcctccttctccgacgtctctctctcgttggggccgcgccgattggattggatcgggaggcggcggtgatctaggggagagttggtgcgctgaggttgttggggttatggattgggagagagagagagagagagagacagagagagagagagaggtgggattttacggggagatttttcacctcctgcgattctcgcggtgtacatgattgcattctctcctcttgcggctgccaatccgatggtttcctcccacctcccgttctgttcagatcgttttatttttatttatttacttattttgttttcgtagagttgttttttttcttcaaagttcatattgtttttttttttttgctgagatgtagtactgatttagtgcacggtaatctggtggttaacctgtactgctctgagctggcaccctggttttttgcttcgggaagctctcccctccttgtgcagtttttaatcatctctgccttgtcactttgtcagaggtctaagattctcactatttctattgcatatactacttgaaatatgatgtcactattgttgaaacgatttaggaatagttgtgtgtggctctcctttttttttttgggtttatattcgtgtatttcttcaagttgtgtgttggacctttttaatgttgctttcagtggccgactttgtatttgctggaagccatttttcagtttgtaccggtttatttataatcgcgtaatgccaaagttggattcgagttgtctttcaattgtttggagtttgagcaattgagctggttccacgtgggccctcgatattatactctgttgataaacctggaatttaatattgtttatctcgacgtagttccaaagctggtgttccttgtgattatcggtgaagtacatatcaattacttcttgtgatgaaccacaacatacagcatgtcatacagccagcaccgtccatgagttttagtgtgtaggtggagcactttctatatggtgtaatgctatttaataacggttcagatggagccaaatggaatggaaaatctggatgattttaagtagatttaatgtgcttcgctacttgagtaaacaaatcagattgttggttcttgggtttcttattttaattgatttggctgttatctgttgtcttattcatttattttttaatataaaaagtgatgtgagtttgaggattcttgttcagaagctgggaaggttacaaaacgtagcgtttttattgaaagaatattctgttagttacgctgaaatcttgagttcgcctctgagtcacacttttgtatatttgctgggaacaacatgaaaatgcaaaatttgggagttgtcaaaactacatatgaatattgatacaaaagagtcaactttggaataaagataatgttgctctatatttgtattgcatgtgataattgtctatgatgtctaatgatttttcctaaactaatggcatatatgtttctgaatcactacgctatgggacatgctttatggttatacttattactatcacatttttggataattatcctttgtttttttagttttgtgtgtgagagaggtggggtgtaatccaaaaaaacactaaagactaaggaacatgtcactgtgtgaaatgcatttttctcaagttctgtttttatggatttgagcatttctctggggtatgctatgtctttggttttaggtacttgggatttatgtcgactgattcagaatctaccaactaatttacagactcagaatctaccagctaatttatagattcagtagtaatgcagatgcattagctgattgtgtattccattggaacttgaaaagtactttggcataacacagaaccacttctcttcaagttactaaaagcagatttaatttaatgtgctagctctttagatatattgagttacctttttatgtccttttgatacagaaccacttcttttaagttactaaaaagcagttttgtctaaaaatgttgtatagagcaatcacatgtgttttttcgttgtgcactattagtgtaccgttaatcataaacacttttttttgtctagttcatcttggaagttggaagtaatacttctctgttaaattattgactgaatggaccagtttcagtaaatgctgaactatggatggagagagcctatttctttagatacaaggcttgttttggatgggcattaggattaagaaggatatgaaaccaagagaaagtgaagacaaatgaccatgtgttaacacttaaatatcttgggaatgagtgagagagagagaatagctggtgaggctgaggacattacttataaatgtaggtcagagaagatgtgctaaatagaggtgttaaacatcaataaatttgcatgcgttccttatattttgtaaggatcttaagaaactatgggccttgtgttttgaaaagcagggaatgtaactagcatttcatacattggtcgacctcatgctgacctggttccatttctttttataggtttgatctgtacttcaggaaaaatccatttggtggagaattcactgtttttgctggtcttgaagaatgcattaagttcattgcaaattttaagttcacagaagatgacattttgttcctgcaatcagtcatgccaatgtgtgaggtaagctgttacataaaattatctttctgtcttaaagtggcatatggttctgatataagctgctatactatctaaaatcctattaatttgccatatttatagaaaggcttgttagcatagtctacaaaaacattgccatttcaaatgtcagatctttaatgtatcacttgttagttgtttgccatgataaatgttcatttactgatgtgatatgcgattctaggatgcgttctttgattatctca

SEQ ID NO: 5620 - DNA, 31475 bp, Oryza sativa
gatccaacggtagtttctaagtttccactatatatatggtttgcactacatattttccccggttttccgatcaagttcaaaaatgatcaaattgaattttaaatttttgacaagatttgtttggatctccttggattttgttggcttatcgacggtttccatgaaatctgaagatatagttcatgagcggtttttcatccgatattggatcaattgtgaaccgtagtcaatctggtcatttgaaatcaaatccggagacccaaattgatgtcaatctaggccatttgaaacatttcgacctaaaggcctcgagtggctggcccaccttcaaatttagatgtagtaaccaataatgcacataaacgcctataaaaatgtgaacacgtacatacgatgagtccgtctggttttccacttcccaatggcatcaatcttaacgacaatgcctccttccatcccctctttttcttagacagtcatttctccctatatcttcagttcaaccatgtatgtaagttgttgatttgcttgatctcacgtctccttttccaacaatctcataattcccttttctcgaacaaacatgaggcgaataatttcaccgcacggttgatgcacgaaactatggtgtataactagctaggcaaaggaggtattcggaatggttggaggcaacttatgacgaccatcgaccgatccgctgaaacaagaacgacaacaactaacgaggttggcgcagcggagaaaggtgagggccatgtgactcaatcacccggcgaagtaatgatgctatgaaggagtctggtgaagaggtacatggcaaagccagggccacgcgaatcttggtgatgcgatgaagcgaaatacctggtggcgaagcaaatgcaccaagtggcaaagcaggctcggctccgtcatgccaaaaccaggggaaaccatcgaccaaccagctaggccaaaagacaattgctatcctcataaatgtctccatcagagggacaaccatattaactcactagcacatcaaactatagggttgtaaatctggccagtaaacctataaatagaccttaatggcggtttaacggagaatccaaattttcaattacaccatacttattatttttcaattccttccacttagagtagagcatgtctttcggcagaggtgttcgtaattcgaccacgggaatctcatggcatatcatttgctcatcaaatggcccgggtttacaaaacttggtgtagtagcagaacgcttgccaaagtgacttccaggtaattatggtaccgatgagctgctgttcaccaattacatggatccaagatcccgcctcgccagtggggatgagttcacctcgtcctcactgatcatgatgggtcgtcggcgttccaacagtgcgttcatcagcagttgctcagagtaaattaaaggaagtgcagacctagctatacgatgctatatacgtatatatatatatagctattctaattcgttttaattagtaagtcctacaggaaccatccgccagcgtaataagctgttgtacttgtaaagaaaacgtagaatattaaagattggatagcaaaagctccatctctctcctctcaatctcaccagtgcggtaatggcccaggcggtaccaacttcacacatatataatgtactcctagctactagcacatgacactaattatgacatggaattaatttttcagggtttcttctaaactactggtaactgcgagagccggtacaataacggactatgaatcagctataaaactttctgatgaatagcgtacttaactagttattttccccgggcaaaactgcaaaattccatacgtacttcatctatctatttatgccacactaatacagttcttaacaaaatcatgtgtatatgctttgacaaaataacctttgagatgcattctgaaaaataataataaaaaagaaccctttgagatgcaagtaagcacctagctgcagaaaattaatgaccaaggtgttttgtgcgtacatgtattatttactactaggcatattctgagtatattattgcacgtacacagcagttaagttttttttttcccatggactatatatgaggaaccatggccttatctgttctgtgtcaagggtctccacacagggtaaaaaccaaaaccacaaatacttgatcttggtgctctgagtgaatcaaagtactatttgttgatgagatatcccatgaaacccaacataatgttgaataagccatatgggtttgggaggcctcaagaacttacctatatatgccgaaattcacatcagatgttagagaatcgatgacagttgcccagcatcgcttaatcttcttccgtgcattccttctctttgctctacaagataattttacatggtaaatctaccatgtgatatgacagccatcttgatcgcaactgcaagctgatggtatctcatgcaatgtgagatcattagttgtagatgaacaggttaatggtcagcagttcttcacaacatgtattttccttacaggaagaaactttgcagttaattagtatcagtattgcagtatcaaaacaaagcatacaacaaaattttgcaaaatagaaattcatatcctaaatgaagagaccaaaatgaaaagtttttcctcttgtcatagtacggttttaaatagtttaaattgataaaattaaactaaaacaaaaaccaagcaaaacaaaaaaaaacaatgaagagcgtggtattacacgatttcattcccgtgatgatggcattcattgcatataaatgggataaaaaaatgcatcaatgaccaaagtctaaaactccaattttcccctccaaggtgtcttactcaattgttttccccttctagtgtttacatacccatacttgaggatggctctcaaacctaataggattccctcacacatcttttccctaccaaataaaaccctatcacattgccggttacaaaatgctcgttgctgccgatttggaactggcattgttgctcgaatgctatcgctactggtccaaagaaacaacaatatatagtgcttctagaaaaaaaaacaccgttgtctctctaactcgcagcagcaccacatcaacgtaccaatggccatgcccgtcatcatcatttgcagcaactagcacccaaaatctgttgccatcttttcccacaccaattaagctagagaagctagatcgatagccccgaggtcggaccggtcagatctggcaaacaagagcttggtccagctacaactgacctagcttgttccctgtaaaattaaatcatgatataatggtctgaaataaatcctagaagcctaaacatcaattggcaattttgacctttggagccgaaggatttgagtggcttatatttgtccagaattgcataggtgtactctaacatgtgggacagagttcatgtggatccccatcatcatcatgatgggatgagattaatttgctccatcctgcctagctagatccaacgatcagaaacgatttggtactatgaggtaccggtacctcgaagtactttttgttgaacatgagtaaatctcatttgcaatagaggctttagaatgcaggccatccatcaattggggcagcagctttatgcaccatgaaaaggacaacaacgagctctatgtaggcctggatcttcatacaagtagtatagagtgcaccttcttaattccttttctgttcggctctccctctccataaaatttattacttccaatcttcaggttcttcgtctcccgttcttgacctcacttctctcattacaacttgctcaaatctgcctctcttcttgaagtaatattaggcataaaatttgaccacaccaatggatgcaagaggtgatatagtatgtgggcatgggaggtgtagggaatggcaccctcatcaagcaagcgtgatgcatctttcatcagtgatctcaccaaggttgcaatccaacagtgtttacatgaagctgttcgccgcctgcaccccagtatatacatagaggtttacttttaccatgcacgtatggtgccctgtcgttcggagatggttcacttcttgagttgcatgaatcgcagaatggaaagcgtatatagtctatgcagttgaggttttgttcatttggcacggtataataaatgagtgggattatcctatgctgacaaaacaaagccttagtttagtgtaggagttatgtagtggatccacaagctgtcaagagctgaagtttcagacgttcaaaaatggatccagagttagggtttgaattcatcttgacacaaacgtgggctgaattattaacttgtgctacctgtaccaaaatttcatttgtatatcacggtgacaattgtcatttctttaattttgacctcaaacgaacaaatgctaactaaaggacagatcaatcatcgcataggataaacaatctgttgaaacatagcaagtggagtagtgtctgggtattctacctctgattgggaggtgctgattagtgtagggccaacatgcatgggagcatttctatcatggtgagagatgtgtttatatgcagccaaacaccagcatgcatatatctctcaactgcgatatctaggcatgagagatgttgggaatttcacggcctcatgcagtcatgtcctgatccataagctacgggaaggaagaatctgtttgtagcataatttgactaatatttagttttatttgggtaagccacattatttagtttagttgtctagatttatcgagtggttagttaaatgtgtgtggattgctgggaggcttagcagtgatacttgtgacatagagatactatgggtcagctaagtttaaccacattcaaggaaggtttttgcgatggtactatttgcatgtacattagagagtgaagacctgtgcagttggttacttggttgctggtgaaaatttgctgcagtccaggatccttttggggctgatgatcatattcgtgcagtggagaagtctatagcgtgctgctacttgactcttctcttaaccgcttgcatgcgttggtgtgcggctgcgtgaaagatgcagctgtgacgtcggattgtaaacgatacggcatgattagagcgtgcagctgctaggaagatagagatatatattttccatcttatcagtttgtttcctttgtttgaacgttgctactttttgtgttagaccgatgaccatgctacccgtgtgtgtatatatatatatatgccggtgtacggttaattgaggatgccgaacaaattattaatctactattttcctattctttactttcctgttattttcttttttttttgtttttatggctgagttctagcaacataagtgtttggttaatctttaccgttttgcgttgaaaaacggtcgtgcttctctacgaaaacgagaaggttattatcctttgcaaacattgctaggaaactagtcatttgttgttacgtaagtacgatattatcttcttggctaattttctcgtaaattagtcgtgtttggttctacgaaagtgaattaatctcaaagtcggtttagttggccggttttgatttattgattttggtgactctgttgattacaccgtacatcgttagatgatcttgtgttgaccacgaaataatgtcaacggaatatttttcactaattggcttctacacactctcgcaatcccaatggctttgtggcagatgccacacatttcttgccacagagaatattgaggatcattagggaaaaatatttaattgatgatttggttgttttgcactattttgttagtggcatacgcaatgttttaatttggtggtttttgcttcgtataaagggttaatccgggatattattagggatggcaacggggcagggcgggcgcgtgttgggctggaatgaccccacccctgacccccaactctccacctggccccggctccgagtggacatgcggggccaaatcaggccctgccactggcccctacggggccccgcaacctgacatgggccccgcattgagtagcaattccatcgaattgccgtgcgtctcagcgtttgtccatgcacgccgctcgctccctgtgcttgcgctgtgcctgtgcactgccgccgcgtctctgtggcaccgctgcaactctgtaccgcgctgctaccggaagagactaagagaggggcgtgcgacgggagtccggaggggagaggaggggagggaactggggagagcggcgagcccacgagatctggcgaccggagagagccgggagagaacgggaggggactgcggagagggcgaccggagggttggggactccggggtcgcatgagtgtgtctgcgcctctgcgggctgcagctgtgtggtggcgtggggaacaaggtgtgaggggagccggggtggtctagttagggtaggttagggtttttttccttatatatgctgacttctactgttttactaagatgggcttcttgggcctataatgggctatattttaagaggtaatatacggggccccgcgggtggaatgtctcccgtcccctcacccgtcaaaatgcggggccccggcccagacggacccacggggcagaaatgtcccccacccccgccccttagtgttgcggggacccggctccgtggggaaattgccatccctgctattatagttgaagcataaggatttaaatataagcagaccaccacctaactatatttcaaacgtggtactaaataatcatcactacagccacgcctcacgcctggatcacttggtcctaaaccagaccacgtgaacacgtcaagtgcaattgatgagctatagtagatgttacgagatttactccggtccaataaaaagtacttcgaggtacctgtacctcacaataccaaatcatttcggatctttagatttagctgggtaggatggacattgttagatccaacgatcggaaatgatttggtaccgtgaggtatgggtacctcgagatactttttgttggaccagagcaaatctcatatgttatggatctttagaagaaagtaaatttccatcaaagccaatatctaaagctagtttacaaagtcctataagaattcggcttccatcggatggtctattcaaccaaagaaaaagccaaaatttgaattttcaaacttaattttgatattgattttgagatattttcaacgtagtttctttttcagcattggcttttaagtcaccgagaacacatatataaaagttttacctataaatttatttttattctctaataagccgttttggcttattaaaagaaaagccaaacgattgggcccttcgcctcctattccacaggagcatcttttctcctaaaaggatacatataccgaaggttgttgcctaatcgataggtgcatctaattttggaagaaacttaacacaattcatggtaaaaaaaaacagaatcacatgcagtaattgcgccgaaataaattctagcttattaaaggtggtataacactacaacagtgggttaatttggatataaagacttgcatatataatgagaaaattttcctatattctctgtggaaaactaggtgatgtacaaggaactttgctctccagctagacactatagcaaaagcatccaccttggtttcatttcgaacaaagatagctaagcatgcgaataggaggtgtcgggtatttctttcctaactagaaggagaacaaaggggcatgcattttgttgctttgcatctgcagatgaactatgcagattgtaccactaacaaataaaactatgaatttacccccaaagactttgctaaatgctaattcgttgtgatgggttctgtgaaatgcatgactatagataaaatataatagtcatacattccacaatacttggttttaattagtgaatcgaatgctcgagaaaatattttttttcatatatgacaaatctctctgtagtatttatttttcaataattgagcctttttatattagcttcttattgaaccaaacagtaagaaagataaaaaaaaagtgcataccattaggggtagagtcactcccataatgttagcatggatgtgcaactggtccagatgaaccccctgccacaccacgttcacttaaccatgtcaaagtaattggtgtggctaaagacttggctgtgttcttaatcacctcttaccaactttactctctcgtttttcactcgcatacttcctaaaccgctaaatggtgtatttttcttaaaaaaatctatataaaagttattgaaaaaaatcatattaatccatttttaagtttattttagctaatgattaattaatcatacacaattagattgttctaatttgcgtgcgtggatgattaattaaagttcccaactttcacctccgaatgcagtctcaaagaggttcaattccaaatcccttctgtgctatcgtactaaatattttattgaaaacattttaaaatatgaatgagttcactttaggtcctttaattggcatgaaaataagaaaaccacaaacactggccttgaaaagagtacttataaaggtagctcatattgagagagggatctgcactcacatacatatattttttttttactaagctcccatgcatatattatatatagagagaaggcgggtgcactgtggccttgtggggatgggaggcatgaggaactcaacaaagcgcagctgtcacatataatgctctcagcactgtcatgccataggaataacctcgcaagagcaaagcaggtgttatttcttggccgatcactaatggtagctgtggcttggcgggttttgatcgagcttgtaaagcgcagatatctttgagcaattttctcggcaattgagcgtacatcgtcgtccatttctcctgtcgacactggttgatactctctctagttcatattataagttgtttgattttttttttttgctagttaaacttgtttgagtttgactaagtttatagaaaaatatattactccaatactttgatattttagatgttgctaaattttactataaatttaatcaaacataaatataaaaaaagtcaaacgatatgacataaagggaacggaaggagtaggaccgaaggatatatagtatcagggaagagagagggaaatcaacatctaacacatgtatggaaactggacatgaccaaacatacgccgttcaacaaattcattaagctatccataagtgatttgcactaacgcatacatggcttgtaacattgtagaacgttcaactcttcaagtgttttaagacccatacagatcttaaggggagagcacacatatggaggaaagattggtttcatcagagaactaaaaatcatgtcctttataaattaaccatccattcgaagtttcggtgcaagttcagggtacaaattaaacatactgttaccacggggaactattttaaactctcaatgcatgggacatcccatcgttgtttgcatgtcatcaaaatagttaagaaaaaaattgaaaaaatttaacaagaatgattaatatgtgataaattacaccataaacatacaaggttaaatttaacttctataagttgcaacgaaaaaacaaatttaattgcgaatactcttgtatgtttgtggagtgatttattatatattaatttatcttgttgattttttttaaaaaaatttataaccatttatatgacatgaaaataacgaggggatatcccctcgagggtttagaatccactcccccgttattaccacaccccacgagtgatccggtcgatcaaagttgctctgttgccaagacgcgacgaggcatatttgttgaatgttgatcatattgcataagacaatatcatatatgggtagtcttatgaacttaattatctatgctgaattttactccatgtattgcttcaacattagaaagcctgttgaacgtacagcgtgcctttgcttatttattgatgaaaaatagggcgaactgggtattttagtggcaaataaggtaccagtacagtttcaaactgtaaaaccggtctgggatttttcacgtttgttaccacagtagtatatcattggtcaagcaagcatggacagaatacctgacacaagaagttaagaagtactcctaaaaacaaaaacaattgttcagactcacaagcagttcaggacatgtactagtctgtctgtgtccagggttcgtagccagaatttaactttttttgggacggaggggtatgtccttatcttttttaaaaaatatgcgtcaataattagcatttgttgcgtcagaattgacaagtctcaaaggaaatcggattagaaaaaattatatcaaactggcaggttgatgagatttgtagttatatagttgaagctttttcgtttgagtttaacatgccagaaaagcgttataagtggtgcaatctattttgaaatacaaattttagaattgttcaaaccaactcggatggtggctatatagaagtgatagaacgctaagagatatacatcttagagatatacatctttttcatttgaaatcatgtttctttttttgcgaggaatgtattaaatttttagacaagaagagtcaaaagaattgcaacaaagaaatagataataagtgtcacgccccgaactagccccgagcggaactagcccgtgacgctccaaattaacctgttaatcgataccagtcccaggaagcagtgctggtatcacaggaagacagaatatcacagcaacagaggtctctttattatagagtaggagtacagtcatgttgggctgcggacagatcccgagctcacaactgcatttcaaaagggaagcggaagccaagacttggaccaaacatcacaggcgtgacttgggaactaggccgaaaccctaaaactcatcgtagccgacttgctcctggaagaactcctcgtcggcgggatccgcttcatcttcttcagcaactgggggagggggaattatttatatagagcaagggtgagtacaggagtactcagcaagccatggggattaagtgtttaaatgtaggcttcaaggaaaggctgttgtttttgcaattgattttatttaaactcttttctgaaacaactaagtgagtgcttctcaaacgacacggatgggacagtgcgtctcgtccggtcggagtatgtgcaaggtatcagtcttttgaattgatcaaggttggcatccggccaacagctttcaaacggccacccgggtctggctgatcccatcagccgcagattttccaaacatcgaacccaaaccacatcagcaaatttcacaaagcagtagtcaaacaaaactacgctggaatcacctcacatccgcgcatgaccgtgggcacggctgttcgaacagtttaataacctctgtagagggggtacactttacccacacgacattactaacccggatcatccagctcgtgcagaacggccacgactagagaccttaaggctttcatgacaaggcatttcgaaagccgacacaggttcaccatatgccaacgagaggggtcccagaccaacaccagattaggtcccagaccatactgtgccaggaaacccgggggttctccccgacaccaccccgttgaatccacatgtctcttggcatcatggctcccccgattagctagttactcagccaggggtgtcccattccacccatgtggtcgtacttgtcttatgttcggatgaaatttcaaggaaacggtccttaagtgcaagagcgggaaaccgtacacccggtacgttccccggtccacgattttttggaaattcatttagttcgcaagcaccgacccaggtgtcgggttttccaagtcttttaaaacccaagttttacccatggttggatattttatattttgaggggggtgttccgatgcgcatacccgaaggcccgtgcatcgaagcacaacagttaacaaaggaggtttaagtgttcaataattcaaggagggtaattgcagcaattaggattgggggccggtaggccgtctcgcaagccgcggccgaattacttgtgtaaatcctattcatgcaatatttgtggaaaagaaatacttagatttaaattataggtgcaagatgattgtcacgcctggaaattcactagtaatttccgaacttatttgtgcataaaatcctcgtccaggaatcagccgaggtacacaaactgacagtttaatatacaaatccatcataataataacgttagacacttacaaaagaaaagaaaacagcagcggaataacggtctagcgatggcttcagctccactcccacaggcagctcaactggggtataagccaaacgtcttctccttctggatcctttttcttcaactgaggttgattgattattgcaagaatgagcatatgacatactcaacaagccacacagcaaatatgcaagtgcacaaggataccaaaggatggcataatataggctcatttgcaaaagcagcatttagcaaaacatttaagagaagtaaaacagtggagtaattaatcagaaattttaatcaacactgaacaacacacccatgctgcacaggcccaaccatcctgaacaaccatacccggctgtacagatctaactccaaaccaggagctaagcaaattattaccaggtataacatccataattattgtgagaggtgtgagactaatcacgaaaaacattgctcaacccgcccataaccgcgggcacggctattcgaatagttttactctggccagaggtgtaccactgtacccacaagacacagccttaacatcatgtctaccatgcgtcgcgatactagaaagtacccgaatagaggctgtgacaataccctctgtacaacacaactcaccacagtgcaccattcctggatcataatcacccccttataaaacaaggcatggactccccagcgacccccgtgggcttatctccgccacttctcagtctggtgctccgcaatgaatcatgctatacaaaaggtaaagccgttgcccacgctggcttgtggttggcacggttaatgtttcacaatagtagctcgcgaaccggtccttaattgtcatgagcacgactctcaaaaccatgtgctcacaacccaccattatcaagttttagttggcaagtaattaattaaccaatcacgattgaccatcgtgaactatctttaaaccatcattaagtaataatgagtcataagttatcccaataatgtgctaatgtttctaagcatggctaagcaatcatatctaatatctagctgaaccaatatataaagctcaactagtcaagttataataacccaaggtatcaaggaataaagtaatcaatgcaaacaggccataacaaaggaatagattcacaccacccagtgacattcgaaaataaatgcacagttgaaataaatagagaatttaaatataggatcaacatgctctaaggattgtgtttaggatctgtgtgacttgccttgcaataatcggtcttcaattaatcttctgaacactcccgacgcactcacgaaccttcgcaacgacggaaacgacaagctaacacgcaaaacgaagaaaaagactaataaaaaccaaataaacagtacaaaaacaagcataaacagtacatgtggatatttttaacatgtagatctcgattttagatgaatttagcaacttgaaccactcaaaacagagttacgatgatttagttatgaatttttaaagattaaaccggattaaagcatttatatggattttaattgaattatgacgcaataatgaattacttttgaaaaggaaaaggaggattattgcgtcatcaaaggcagtccgggtgcatgggacggtctaaggaaacgaacggccgagatcgattctatccaaaacgggcggccgggatcaacttgatctaccgcggttcacgggacaaggcgacgatgacgtcagcggtgacgtcagcgatgacgtcagcaccggcgacagctcggcctcgcgcgctcgccggcgaacgacggcgcaacgacgcaaacggaggacaccaatgggtagaggacaacacggcgaactcaccggtgaccaaaaccacggcggaagagcaacggacggcgccgacgatgaggaagaagcggcgacggtcttcgggtcgacggtgacggcggtgctccggcggtcttcgacggcggcgaagcagtggacggggacggcgacgacctcgcgatcccgatggtggcgatggcgaccaacgacggcggctgcaacggcggcgcggcgcggctgaaccgacggcaacgacagcgacggctagggctacgcggaggcggcgctagacgctacggcgggctaaggcaaaggtgacggcggatagaggagagctcgggggtgcttttaaaggggctagcgagcggcgacggaggcccacggcgaccggcggcgagatggaaagctagggttggagggagaaaagtcgatccgaatcgagctcaaattcgtcgatttccaaacgaaattgaccgaagtttctataagagaaaaggaagagaagatcgaggagattatttcccctcaaacgatttcaccggaaacggaaaggatcgaccggattggaaagcggcggcggctagggtttcggccggcagcggcgcggggaggaagacgggcctgataggtggggcccacctgtcagcggctgagagagaggaggaaggggcgcggcggattgggccgactgggccggggagggagagagaaaaagagaggttttgggccggctttcggcccaaagccaaaagagacttttaaaaacctttttcaatttaaattattcatgaaatacttccttggctcaaataaatcccagaaaaatctaggaactatagaatcaagtaaagtatttaacaaaattttatctagcccaattttatattgagatttaacaaattaaaattagatcttctcttttaggcttttaagatcatttctaataattccttttaaacaacaatttataatttaaggatttttaaacaagaaaagctcttaacacttataattagatcattaatgatcaaataattactgaactgttctttgtatcatttaggaattgagctccgaaaaatccgagaaaatttcagagagtagacttaatcatggagaatttaataaaaattaaatccatccatgctttatatttaggaaattttatttcccacatttaacttcacttgtaaattaatgaacatttaatataaattctaataatgatttattaaataatttataaatcctgaaataaaaatcaggatgtgacaatgatcaacggtgacttgccttgctcgagatcttgaacttcatcttcgaaatcctcgcactgcgggtcttcgggctccgaaactacacgggaaacgggacaactcaacaaacggtgaaaataaagccctattattgacctctaggcgtggcattagatagatctcgagatttgaggagttttggaagttgaacggagtcaaacggtcatacgattgggaagatattgaatttctaacattattggatttttggtctaaaggaaaaggatttatttaaatcctttttgaaatagaaaagaaaagaaaagaaggagggcgggaaattagactttccttgggcgggtagggcgcggcccgagagaaaggggcggcttggccgaacttaacgggccggccggcccgagaaggcggcccaaagcacacgcgcgggcggggaggagagaggaagccgatgggccgggtccaccttgcgtggtcccgggtgggacccgcttgtcggcggctcggctcaccatgagcgaggtgcacgcggggcgtgctagggtttggggaggggaggcgcggcgcatgcgcgtggttcgcggaggacgcggtgcggcgggcccacgcacagcctcacggctcgcagttaaccgcgcgcgcgggcagggctggagggagcggcggaccggggtcagcttgacccggtcgcggccgaggtggcgctgacgtggcacctacgtggctgccaggtagacgacgacgtcggccggaacggacggcggacggcggcggcaagcggtggagcgaaccacggcgatacaggcgaaagcgagcacaccgggaggttgcacgggacgaggggagacgagccaacggctcggattcgccaggggatgctcgacggcggcggattgcggcagcggcaaccggcggggagagaagggggaaacggcgacggcgcgacgggagaccgattcgggcgagctaaagcatctacgtgactccgggaatccgttgctagcgtcggattgggcggagctacgccgagcaaggccggcgacgagcgggcgctacagagcacgggcggcgacggcggcgagcacacagcgagcggcggcaacggtcggggcggcggcagctagctacggggaggctactcgtgctactacctaagtctaaggggaggagatggaacgaggaaggagaacggagggaggcactaccgtgcggggtgatggggcgcagtgacgaggggccgacggcacgggagtgatctctccggcctcgggccggggaagaggaagaagacgagcgcccggagtccccttccgcgtcctagcgcgcaccggctcctccggcacacgcgacggtggcggtcggcgagagagatagagggacggcaatggcgcgagcgaaaaatagggaagattgggatggaaaaaggaagggagggcgcctgggtttatagggtgacaatgtcggtttggaaaccgaccttgggcggtcaaggcgcgagctggcgcttggcgctcgcggccaaaacggcgacagaggcggatgacgccggcggggaagagaaaaggaaaaaggaagggagaaagggggcttgccccttgcctattcgggaaaggaaggagggagagagggcgatgaggaggagccctgcctcctttccttggaagcacgcgcggggagaggcggggccgagttgatgacgacggcgatgacggcgggggcggtttggaaaggagcggcgacacgggcggcaggcacgggctcaggcgcggcaggcactgacggcggcggcgaccaggcggtcggccaccacggcgtgcgcgcgtgggaagcaacgggcggcgcggcgatttgggcggcgtcagcgggaagcggcagcgagggcggagggcgctcggctcggcgcggctcacgcgcacgcacgcgcagcgcacgggcagagcgggggagagagagagagagatgggggggagggagagatgggccgagaggaattcggcccatcgaacccgagggaggcaaaatagacttttgcggagggatttgatttgggaaggataattgagattagggtttggatttggattcgggacttgaacttgacgatagatcggggatttgagatccggaatggcacggagactgactgcaagcgaggaaaattttttttcgcaattaaggtttttagaaattacattttcccgctaggcgccacgacggaacgggcgctacaataagttttctacaggtgagagggtaagaatattacgtgtggagcctaggttagaatcctaaaggctgcacatgcgttgagagtgtctattgagaaattgtgtgacttgtgatgcactattccttgtaaaatacaaaatattttttctgtgcttcttttagctcttataaaattttaaaaactcatataatgcttgttgtcggtcgtccggcgttgaacggaaaatcggacgccgacgccgacagttgtagaaataattttctctctcttcattctccttcccacgcatctactatatgctttctgctatagactttatgcatgcatgtgtctctatttataagctttaaatatctttttcttcaaaacagtttatccgattgtatcattgtatttgttgtaattaaatctttacaacaagatctcacttgattgtatttagacaaaatatgtatatatatgtttcagtgtattaaaatttaatgttttgcgtgtgagaaataaatgtttcagttggaatttgactatgttgcacattttttgttcaatgttgccattgattttttttaagtgttgcacatggtgctatttgggtgatttaataaatatttttttatgtttcactagtgttggcggtatgtcatgagaccctccgaccagacctaccgagaccaagtaaccagcaaggcttcaagcccaagacggcaagttcatcggggcgaagcccgcatggcgaagactatggagcaaagacggcgaagggcgaagaatcgcgctggtatcccgcaggtccgaaggcgtctcgggcgaagaccatgtgccgaagggtgcatgccgaaggaaggtgatttcgccatgacaagtcatgctttggggaggcccaaggggccatcccagctgctctagcccattggccattggaccagcgttcgccaatcggccaagtggaggcccatgtatctcaattacatcgtgtacccatgtaagtgtccttttcatgagggcaaccatgtgaattcccctgtaaaacctaaaccctaatagggggacttgtaatgggattataaatagacccctagggccatgtaatggggggatcccaagaaaaaatcttaaatatacacactcatcgttcccaacaactgttgagtaaccacgtccttcgacgtacgcagttgtcgttttgacaacaactagtttatttacaaatgttgcatgtggtgttatttggatgtttcaatatcttatgatgttttactaattcatttataattgttgcacgtaatgctgtttgaatgtttcattaagtattttctaatgatttatcaattacaattcgttgtttcatgtataatatagaaatgtttcaaaacagaatataattatatttatattttttattataaacataatcaagtgagatcttgttgtaaatatttaactataacgaatataatggtgaaatcatatcgtcgataagataagtaatttagaaaaaaaatagtttaaagttttactaaaaatattgctaagagagataggggcttgtaaatggtattggagctcataggcatgcaacagctatcagagaatgacttagaccatttcttttgcaacgtgtagcatgcgccccgtgcagtctagcagacattgcaacgtgtagcatgtgccccgtgcagtctagcagacgtcagacatgcgtccgatatttcgtaaaatatcgtacatccgtagctctctcccgtatatgtcatccgttatgggtaataattatgacgtacggatcatcactagtggggtggtatgtcaccctgttgttttgtagtgcagtactgggtggttattagggaccgttagacaagaccatctatgggagttcacacattacatataaatctcgtcattgacccatggtctatttatggtggatatatcagttgcaagtggggtctatgacccatcacatacgatgggtttttttatatgacttttaaatatgtggtccgaggtaatccaaatgtgctttcacaatgggagaataacattatgtagaattggtcaaccctgtcttcgatctttttcttcttctttttttctttcaggaaattgctcaacacagtcatgcacgaaatttggattactcgtgtagcatggacagacacgagctgggtgtaactagtatggcaaccagggccagatggatatagactagaccctgttagatcgcacccaaaaatttttcaccctgtcaaatcgaacgtttaacacctatatgaagtattaaatataggctaaaaacataactaattgcatagattgcgattaatttacgagatgaatctgttaagcctaattactccatgatttgataatgttgtgctacagtaaatatttgctaatgatagattaattaggcttagtaaattcgtctcgcagtctacccacggattctgtaattagtttttttattagtgcctaaacaccccatgcgacatcctatataatatccgatgtgatacgccaaaactttacacccctgaatctaaacactacctcaatatacaagtgcaggactctcccatattaaaagtgaaaccattattaatgaataaacacacaggttttataaatttcaaggatggaataacccatgtacccatgtatatattttatttctacgctacgcaaattaaattgtgatgtgcacctatataaacattctccaaggagccacaagtgatatgatcaatcaaccagagatgttgctgtttatcaagacccgacactcgataatataatgctatatatgtttgtcaacagtaattgcatattttcagtaggtatgggagtcatcagaaattagctttgcaagcttagcgctttgtaagtcgcttacaggcgtcataatggagcatgctgggctcaacctgtttcagtgtctcatccagtgtgtcttctagttgttactcctacatagcacttccttagcttaaacatgcatgcaaataccagcttgttcgatcttactagaaatgcagtactagttagttcactcctgatggacatgttccagacataaccgctgcccatgctgttgtgaacacagccagctatagccatagccaatagctaaccttcaagattcaagttgcttaattcctgtgagtaataatacctaaaaaattcaaaccatatagccatagccaatagcatgtcagttctcaccaaaggaatgctgtctagctagctacttgctactgatcagcattaatcatgttaaatatctatacctatactaattaggcactttctacgagttctcacgttaaccagaaatatcagaccattgattagatatgtcatattatcgtgacggtagattaatatcaaccgtacgtggactctctctaaagcccaaccaatattgcaattgggcccacatatgaattttaggtttcatgcatgtacgtatgacagggtatatcaatctcagaaggagtcctcataggagatcgtccccaaatctcgaccgccggggcaacgccacctgcccatgcatatagaagcgatcaatctctgaagatgaaggagaacgccgagtcaccgacggcacgattccggcgtccaccacagttcctgcataaaccatcgtacgtcaccaatgaaatcactgcccaccgtgtcctgcactatgcaacatcaagcatgcagtacgagagatcagggtgacgatcatgtgcagcgtccgtatctagatcgacgtacaataaaacgatgcacatgacgtgcaccaacgatctgcttggtgtcgaacaggatggaccttggacttgcagcggctatcaactgctggcacaattatccgcaccatcacctatcacaagcaagatgaccgcatatttaatccccataggtatatattctttttgtttgaatccagcaatgtattgtctgaaaatatatatgcactctaattttgttttagcatttggcatttttgaacaaataatacatgcatgttgttcctttatcacatgattacaattttttatgttaatttctcttgataaaaaatatgttttatgtcatcctttatttttgagattgtagatttaggttccgctggttagtgttggttgggaactaatccttcacgcacgcaaacggtgagacagataataagcatgattaattaaatattataaaaaacatgaaaaacagattaatattatttttgaagcaacttttctatataaatcttttttggaaaaaacataccgtttatacgttttgaaagtgtgcgcgagaaaaataggagagtagaagttatcaaagtgaagaaaagaacacacccttaatgatttgccatcctggtgcacatatcagggcaccacaagtcgttggcatgcagtggagtggacatgaaaatctaaatagttagcaaatcattaaatttgccacacgctgcatcaaaatttatttgaacagattaactttctctaataatattaattgttattgtaaatattttgttgacaagtaatatgttttacgccattggcagcgaaatgacaagtgcacatgtaaacaattccaaaggtttcacaacaagaagaacaccatcaagttgaaaagtaaaaaaaagaaacacttaacatccgaaacattttcactgttcaagagattaacatttcacaaaatatggcaagactagaacaaattaaatctctttagatttccatgcagtcaggatatttaccaataatagcctgcaaaatatatttatctagcaacctgtaacttcggagcattatttactagaagtaaaaattatttagtttgctcacataaaaagaacttcattattcagtattcatttattttaaaagatgtcattggcagagcatattacattaccaattgaaacacatgcaagttctgggatatatgctctgaattgagtgatttcaactaaaataaattaatatatgtaatgtatattcattattaaaaacactgcattcttttcagcagcatgttttatatatttactgaaaaggctaacaacactgcctatatgtagagtattcaatatcatccacaagaaaaaaacctacattgacaaatagcggagctgcgaaacaagtataataatttattatagcaaatcaaatttccattgtctggtaactgctagaattctttaataataacccatgcaacgcacgggttggcggctagtaatgtaaatgcatgactacttccagttggacccgttcgatacatccagttggaggtatattttcagcacatgcaaaacgaatgaactcattagcacatgattaattaaatattaattattataaaattgaaaaatagtattatttatttttttaacaacttatacatataaactttttatcaaaaatacaccatttaatagtttaaataacatgctaacggaaaacgagaaagttgaaatttagagttgagaaaaagaactcatcctaatggtaagatgacaattgttctttatttttcttggtgggtcaggtaaagtgacaaattgacaatgtaatagatttttttttcaaatacacgtgtactgatctttgtagaaaggtaggacaacacacatgtgacaaccagtacgctttaaggtgccaatggagaattattaactcacatacatgcagctttgagggagtggagctttgtacaaaaatgacattaagaagccatggtagttatacatagaggaacgaccttccatagaaacaccaggttctctataatgtgatcctcaaacatttggtgaatgacaccgcgaagccaattccaactaacttcgatttacacagttctggatgtgaattaattactgaattgcaagaggagtggatacttaggtggtgtttggatccagggattaaactttagtccctgtcacatagatagactacttacaaaactaattatataaataagagctaattcgcgagataaattttttaagcctaattaatctataattagcacatgtttactgtagcatcacatatgctaaatatcgattagttaggctcaatagattcgtctcgcgaattagtctagggttataaatgggttttgtcattagtctacgtttaatacttttaattagtgtcccaataactgatgtgatatggactaaattttagtctctatatccaaatagggtcttagagcctcatcgcttgcccatattccctaataagcacttttgacttattaggaaattaaagttaatttatatgtatttttttatacatttgttcgtagggaccaaaaagccaatattaaaaagaaattacattgaaaatatcttaaaatcaactttaaaatcaaaattcaaaatttggttttttgctttggcttgtttggacaaccgagaggctcttggcattcgttagaattgcacattgaatgccatcagaaacgaaaagtgatccccgcattgctctgcagactacagactgaatgtgtgctgtgaggtttattctgatttcgaacgctgtcatttgtagcaattcaaaattctacactttcaccccccggttacaataatcaaaagtctgtgcatcgtacattcgtaaggatagagaggggaaagggtatggattacggaacgattgctcacgaaggaatacaatttcatgtatcttctgaattcaaagaactagttggtcagagcttcttgtattcgagggataatctgtaggaactcagtcagtcagatcaacaacttaaaattccttcacatcatgttctagcaagaggaccctaatttaaaaaaaaaacagtctgctttatcatggctctcatttaatacgcgaaccaaggaagcatcatcatgaaatgcagcatgtacccatgggtagagacgagtatatatacatagagatgccatatatactaagagatccaacttgggacgacacgtcgaaaatgaaagagtgaagttgtcttcaaaagccattggggctagatcgttcattattgctgcttgcccagtggcatagggatgggaggcatggggaaattagtcggaacagttgttcacatcatctcttatctggttaggtgatttatccggagctaagatttaattcagagataattcctccatgggatgataccatggtgcgatgacttgatgaaggtgagtccaccagcccgactgacttacacacataggctcaagagaagggaattctgcaacattccctggcaaaattcgattcgaaacatttgttgtccattaggccatttggtggtagatgctacagatagagcaatggagtggccctttgtaaaattaaagtgtttttattattattctgtgatgaataattggcatatgtgattattagttttgatatttggagattattggcgaagtggttttggagatgattggattttcagatgatataagggtactactggatatgtggtccggtcagaccggcgagtggttgccggttagaccggcggtatgtgaccggccagcacgcggtctgaccggccgactctgtatcggtttcggtttcgggttgtttgtttggatatccatggatgtttcgtgtttatggctgtcgccgcctctagcctccaacgccacctccagcctccaccgcgccgccgccgccgcctccgccctccaccgtgccaccgccaccgcctccgccctccaacgcgctgccgccaccgcctccgccctccaccgcgccacggccgccgccgctgccaccgcccgcagccgacgcctccgccgtccaccgcgccggcgacgccaccaccctccaccatgccaccgccaccgccttcgccctccaccgcgccgcggccgacgccaccacctccgccctccaccacaccgccgcctactctgtcaacgtttttcattccaaacttacccctgaaaaattttggtcagactgagaccgagaccgaatttgccggtcttgagattttttggatgaaattcggtcctaagttttcaaagaccaaactgaccaaaaaaccgaagaccgagaccgaatttttcggtctgaccgaacgcccacccctactgggttcgtatcccactagcgcacctttttctcacattttactctctccaactgcccccgtacgcacgtgaccaccttgcacaaggcagtccgggcggttcatctccgattttcttggcggttttcctacaaaaccgggtggcccaaccggtttataccaacccaattgcatagacggtcttttaactagaccagaccggcggaggctttggttctggttttttccggtccaactgccggtccggtccggttctaataattatgtatctgcatcttttttttttcccaagctgtgagcatctattaggtgttaattttgccgcccatgattttacatagacttaacgggtcgcttcctcaaaacagattgccatcattagtgaacaagggaagaccatagagtaaaaacttgaaaggtgttcgtgaggtttaaactacgcttgttttgcatatggtataataaattggaatgtttagccattgcattggtagcaaatcctcccttgctgtggcgacaaactttttagatgaatcaaatcatgcaattagtgcccaattgtattagtgtatcacaggaagctgagttcttagacaatcagctcagtcaaaaaacagtaataaaaaataggtggattggattgcagcccacggatggagtgcgatacttcagattcatggtgctttcggcctgttcacaataggtcaaagccagaaattaaactggaagccgaaataaccggtactgatcatgtcattaagtttcgttcatggttgttgagacttggttttttcttcctcatcccaactcacgtatgagctagctagcattatataagcaagagaaatgatcgggtagtatagacatgctagtcgttcaggtgtagatgctagacatccttaatgattttcactgcccatacaaataaatgagagtttatagctactaacaggatatacatacatggctgatcactgtaccatgatcttgtgttttggggtatagagaaatagggagtaggaggcatagggaatttacgtgtgggtactcatagtgctcatccatggcacttcagtggaaaaccactacgatcgccaaggcacggcacgcctaatcggggaaatgctctcacagctctagcacaaagcctacggagaaccatcgacactctacttgggccaacccggccgagtgcccagccagcagtgtgtgttgcagtagtcgaatcggccggcttcgtcgatcgatgctggtcctgcgggcattggcagttaaagctaatcgccaatcaattgaatcctgctatcactatccgcttcaagagtgtacttcaagtcagggtcctctttcttcaacttctggaacaactctaatgttttcttgcacatcatatcatttgattgttcctttgatatatatttgatcgcaaagagtcttcagagatctcttagtgaatggaacgtcacgcattgaaacaaaaaaacttgcagttatgcagtacacctttgacaggttcacattattaatgcttctgagatgtctcacgagctctttggtgtgtatgtctatgtgcttatgggagctccagtgcttgctctcaccacatgtttctgacaacggatggttatgctatgatctgttttcgctaatgtaccatccattgtcctgccgacggtacactggtacagcctaataagagccttgcaatctgttttcgatgttaccctacataagattggtgcatacctgtcatcgactggtgcatatcacttgtcgaaaacatagtaatttcaaagcatcaatcaattttaagtatattttactgaccgcacaagcacatggcagatcctggactgatttatctgtcccaccatactttacacttcttccatacctgcaacgatgcacaccagcatactttttctcaccaatagttattactccttatgtcccaaaaaaattataaaatttagcatagttatgtcaaacatttttaattttaactatgatagcaaaaaaatgaatagcaaaaagaaaaagatcaatcatgtaaaattgatgttactagatttatcattaaacaaactatcataatatgcaacttttttatttaaaacatcttaattttatagatattatttgttaaattagcatctcgaagactgggtcgaagtccaaaatacgtatattttgggacggagggattactcattaacaaaatccatggcaaccattgaagatgcatttcttattgcgaacagttctgatctttgaagaataacttgtctttaatggtctaaaaaatctatagtagtgcaatgtactatcaaaattagactttacatacttatatctattttgttggatcactactttagatacttgatgccaaaaccaacctcctaggaatgcaaattgtagagatcgtacgcttcctgtagagagtcgaatgaaagacccactttcggttcactaacaaggtcaaccttcttctcaacaaagttttcgatacttgattccaacgcgcatacacgaccactgattaaatcttctgtttccatttttattataagcacagcccacatggttataatctctcgtcttgctcaacataatcaaacctttgtgagagatgatggaagtggtgacttgtctttctataagaccttaggacttttacgttacactatacttgcaatatatacttacaggagtcctactccggtactttctactcggagtagaaagtaatctaggcccttgatcatatttaattgtagggttaagatctagttctactcctaccagaattagtggaagtagaaatgtggaggggtgtttttgtccaggaaaaataattcgcgaaggggtattattgttttccgatccatagatcgatcaccatgtcatcctcgtcggagttggtcgtgcaagatcttaatcgatccatgtaatccatgaaacaacacagtgatcagaaacggcaagaagacgaatgagccgagacgacgccgccaagcaaatgacattgcgtgcgtgcgtgacgctgccgccgaagcccaggccagaatttttaccaccgccagaactcctgctcaagattgtcgctcgctcggacgccaccacactcgtccgctcccagacggacgatgcgactgaggaagcagacaaggcggcgacggcggggaatacggatggcgacggagggggtggacaaggcggcgaggccgggggaggaatagcgaggtgactgcgtgcaacggagttcggacctgatacgatgcgaacagaagaaaacatcccatgccaaaattacctctaaacgatattaggagattacttacctgccctttaaaataaacggtcaagattaattctacttggagtagaatactgcaagtagattgcaccggagcattactctacttacagtataaacaatctaacagtgtgaatttatctgatcttctttttaccgtataaattgtgaagggtatatttgtttttccatatttttgcggaggatatttttgtattttcgcgttttattctttagtcagatccggatagtgagaaagggactcgtcccatactcccatgcgctaccaccgctgccgacagccaccgcgtcgcgccgccacactcgaacgctgtcatgtatggggagagaggaaggggaagcagcacagagcgcactggagcagcaacatcagctccgcagttgttgtgtctctctgatatagttgaacgagtgtgggtgattcttcagagttcaggctagtgtgcaagatggaggcagatgtgtgtcgttactggcttactgcatctgaacttatgtactgaatactgtaaagaaaaatgtaaaaaatgtaaaaatgtactgaatactgtttcgattggaaggaatcgctctgcctccacgctcgctcgtccgtcaacaatcgatccgccgccacgcgcaatgtattccgaagaatcactgctgctctagcccaatgtgctacgagatccagaacaaataccaactaaacaaccctttcgagattaactcccggtgcaaataaatcgcaaatttacattactaaacagccctttctatatttttaacaaatatcaaacttgccctactatatgctgcaagtatatacctgtagtagaatgtaacgtagaagttctctttcgcgaagccttgtatacatatttacaacacaaagatatgatgatatatgataccttagtaagtcagggacgaacatgcgaaacttccacataacaatatataatttgtgctgcatttatgacatcagacatatgtcgccaagccagatagagcaccaagtgcttggccaaagatttcaccaagctatcagcaagcaaccactactccttttcttcagttccacgttgtttgggagctgttctgtttgctgaaatgctgaattccatctcgttccaattaacctgctcaaatttgcactctctagagaatatgtaggcatggaaggtgtcgggaattcggccttcacgttgttcagtcttttgccatcttctgtcaaagaagtaaatgtcgttgaagccgtgaacaacgatcgttaattcaaaataagtagcaatattgatcaatcagagagaagataaggagctggaaactgcggttcggttcttgaagtttaaatgttgttctttcctctctctctcacttttaaatgggacaactaagcaaagtttattcttcatgaaaattatattaaatgttttccatcgtgtggctggcctgaacaaattcatctcaacgagtttttttttcttttattgattcagaaataaaaataatgcttgcggtatcctttcacaaattactgtttttggatgtatctaccaactatgacatgttttggccatgccccctagccacatttgagtaccaatataatccgagagattggggaccttagagccccttcgtggggccttgcaattgagccatcgaggtaggtgataggtctacagtttataggtggtggagtatttgggttattatgttgctttcggttcgaaatatttcaaaagccaaaattaaaaccagtcatgtactagctcaaaatataaaccaaacatcaaactggaaaaggaaaaccagtactacttcaggtcgttaaagctcggccttgggttcagggatgttttttttcccatccctacgtgtgctcacatctgagctagcacccttatataaactagatgataccccgcgcattgctgcggacatggtagagaaagtttaaaaatgcaataggagcatacatttgagacagaaaaagagaaaaactattaccatataattgactcgtaaaaactttataagcagtggtaattataagtaaggagtacacgatgggtgtctccactcaggtagcggttgttggccaatgcaactaacacaattgcagctgaaatatatggctattgaccggataaagctagtactaataaacaaaattgaaggccgctaaatattactggagagtgaaaaatatcatatattattatggtaaaaagaatgttaatttagtaggaaggaacatatataagagcacattagttgcatagctgatcaggaatacagtcaagtcatatagcaaacatactgaaacaccatcaatattttatatttaaacatctacagatatagtccaattatctacagacattaaaactattatgtaagaatgg

SEQ ID NO: 5621 - DNA, 32865 bp, Oryza sativa
tttgatttgcttcaaatttagtcgtcgttgttgaattgaactgctttaaatttatcattcttcgcaagtctggtttgagttttcagacataataagttgtgtatgaggtggaacctccagttaattgtcgtttgcagacaatgtttgtttctaataatttgcagtaattgtgggtttgcttatttggtttgagagaaatgtggcttgtttacatgttgctattgtagctttggatgccttcgaaataattctctataggttctgcaggatagccttcctctcaacactctgcagaagaaagttaacaaatcgatttatgagactttggtcaagaacagaagataaagctaagtttgttcgaagggttaacaaataagttaataattaaagctgctcacagattagcctaggaaggagtgtcttcgagtagttttactatctggctttctgttgctctaagatttattagtttgattttggctgatgattgtaagcataacaattcaggttaattgaatgcaagtagcattttgaaaaacccataattcttcatttcttcaagtttatgttagatgcatggtatgccaaaaacctgtaaagttttacgttttaaatacacaacacctttccccctaaggacaaggcaattagcaaagacatatttacggtggtttctactaatagtttcgatttgataaggtaatttgattagagaaaccatttagttggtgcgcaaatcaattcatgtctatctgataaggtaatttgatattttccccccagtggtttaagaacatactcctccgtactaaaaaaaaccaatctaagaggagatgtgtctcctcctagaacaataaatctagacaaatgtgactccttctaggacaatgaatctggactaccctcctaggacaatgaatctggataaatggtagtccagattcgttattataggagggggttaagtttttttaggacagagagagtaagatcaggaacagtttgttaaattatgttcaggatgcattcccaaataaaagtgagaaactgaacactattttctttttcggttatagcagtgaaaccggaggaaaatcccccgaccaaatcccagttctcgtggctgattttactgcaaaaacgtagctcatgaatagcagctgccaaatgcataggttctctgttatatttgaacaagctgaatttcgtgcacaattgcgcagagctagactaaagtttaatcatataactcttacgtacttctatagtaatgcccatgtagtaaaaaccacaaacatgttgacccagggtctacatgtcagtggtcgtagctacatgggttgtaccgcagatgatccgtttcctatatgatgaactgaaaatgcctagtatttgtcccataagaaaagcagagttgcaagtacgctactgctagctaatgctgccaataataaagacacatcgtgccaattaagatagcctatacgcgctaatctcgtgacttcatccccacaccctaatagttaccgtcagttttattcatggactaaaattcacaacttggaaaatcaatttccattaaaaagagaggtatatggtaaaccaaaatcaagtctcagatgtttgattactgcatatgcatactctcccccataataaaacaattaatcccctttcacatacatatatatacatgattattataatattgaagtaactagattttatagatttgagattaaaaacaaatgaaaaatatatggacacaaaaacagtgttttgtggttgtataggaaaatagcttcttcattttttttaattaatagcgccatttcagtaataaattaataattcatcttaactatattatactccctccatcccctaatataaggaattttgacattttgcttgtgttgtttgaccattcgtcttattcaaaaaaaatttgaaattagtatttatttttttacttactttattattcaaagaactttaagcacaacttttcgttttttatatttgcacaatttttttttaaataagacgagtggtcaaacgttataaaaaaatagtgaatatctcttatattaggggacggagatagtaattctttcactcctatgtaaagagatgcaggttgcataaacatccacgtattgatgatacataaaagctgaaactttttcacaataaaataaaacttgtgagctggattagattactaccagcaagaatgcaagataggtagcttactgcaccacacaagcttctttaatgctaggagttctgagggaaggggaaatcctatactttaaccacaaaaaatgtttttatatttatgtccataaatgtaaagggtacaatgtgttgaacgttgtgcatgaaacaaaaatacaaagtatctgttccaaaagtaaataacgtaaagtttccagtgctgactaataaggccaagaaaaaagatgtatattgtgccaggatgtgtaggcccaccaactcttgagcacgcctgagtttttccatgtacttctctcgtgatctggttgtttatagaagacccactcagtaaaatcttaatcctcgggtataaatctatatgtaccctcaacctcaattaatccatatgtagggaaataatggttgattattgcataatatcctttgaaactactaatttttgttccaaagtatatatctttactttaaaacttcattgaggttacagatataagtattggttaaagcatagactagaaccaactaagaaagttttgatgacaactattaatgcaataaatccccctaaagaacatcttataagaatccccatagcttgccctcctccccaattcccaatctctattcctatcttgttgctctcttcctcctctagtcccaacacctccacctccccatacaccccatgtctcaagaaggagccgacctctctcaagatgtcgatgaaagcccatatcacaccgccgttgtcaccaccaataatctggtaaggtcgattaaagcagagaaatctaactctagctctagctccggcaagcctgtcgagacagacatcggtttaaaggtagcaagccctactatgtttgggttcaacacaaagatagagggaacgggaaagaacatggccgtcaagagagaggaaggagaaggtggtggtcgtcctggcgtcagcagtggtgtcagcacacgggataccaacggaaaaggcaagaacgctatggacatggagcacgcgttgcatatttggacggagagagagcggaggaagaagatgaagaacatgttcagcaccctacatggcctcctccccaagatcccaggcaaggtcagcatgacatttctattttggggctattaaatcatgattgaaatgtgtgaaatatagtatttttttcctttgttttatgtgatttatctttcgttttgttagtattaatggctagatcattgttttattgcatgggtaaagatatatacctattcttttttatgcaaagagcagttgtgttctctatggtttgagtgtgaattaaaacctatgtaaaaccaatacactgcattggaagaacattatacgtgtagctttgatgttggatggagtttttctagagtaatttggtttatggaaataatgttgtgaatgcatctttgtaggagtagttcatattgttttgtcaaatatacattcataattagaatttgaccttgtattttagcatcatattaataaataccagcaattaaaacgttcaatgctagctgtaatttgagctccaataagaactttttaatgccacattatcttttcgcttttgttgaattttaacctatacgctagcttgttagatgtggtaaaaacatgtcatgaacttttgaatcaatatgatctggttgtctggaggatacacctacaagctattaaacaattctaattttgtacccttccgttttaaatgtatgaagctgttagcttttggtttacgtttgacaattagttttactatattaaaagaaatagtatgtaagtgtcatttattttgttacgatttctttaattttatcagtaaagttaatttaagtgtaacttatactttcacatatttgcactaaattttagaataaaacggatggtcaaaagtcaccaacgttatatatttaaaaatgtagggagtatgtctctttaccttttctatttctaaaaataaaagtaattgttctagaggacatgatagtttagttatgtttctatcaaaacataagaattacaagaaatttggaagaaaacaagaaacaaatataaatatgtaatgttcacatccttttgttataggttgcaaatgcaattgagaagttctatatatccttgatttaccaggatttggtattttccaattgttacaagaaaaaactgacattggatagttcttatctctttttagattacacggcagacgcgcgcgcacacacacccacaaatgggtcacctaacatatgctctaagagacgaaaacctatagcacatccttgatcttactaaatttatgttgaatgcacacctatatgtgcgtaatattcgtggacaacatgatttaaaccctagtgggtggagttttctatgaattaatctaaccaaccaaatttgatgtgtttaaaagcaaaatctgcattacagcatgtacatacatatatgcatatccctacaaaagcaaattaaacttgcggatagaacatggatgcatataacctgatgatcatgttgcagactgacaaggcctccattgttggggaggccattggctacatcaagacgttggaggacgtcgtccagaagctggagaccatcaagacggagcgcgtgcgcgcgcaccagtgggcggcggcggcggcagccgccgtggcagccaacggcggcggcgaggggtcctctcactctcactctcagccgccgcgccacgccaccgccgtcacagtcgccgtcgccgagcctgcgccggtggcggcggcggtgaacgcgcaggcgccgcagaagaaggcggcggcggcggcggcgccgacgctgcagacgtggtcggcgccgaacatcacgctgacgatggccggcgtggacgcgttcatcaacatgtgcctcccgcggcagagggcgtccttcaccacggtggcgttcgtcctggagaagcaccagatcgacgtcgtcacctccaccatctccgccgaccatgacaagagcttgttcagcgtccatgtccgcgtaagtgccattagctcaccgacgataatctcttccaaaatatactccccccgtttcacaatgtaagtcattctagcatttcgcacattcatattgatgttaatgaatttagacatatatatttatctagattcattaacatcgagataaatgtggaaaatattagaatgacttacattgtgaaacggaggaagtagttaacttctggctactttttagacaagcatttgtccagatgcatagtcagaacagaagttgttatagtttaggatggatgcagcatttgttcggatacatagatataataatataagttatatgtaatgtgagtaatttgttcattttgcttgtgtggttaagcagctcaacgaagcatcccttcagagcacagagggtctgacgcctgaagccaaatacaagctcgcagtgtcagagttgatggtcaggctcgccgaatgagacgaatttgatcgtcctgaatttgctgtcccccttgctactctcatcgaggattcgtactctcagcatttggaataactaaaaccagtctttgctttcagtttagtcgttgaacttgttactttttggataattcggttaaagtttccgaacataagtacaccaccaggaggtaaaagtgtaaaatccgttgatgttgtcgtcgtcgttgttggagttatagacatgttacttgaataatatagtgttgtttcttgatacatttttttttgaacgactcgcacgagacggtacgaagttctattgatagagcaggaaaaaattacaagatcacaaccctaaagggtcgtaaccaggaaaaaggaaaaatataccaccacccacacaccgacagctccaacacacaagaccgggagaaggctaacaccggaccggccgccgctaagcttgaccgactgccgctagaccaacaaagaaacatagatgagatcgcccaaaagaacaccctcacaaccaatacaaagccaactcctagagtgtgcttgcaccaatcgatcgagaggcttcggctaggggataccaaaacgacgtattcaagaagagaagcgatggtaaaccaccgccgccatccgtcggggctcaaaggagccaggactgggctttcgcccggcaaccacccttgagggatgagacagcacgacaacaccctcaagagggggaattccatcgttgtcggtccggccatggccaggctgggttttcacccgctgctcaccaccggcgaatccacggctgacgcaccaatgctcccaccacccctcaacctctgccgacatgtgggacccctgcaccggcgccccctactggctagccttcgagcgccgaagaccgcgtcacatccatcagcagctcctcgaaccgaggtcgcctccactgccggccgcgcctctcgcgtcaagccggcctcctccaccggatgcgcctctcgcgccaatccggcctccctccatcggccgcgcctctcgcgccaagccggcctccatctcctccgcccgcgcctctcgcgccgagccggcctccgctgccatcggttgcgcctctctgcgccaagccggtctccaacccctcctccaaacgctgccgcgccggctagatgcaatcgtctcctacaccctcggctagccgtccaaggccgccatacatcctcccacctcagccacggtgatcaccaccatgcctccttccaccgcagccacgttcgccaccgtgcctccacattcacagccgctgcaagccggccgctgtcgccgctgctgtcaccaaccgccaacaccagccgccgccaccgccaacgcggctactgcctcgtcgccctccgtcaccaccgcctctgcagtcctccgctgccgccatcgcggccgtggaccgccgtcgccatcgccgccaccggggctgtggacctccgccgcctgccgtcgccccgggaggaccggaaccggcctcacccctaggccttcgccttcgccacatccgtccacagcagcgcgcatccatcgcctccttccggccgccgtcgccgcgaggctcgccgtcgcttggcccctggatgcggggaggccggatccgccgccaggggaggcggatccacctccggcgtggccggattcgccgcgacgacccctcggcgccgcctcccgcgccgctgaccgccgctcgctgttgctcggccctggacacggaggggccagatccgctgccgggggagacggatccgcctccggcgtggccggatccgccacgccaaccccccggcgccgcctcccgcgccgcggaccgccgctcccgagcagccccggtgtccccgccgctggcttcctcgaggaggggagagggccccgccaccgccgtccttgtggccggtcggctttgccgacgcgccgctcgggcggtggcgaggcaaaggggaggagaagggaggaggcggcggaggaggatgaggcgccgtccgtgccgcccctgggacgggagcgacgcggatgggagcgatggaaaatgatgaggtgtttcttgatacatatgatacatgctcctatcataccattgagctgggggtaaaatttacttgtctatggttagatgttgaaattagtttcttttgcagaaggtaacaaacatagccacaagtaagctagccttcagcttgacactccaagggatcccatagcttcccttgccccacactatccctcttacaaacgggaagaagcacagcaccagccacccacaacacatgaattcgccgatacccggggcacagggcacaccttccgctgtcccgaaagctaccctacatgctccgacagtgaccgcaacgatgtttaacatcgcaagtgccgtcacggggatgaacaccggcaatgagtcgaaggtgaacctcccagggtcagcaccatcggtgttgtcatcgtcatcagacatgcttttgtccttgccggtgacctcaaaaacagtttcggagaggcctaaggacttgaggagcacggtaagaaatgctagtgtccaggcagagaccgagatgatccgttgcatcctatgattgttccaccatgcacgggcggagagcccgcacgccatgtactccatgaagttgtatgtgttataggatatgaatagggctaacgggacgctgaaaccatcttctgatgcctacaggataccaagagtataatagttcatccatatcactctctagccaaccaattgaaaagtacttgaaaaatataaggaatgtattaatgagtggcatgcaaatgattacctttggcaagaaggattggtttgtgagtatgcaataaggtcccaacaatccatagcatagctcaaaaggcgctctcagaggccacccaaggacgatcaggtaggcaagacattgccggaatttgaggcgcttgaacatggttgcgagaattgggttgttccggctgatgattatctcagattggccagttgcccatctcttgaactgagttaggcaggctggtcctccaatcggcgcggagcccatgaatgcgggtggttcggttaccatcaatacggatctccaacccatcgcgtgtatccgctgtccggtcaatatgtcttctgttagtgatccatagacccaaccaacctgattagaatatgagggatgaattgtatgagacttgcagaaaagtgtactgcactgtagcataacctacaaaaatatggcaatggaagttgtctttacctcctgtccccaacatgtgccaatatcatagttgcaagctgaaactgcttttgccacttcaatgcgacttgatatatcaaccattggcttagaggacagatcccaaatgatgtttcttgctgattcgttcaattcctctgagtttccaaacctggtatgaagctccttataagacgatgaacctgaagaattatgccaggtctctcaatttaagggtgtgagatggcatgattgatgtactcctaacaatcacatcagtgtatgcccaatttcacctatggtatcttctctctcggctccattgaagttcggtggcacgccataaactgctttcctacggtgaaagcagccggttccagcataaaaggcaccctgaactccttgaaccccactgataaatctctaaacatgacacaagatcagtttaacttatttggaatattagtggggttaataagcagcatagaacgggatacggattaatgaagaaacattttgtgcatagtaaattcagatttgatcagacaactcattttccatatataagcaaatgtacagccaagcacgacagctactccctccggttctataattcttgacgtttattttaaaaggttgatttcaaacaatcagaacattaaccatcgatagattaatactccaacatacagatgaaggcagaaatactagctactagcattgatcatcagtacactagctatgtaccttgaaaaaacactccatctggttcccaaatggatcgtccttgagggcgtcgtagaatctctgcggcgcctggacgaacccgctgctggcctcgtcgtcgaaccccagcagcaggcacatcgcatggaggacggcctggggattgttcacaaacatgtcgcagtccatgttcagcatgatcggtgcgttggtcatcacagctgacaccctcgtctgcacagagagagagagaaaaaaatgctttgtcactgcagattctacttcggttttcattagcatattttttaaaacggctaaacggtgtgtttcatgcgaaaactttctatatcagaattgctctaaaatatcaggtaagtccattttttaagtttaaaataattaaaactcaattaataatgtagtaatgagtttctcgttttacatgcccatatagcatgtttttaaaactggaaaactttctatatcgaaattgctttaaaatatcagataaatctattttttaagtttaaaatatttaaaactcaattaacaatgtagtaataactttctcatttcgcatgttcatacttaatcttcatcttcaataatttcgaacggggcttagtgagcagagaagttcatgtatcacgatgaggtaaaaaaatgccgaagagctagctattgccatcgaccttgacgatggtggggtgattcctcctctcgacgttcaagaactcggcgaagaactcgccgccgccgtgccggaggagggagcgctcgtcggtgttcttgatgcgccgcactaacttgtcatactcatcctatatatgaaattgatcaaacaagaaaatggccataaacataagatcatcggaacatgacgctgtgttccggattatttagatgacatgtaagaaactcgagaatattgacttttccaagtatagttgattgaccttcatgaatgtccagtcgtccaagaacttgcgatcggccgggccgccggactccggcgaggaggaggaggagaagtaccggaacggggccctgacggcgacgccgtaccggcggcagaagggcacccacgcggcggcgaacccggcggcctcccgcagcgcgtggcacgtcagcggcgagcacccgtcgtcggagacgtagcaggccagccgctcgccggcgcgcgggtagtcgagggcgagcagcgagagcaccgtgttcaccgtcaccagcggcggctccagcgccgggtccgccgtcgtcaccagcatgtccaccgccggcagctcgccgtactccgccgccgtcgtcgacggcgtcctgccctccgccacgaggttctccggccgcgtgacgaaccggacggggctccacttggcgctcacgttgagcgcgcacagcgccgcgaaccacgcctcgcacacgagcgccacgcgccacacgccggcgtcgcccccggcgccgccgtggtggcgaagcagccggagggcgaggagggcgaggaggaggaggaggacggcgaggccggccagccgccacgcccacgccgcgcgccgcccgaggggcaccctctcctgcagcggcggcggcggcggcttcttcctcccggacctcgtcccctcgccgccgccgccgcctgatctggtggtggaaccggtggccgccgccgccgccaccaccgccattgacggatcgatcgagcgacgaagcgatcgagccatgcgtcgagcgagcaacgcacgcggcaaccgcacacgcgcgcccacgccgcggcgcgcgcgtaggcgtagctagcgagcgagtacgtttcttggtttctcccattattatctactatagtattaaaaacgaaaaaaaatcattgtcttctcctcactccacgcacgcatcgcgggggcacgacgagagtatcgttttcttcaacacttctattttccaacatgcatgtgtttattctatcaccagtaaagtgtgtcgtcggtccttaactttgtttgttgagatttccagctactgtttccggtttgcaccgaccgttttagtcagtaacgataatcgacggtggtggaaatagaaacggtaatatcttccggaaatgggatggaggtttttccgaatgttttgtcggtaaccgtatttgtatggtaatttccgtcaaaattctaaaaaaattccgaaagttcctcggtggctcagttagcccaatccatcggatgcctatgaatgacggaagcctaataggcttgcagcccataaaaaaggggaagtgaccagggaaaatgttgttaaccctatgacgtggtatgttgatttcgtgaattttggtctcctcaatttatcgatgttaaagtattgtcgaattttgtttatattgttcgtcaaacttattatcgtatcattaatcatcatataacggtgtcacgtgcagagcgatgatgcaacaataaagttaaaaagtcatcttcgtgcatagttaaatgtgtgctatgccacactctgctaattccgatataattttcgacttccaaccaatatcggtatattccgttctgaattgttccgtttccgatataccgatattactgatatcgttaccgttttcggatctaccgttctgattctgttttcgagaaaaaaatatgaaaaagaaaatggtatagggtttttccaaccatcttcatccctaatatatatttttgaactctgaaaatacattttcagatctacaaatttattaaagcgtgtcatttcggtcctaagttatcatgaccactctagtatcctaagtgacgttgcttcgcatacgagcgccacgtgccacacggtgccggcgtgccacggtgccgcagagatgacttcgccaccaccgtcattgccggatcgatcaagctacatgcggcaaaggcacacgccgcgtgcgtgtagctagtcacatactttgcaccggtggcgtggcacatgcagaagcagctagcgtcgtatagtactggacacggtttttatctatccatgtaaacgtccacccaacctacgggccgttggatggatcataagatttggaatgtggtcctgagatcctaggtaccgatcgaattcattgggggagtacatgtgtacacacgaatcatgtggacatccacctaagtagataaaagactacctcgtatagtactcgaacatacggtgcactatgggggaccaaatcaatgggccaaaaaggaaagagaaatggccagtcttccacacatgtaaaacaaagttgacttattagcacatgattaattaagtattaccctaaaaaatttaaaaatatattaatatcattttccgaaagcaactttactactccctccttcccaaattgatcatcatgtaatagaatttaaaatttctcaaattgataatcatataactgcatggacacgaatttcatcggaatacaattaatataatatgcgagaatgtgtgcatgctacggtgtaattggcatagggttttaattgatgcatgcattgtgagagattgtgtgcatggtgtcttgattgatgtgatttaaatggttcttggtcttggtacataaacttatatgatgatcaatttgggaaggagggagtataggagatggaatagaatttcaaccgaatacacggtcaccaaccaaatactcttatatttctccaggggcacatcaataatacacatagcgggaacaacattttcccctcacaaacaaaacttagcctaatctctaatgccacatcaacattgcaaatcatcatccaatcaatttatacattttcattcacttccctgcatgaaaaaacatgccgaaactgaatatcccacagtcgtggcgggttttcgtcgaattggaatcctcgatgcggcgaattgagaaaaggtcagcagcggtggtggcagtgtcaccgctgtgatatcacggtgagggaaggaatgtatgaggctagaggctatggacccggtggcgacatcgcgcccgcatctccatgatgaaacaaatgaggacggtatagactatagaggcactcatcaagaggtggtggtgacacctcatcgagggacagaaggggttggggattgatgtattctatctagcaattggttagcccaatcgtacccatatgtaaccaaaagttatttagattgatacctgatacctggtggtacgttcttaagaatggaaaagcactcgtatttttataataatgtacttgtaggtattcggaataaagaattactctttgtttggaacttagggtctcatcgtttgccctagaaagaattagttgttaccaaaatttaaattttgaaaattaattgtggggttcattttagggtattttcaatatagttgttttcagcattggcttttaagtcgcaaatgacacatatgaaagcttttacctataaattatattttaatctctaataagttgttttagtatataatcagctcttaaccaaccgatgacgctcttagtggttgaactgctatcttatagaactcagttatgtttaccaacaacaccaccagctgaaagtgaaatactccatatgtttatagttgtcgtcatttgctaaatggaattacaaacatattgctcaaataatacatacatgaaacatgttaagctgactatgcttacatgctgaaactaatttctattggagcagaacaggaacaaggccaccagcaaactagccttcagcttgacactccatgggataccatagcttcccttgcccactagccctctcacaaatggcaataagcacagtagcagccatccacaagacatgaattcacttatacccggaccaccaggcacgtcttctgttgtcccaaaaactgccctccatgtaccaattgtgattgcaacaatgttcaacattgtcagcgccgtaacggggatgaacactggtgatgcgtcaaaggtgaatctctccgggtcaacctcatcgttttggccattgccatccgatgtgctcttctccttacgggtgacctcgaacacagtctcggagaggcctatggtcttgaggagcacagtaaaaaatgctagtagccatgcagaggctgaaatgatccgttgcattctgtggttgttccaccaggcacgtacagagagcccacattccatgtactccacgaagttgtatgtattataggtcaagaatagtgctaatgtgatgttgaaacaattttctgatgcctataggaacaagatattactgcatcacttctctgctcccaaccaattggaagtactaaaagaattgttcatgaatatgtaaaagttctacaaatatttgtactacaaaaactaattaatacttacaattatataagcaatgtaaagataagtatggagagagtacctttgacaagaaggattgatttgtgagtaggcaataaggaaccaacaattcatagcatagctcaacaaatcccctcacagcccacacataaagagtcaggtacgcaaggcattgtcggaattggagatgcttgaatatgctcagaaggagtgggttattctggcttatgagtatctcaaacaaacccgttgcccatctcttgaactgggttaggcaagctggtccacccgttggtgcgcagcccaagaatgctggtggttcggtttccaactttgcagatctccaacctgctgcatggatccgctgcccagtcaaaatgtcttcggtcattgatccataggcccaaccaacctgtagatatatggaatgacttgctatgaagcttgtttaaaagtgtagtgcattgtagcataacctacaaaaatatgacaaatgaaagttgtctatacctccagaccccaatgtgtgccactctcatagttgcaggaagaaacttcttttgcaacctcaatgtgacttgatatatctactattggctcaccggacatatccccagaaatgatgtaccgagctgattccttcaactcctctgaactttcaaacttgaactgaagctccttgtaagatggcgaacctagagaagcaaattgaaaagtctcgcgatttagttctactagaatgataagactaatgttctcctgataagtgataaccatcacatcactgtgtatgctccaacttcacctgcggcgccctctcttcctaccacaatggagtctggttcgatgccgtaaatggcttttctacagtggaagcaacccgttccaccataaaataagccctaaatccctgcaaccccgcctagaagtttctgaacacacgtactgcaaaattagtctagttttttttctatagatagaaatctagcatctatattcagaagtggatatatagtgtagttttaattgttactttcaattgggttacacaaagatgtactttcaaactttcactataagaatggataagtgttatcattaattagtactccctccgtttattcacaatgtaagtcattctagcattttccacattcatatttatgttaatgaatctagacatatatatctatctagattcattaaacatcaatatgaatgtggaaaatgctaaaatgacttacattgtgaaacggaggaagtacttcatatgtttcatatgacaagtcgctttgacttttttagtaaaatatttttaagtttaatcaaatttatagaaaaaatatagtaatactttttaaggcaaacaaacatatttgtaaaatatattcaatgttatatataatgaaatgaatttagtgtaatttgatgttatagatattgttaattttttttctagctataaatttggtcaaaactaaagaagattgatgaggaaaaaaaatcaaagcagtttataatatgaaacggagggaggaatacactggtagatgtattataacggacaaccacttgtgtacgcacgtaccttgtaaataacctccagcttgttcccgaaaggatcgtccttgaggtcgccgtagaaactctgcggcacctgaacgaacccgctggagatctcgtcgtcgaaccccagcagcaggcacatcgcgtggaggacgacctggggatcgttcgcgaacatgtcgcagtccacgttcagcatgatcggtgcgttggtcatcacggctgacaccctcgtctgcacacacaagagagagaaatgtacacatgttttcagtactaacgcacatctctgggctcgatctgaatctgactcccattacatgtcgatcgagctaacagtagatatcagtgcactgatcgagctagtaccagggcgttcatggcgccggccttgtagtgatggtggtgtccggggctcttctcccttgagacgtatatgagatgcgggaaccctccttcttcgcctatcctgttcttgctgttattatcccatataacctgatgatgatctccccgatatgagaagttcatgtcatgagagacaagaaagatttgatgtagttctgacatgatcagtttgaaagctagccatgtggggaatcgaccttgacaatggcgcggtggttcgtcctcttggcgtccatgaactcggcgaactcgccgccgccttgccgcagaagggtggtctcgtcggcgtcctcgatccgacggactagcttgtcgtactcactctagaattatacacaatcaatatgccgttaaagattaaagtgctaaagagattcgataatttaacacgttttaaaatgtgttttgattatttaacattttggacattttcatttactcagatggccccacatgttattctcacaagtatcaattaaaataattgggaaacgaaagaagtgttaaattataaaatttctctgtgtaagctgtggttatttctttttctcctttgtcattttggatgttagcatgttctcactctggtcataatatgtgttgttttcgaattcgtgtagtaatatatgtttaaactttgaccgtcaaattctatttgaacgtttcggttctacttttgaatgttgtatggttaattagatttgtcctgaataaaagtttcaaaatgttatattaacttgtatgtatcttttataagttttatacttagtaatagtaactgataattaatagtcaaactagtgtcccagtgactatgtcgttgtttagcacatcacgttgtgatacgctaaaaaaatagttagcacagttgtgcacctagcataccaacagggacgaatctggaccttggggcctcgcgtagctctattcttgacccataatgttatgggctagctcaattaaacctgatccgcccctaaatttatttagaataaatttcacagaaccccacgttattggggtatctattaacttcagttattgtgatttgttttaagaaatctcatattttagagtaagatatttcaaaaaaaaacctatatttatgtaaatactcatatttcattattacattattgtttttttaataaattcacattgttggctcaaaatacacatttctcttatctagtttaattgttttttcaacttttcaccgcatacaaaactcaccataatcataaccgataataataaatgataaagcagataacgtgtatatatatgtattttaaaaaagatctcaaacatttttatacaattaatatagataaatatattagtcggatagacgatataagcttgtagctgagtttcatgaaacactttgcccctaaaacttgaggtttcatgaaacaaattgtaaaacccgggttttgcattaaggatgccccataaccttcgattctgtgaaatttatttccctctatttcaggttataatacgtcttgactttggtcaaagtcaaagtatttcaagcttaactaagtttatagacaaatataacaatatttataatactaaattagtttaatcaaatcaataattgaatatattttcttaataaatttgttttgggttgaaaatgttagagcaaggataatagtatagctcactttctactattagtccatcttaaagctaatatatataatagattagctataagattagttataattttcttctcctctatctatctctcacttatatatttaatgtatttatcttgaaacttgtgttaagctagctcttgtattagaatcaatactcttgattttttttttgttacctctctcctccacgtaagcttatagtagacttatagctcattattatacttgctcttactattttttttttcaacaaacttggtcaaacttaaagcaatttaattttaactaaagttaaaacgtcttgtaacctaaaaactttggggagtatttacttatccagggatagcataaagccttaccttcatgaatgtccaatcgtctaagaacttccggtcggccgggccgaactccggcgcggaggcgaagtaccggaagggggccctgacggcgacgccgtgccgccggcagaagggcacccacgtcctcgcgaacccggcggcctcccgcagcgcgtagtacgtcaccggcgagcacccgtcgtcagagacgtagcaggccagccttcgccgccgccggcgccgccgccgcccgggtagtagtcgacggcgagcagcgagagcaccttgttcaccgtcaccaccggcggctcgagcgccgggtccgccgtcgtcacgaacatgtcgaccgccggcagctcgtcgatcctgcatcaaagcacactgtctccgcatgagatcgagatggccggagatgcacgacgactttctaggacgatgggcggcgccacaccttccggcgaggttctccgggtaggtgtcgaaccgggcggggctccacttggcgttcatgttgagcagccacacgaacgcgaaccacgcctcgcaggcgaacgccacgcgccacgccgcgccgccgacgccgcgctcctcggcgtcggcggcggtggcgcggcggacgaggagggcgaggaggaggaagagtacgacgaaattggccagcatccacgccgtgcgccggatcggcgccctctcctgcagcttcttctcctcctcctccttctcgccgctcgccgccgccattgttactgctaactagcttcgtcaccactcgagaagtcgagctagaagcagagctgcacgtctctcctctccatatttataccggcgtagctagcaccttcaatcaaatatcaatggcagccatgggtttctctggttgctcttgctcgatcgctggcgtttgtcgcgtctccacgggcgccgtcgatgaaccgccgcgtgacgacgtcgcgtcgagagagaacggccggccggccgagatcaatcatcgatgtcgagtaataattaatttctcttggggcgatctgcacggcctgcatgcatggcgtcacatcgtctggcctagctctaaaacgtagcgatccgatgaccagaaaacgagcagtaattactgagggagatggattagctgcgacatccccttatctcttactcccttcctccgtcatattttaagttatgttctgacgactttctatgtccattgtataattgttcgtcttatttaaaaaatttattaaaagatttagaaaaacaagtcacacataaataatattcatggtttatcacctaataacaataaaaagactaatcttaaaaaattaaaataaaatgaattgtcaaacgttgaacgcaaaaactcgcaactgcacttaagattaggggtggaatcgagccgagccaggcttggctcggcttggctcgtgaaagcttgacaaagaagaggatcggcttggcttggcttgattaatgaaacgagctaaaatagcagctcggcttggctcgtttcaaagctcgagccaactcgagccagcttggttcagatacaggcaatgaggtgatggacggcatcaacgccgtagaggacggaggcggtagaccggcggcgctgggaatggaggcgacaggctggcgacgctgtagatgagggaggccgcggaccggcggcgttggccgctagggatggaggcagtgccataggggagggaggcggcggaccgacagtgtagcggagggaagaggcgccacaggggaggaaggagacggtgcagcgcagcgcctcgatgtcctcatgcggtcgctgcggactcgcggtctcgcgtagtgggaaggggagaagacggctgcctacgcgtggggtgggtgggagactgggagaataggttaggaacttagggtttttgatgggccttgggccacaacagcgacaataatgtgctaggccatttttatgcaaaaagcttgacgagctgaacgagcgggttgcgagctagcttgggctcagctcgatttagaaacgagctgcgtaggcggcttgagcttggctcgtttaggtttcaagccgagccgagcttttgcgagctcgaaccaagcccgagcctgctcacgagcccgagctttttgtccacccctacttaagatgttatagagtgggtatatgccatctaaatagttattatttctttaaaacagattaatgagaaatgtatcactccacaaacatgtaggatcaaattcgacttctacaagttgtaacaaaaataataaattaaattgcgtacattcacggttatatatatttattttttttacgacttatacaagttcaatttgaattcgcatatttatgaaaggttatatttcatattaatttatcttgttaaaaagaatttcaatttttgtaactatttaggtgaaacaaggggatatcttctcgagagatgaaaacacttttccattgttgagtggtcataatgcgaaaccccgtagttcatgcgccgatcgagatgtgatcgtctaatcgagatgtgtggtgttgaaccggtgtgatgcttcttgatgcttcatccatagacaaattgcacgaactgttggaattattacgtggaatatttcaacatttatttttgtagtgtagtcagtttggaagtattgtgtgatagggaataactgatgcacaatgtaacatgagaaaattgttactcgtcgagggtgactgtgtgcacaatgtaacatgagaaattgatactggagatatccagggcgactatgttggaatatagtagatgaattacttgagatacactctactacaataattgtcgtacacatacgtgtttttttccctcgtcacagggtgaaatagatgtgtttgtttacaaaatcggctctattataagctgttgaccaacatgatcatattgaaattaatcttatatacaatatgatcatgatacatgactcacatatgtgtgctagggacttaggtcctgtttgattcagcttagaattattataatatgaattattaagagtaaactgaaacaaacagatagcttattgtgatagtttattataatctataagctagattactgtaatctggtaatccactctaaaggtgcttttttaaattattaggtggctaacagctaacaaacaactaataatccagagaaacaaacaactaacagtttattctatgtaggcttattataatccagcttatagtaatctggcttaataatcttaagctgaaacaaacaggggcttagtcatataactgaactgtctgatcatggttggtgacatggttataagaagtctaatggtctatcgaaaacatttatagtgtatgtatatatgtgtgtgtggaagtggggtccataaatatatcgctaccctctactaacctcataatgtattatgagcggtccacgaaattgatctagaattaaaagcctaacatgaaccaacatcatccaaattttggttgactcaagcaggtaaatatactagctttaggttatgtacaaatcgactcgatggctgagctttttcacgcacctaaaacgagcatagctattactttcttaagaaacttctatatgaaaagtcgaatgaaataaacggtcggtccttaaatttggaccagagcatcacatagatcgtaaatgaggaagtactccagcgcataataagttgtttaattaaaacatagccagtacaggtagccactacaggaatcctggattacatcgggataatagtataatacattagagcatggtgatgtcaggtaaattctaacagtactagcttgtcgggaaatcaaattaggcctggtttagtttaaaaaaaaattattttcgtgatgtgacacccaaaaattttcttttagtgaactaaacaaggtcttagcttggcatggctctgtcataacaaataatcctaacggtgttaaccgtcacaataaatttttccttcatatcatctacaccgtcgggtcgtttattccaatctcaatgacttgtaatacgcatttaatcaatagtctcacgtacggaacttaaattcaaatggatctaatataactatgggaccgtataattatacgttcaaagcgtaaatatctttagaatataatggacgtacgtagcaatacataggatactctccacagaaatttttcctaaaagggaaaaagaaagagtaaattgcatccacggtgcatcaacttggctgatggatgcaatttggtaaaaatgagcgttctagtgcaacaacttgcaatgtaggtgcaatttagtataagaactttataagtgatcgtataaatacaacaacttgcaagataggtacgattttgatacaataaattaaaaagttatgcgacaacttaattattttgagcattttttaataaaaattcaatttgtaagtactaattttgacaatatactagcgcaaatttgtataagtatatttatatttttatcctaataactaaaaactgaaagccaattaaactagatgtagaaattattatatttggttgatatttgagaaggtgaagaaaacaaaaaaaatcttaaaggtaattggatgtaaactgtattactatgtgcagtataattcttaaagattaaattcaatattataaggtaatattcatatgatttttttaaattcaataccttataatattaaattcaatattataaggtaatattataaggtaaaaacattgtgaaaaaaaaactcacctttcatatgcttagcaaagttgatgcaccaaaatactaaattgttaagttcttgtactagaacgcacccacttgtcaagttgttgcactcggacgttcaattctcaagttcatgcactatatcgcacccacctactaaatttgtatcgtgggtgtaatttacttaataaataatgtatagacgtagcaagctgcagcgttggtatccatgtatctctccgagatctctggcgtagcgactacttctgttatcgggcgttcggacatatgcatatatggctgtgtgtacaatcgatcgatcgacagaagcgatcacctcggtgtggacgtctggatgtggtcacgccgcatcttggatggacgtttgtgtttctgtgtgtgtataaaggttttataccgaatgtttctatgtgtacttattttagatgtaaacaaaaatagaaaaaaaatcgaatctgacggaacgtggggctcctcaccgggagaccgcgcaggcccccctttgccggttcggccgggggcgctaagtgagattctttgccctcgatctgtggaatgttcgcgagagagagaatgcacgagacacggacgatgtagacaggttcgggccgctgagaaacgtaataccctactcctgtgttctggtggatctatatatgaaggagttacagagagctggagagcaagagagtttaggctatagaacctctcctcctctttctctcctctagagctcccctatttttgttcttttcttccttccccctttcttttttttcttttctcccttcctctttttttggtgggcaaggtcctccttttatatctcaaggggataccacatgcaccacttctacctactcttctttttggtggggacccaccctatcttgaccaaaatcacagcttgtccttgagtgaggcccagcgccgtcactcgcctgacacaggggatacccctgtcattcctccattaatgggcggagatttgcaatggccgctgtccgaatgaccctccgatgggatgggtcatacctacttccactccgccggaagcagatgcaatgtgggagcacggttgtctgccgatgacgtaaccggcgtcagaccagtcacagaccggtcattcttgtccaccacgcgtcagtttagcatgccgcacgtctgtccttcttcatacaatgacttccttgcaatggttgcgatgaagcctagaatgaatctggctgggactgacgtgccaactccaggagttcccacgccggctccggctagggacgagtgcctggaggctctcattattccgacgggacggggcgaggcgagtgaaaaggccgcctgctgccacctaacccacgatctgaccggtctgtgaccggtcatacgctgcgaccggtcacggaccggataagcgtgcgctgcgctgcattaaatgcagcgtggcgcgctcgtataacccgctataaatgcggttaggtgagcgccgctgtgctcacctaacccacacacgtggcgccaacaccacagggggtcggggcgccccagccctcggggccgaaacgggagcggcccgacccctcggggagacagagggtggggtgtccacgtcaccctcgggcccaacccccctgagggggtcaggccacgtgggtgagggcggctgcccaagcctctagtcacgatactcccggtcccatgtcaccaacagaatctaattcataggagtgatgtgaccatggctaccacggatacaaccattgctcacatcatggatgaacaagaagatatcgagatcaagtactccaagtgctgaaatccgattcggccacctactacactgctgacttcaaacggccaccgaatctgcatacgacctccgttttcggcccgtgagtacttgatggaaagctctcggagccctctttctaacggatccagcctcttctctaaattccatctcgtgtggccggaatcacaggaacaaagtgatgcgtcacctataatgggcctatgggcttgtaacttcttttgggaccccgacccaggtggggcccatgtggggtgcgccccaagctggtggagcacgaccctaggcacccctaggtcatcctcccacccctatatatagctagttacctcttcagggtttctcgggttttgattaattgtaagtttagccattgctacttcgcttgcagcgcgcgtgtcggctagaccgtccgtctgcttgttcggaaccccactttatcgtgtatcaattcatctttgtgtgtcttgtctatctagcaattcagattgcttttatcttgttcttgcttgtttcttcgatttgcttgcaggaataaggttgatttgcaccggcaagatcaacaacccacagagaggtgtatcgatcgctaagacgcaacgcaacgtcttgtacggttgtagtcgggtcgtcaacgtttctcccaaatcgtagttattatcaactcaccgaaagatcaggccaacaacagccgtgagtgtcgagaggaactcagggttcatcaaggagtatcccttccccacctctccttcctctctttcctttttagggcgccggtagcagagaggacgggagagcggcggtcagccagagcaagggagggcaccgatggctcctcacctcttctctccctccctcctctctctctcccatcactggtgctctgagtccagctcgcctatgttggtagcctcgacgagaggctcgtgacggtagatgaggttcgtgtggcccttgcccattgcctccagaccgcgctcgaagtgggtgcgccaaggtcaacaaagccaagaatggtgcggaaggcaggggcttcgctcatcagcggggccatttgaggcaaggagcgcacaaaaggcgatgatcgccgctttttaatacaccattctacacgaggccgggagggcagcgatggcaaagtggggaccgcgccatccagctccttgttatcgtcgctgcctcctcgattgccgtagcatggaggagagtaggtggcgacaaagtagcaacaatagcaaaagctcgacagccaaggaagtcaccatgggaccccgtgtagattggcaactatggtgttgactgaagaatcgattcgggtactgcaagaacccatacctctactatcatgcaaactctgtcctcaatgtatcctcttgcgtgcacggacgggtgaccgagcacgatctcgtgcaggactcatccggctactggtgccactgcttccctttgtactgggataggcagtcgtgcggggcaaagaggcaaccgttttttttatttttagtttcttttgtcacttacatgtgggtcccacatgtacttttaaatttcttcacgactaagttgtcacgtggacatcaaatcagcaaaaaggcaccatcaataccatcaaggaagctattttacacgattttagtagttgaaggagccattatatccggttttacggttgaaggatacgactcatatgatccgacctatatttgagggaatccaattggactttcccaacagaatatacacgctatatcatacatgggctttggaatgggctcggtctaacttggactccgtgcgtgcacatgggctcttacccgttgtgggcctaatatactcatgttcatgggccatctgatcatcaagaagtcatcggaccaggagtccaggataaagggcttctttggcatgcaatcaggtactacgaccattctacaatggctggcccctttacccggtaaattagcatgcatgggcgatccatgggtagagcgacaaaatatgtagtgaaaattaagaaactatgatctgaaaattgttcgtgtcatgaagagtaatggttaaatttgcgagtaaaatttatactcgtgatgacgtagataaatcttagacatattttatttaacgaaagttttcaggttttcattttattcgtgatttgcattacatatttttcccggctagagtagtgcaccatccatgaacgaccgtgccatcatggtccattatccatgtggactagctgaaggctgaagcagtagtgttggagtatcttttttgcctacttgtttgcaggagttattgaaacctacatacgcttccaagatcaatgtccaattattagacatcgaaggacacgaaaagattagtatatgtatggaagcatgcaccgaacatagtgcagatggccccatcgttttggctcattcatcaaataaaccaaacgacatatttacaaataaaaaataatttattaataaaacttttatatacgtgttcttagcgttttaaaaccaaatactgaaaaataaacttcgttgaaaaaaaatcccaaaatcaactgcaaatttatggttaaaatttaaattttggcttatatgcataattataagcgaaaagatgaaaaataaatgaaacaactaaaaataattataattgacttgtttatgctttagaaatctactccatctttcaaaaaaaagtccaaattcatatcattggactttattttacaggaggagtaagtctgaaaaataacctatgaagaaaaaaattcaaaatcaacttaatttaaaattaagttttgaagtttaaattttagctacggtttgtaagccagtactccctccgtaaaaaaaaaccaacctgagaagtcacatgttgtttttttttttactgcagcagccggcggtactcccgcctccaggacgagatcacgcagcacaacaccaagatattagaatcctcgacctccgcgatttcagtttcttattttgcagaaattcaggctctaaaaaatcgaaagccacacatccagagttaaattttcgatcaaaaacctccacgaggtagatctccttgatatcgatcaaacgagtcctgtagtagtaaatttatttgtactttgtattggtgtattttcgttttgcgtctaacatgtaatcgcaaaaatattttatttttattatatatattataatagaaaacatagtgaaagatatattttgaaaaccatgatattattcaaaacgttaacaattatgaaagtgaagaaaataaaggatttacaaatatcacacgatgtacggttattggataactgtaataccgtcataccgtgaggcaacgataacccttatcaagacgacaagggaaaccatgctactaaccacttaaccagcaaccacctgtaaaaaaaaaaagcaaccaaaattttttaggatctctgttctttaaaaaaaggaataatcttgtagatatgatactacacctgttacatgtaatcatgcttgagtccacttgctgtactattgtagctgttgtaatgttaatgtatcaacagtaagcattaactaatcaacatggtccactgaactaggagtagtatagtatatcattaataagccatttgccgatcgcttcaaagaacaggggaatgacgcttgtgatctagcagtgcaaaggtagtactagcaatcagtggcttgtactattgggaccaagccaggtgtttcattcgtcacaacaggcaaaaaaaaatcgaagaaaacgaagtaaaatctccggataaattaagcgcacatctgtccactacctagcttacacgtgtccctttttcaacgtcgctctccagcttgattcttcgagcaagcaacccctccccaggtcgttcctatccggaaaagaaaggaaagacagggaattgctttgcagcaatgtcattagtttttcattcattttcagtcgatttctcgtgtttggatcgacattttcatccataggccggtgatgcttgtatccattgtttcactagagttttatttttatgagaaaccctatgttgggtttaattacttacttcctctgatcataagtactgtattaaacatttaggataaaattcgattagaaattttaaaattttgactaataaattttattacaataattttagcaaatataataaaattatgatgccgtaataatacttttaaagaaaatctatacatataattttttaaaagataactacatactccctccgtcccataatatagcaacccagtactataagatgtctcatccggtactaggttgctatattatgggacggagggagtattcaaaaggctattgatagcttaagttttaaaagtttaaacaaatattattttacattttaaatatttatgatcgaaggtagtatgttaaaagagatgtaagatatatcatatgtgcaatgagccaatgacccatatgtagctaggggtgggcgttcggtctacccaaaaatttcgatctcggtcttcggtttttcggtcacttcggtttttgaaaagtcaggaccgaatttcatccaaaaaatcaggaccgatgaattcggtctcagtctcggtcagaccgaatttggaggagccgaggcggagtatggagacgacgccggcgagatgtggaggcggagggcggaggtggcggcgcggcgcaatggatccggcggccggcggcccgcacgaccggcgaggcggcgtggaggcggagggcggagacgacgccggcgatgtggagacggagggcggaggtggcggtgcggcccgatggatccggcggccggcggcccacgcgaccggcgaggcgacgtggaggctgagggcggaggtggcggcgcggcacgatggacccggtggctggcggcccgcgcgaccggcaaggcggcgtagagacggagacggcgccggcgatgtagagggcggagggcggaggtggtggcgtggtacgatggatccagcggccggcggcccggcgcgaccagcgaggtgcagtggaggcggagggcggagacgggtggagcgatggaggcagcggcagtagtgcggcgcgatggaagggagggtggcgcgatagggatggaatgggaatgcagcctggatggatgagggtggcctctagggtttagtggtgtattaggcttattgggcctcctggacctattgggccacaattcagttttctcgattaattcagttaaccgagcctaataaccgaattacccgaataaatttcggtctttgacatgctgagaccaaattactacacgaatttctcggtctcggtcttttcggtctcggtcttttcggttcggttcttcggttcggtcttattttgcccacccctatatgtagctgaagaaactagtctagagagtagagacgaatggaaggggctggatggccacatgatgtacatgccagaagtacgtggagaaaaggccgtgcgaggtatgtcacacaaggacaggaaaatagaaggagcatggttactgacatccaatgaaatatatggtgtatgtgccaatgtgaaatcagggggcgatcacctaaatatgcatgaaaatgtcaaaaagggagacgataccatagatatgatctataatatgtgcatcgaatttgatatgtcagcctaatattcgacttaaaagtacttttaggataagtgttactttttcttactcttagatatatcttacatttttgcctttaaaaaatgatttttttttccagtgacgactaaacatgaacaccataagctccatggcaaatacacgatatgacatagcaaaaaggttaattcatccgtcccgtaataagtattaagctgcatgcatcgaccagttcaacccgaaagcttaagctgatgaggaaagacagacaattcattttatattccaacactccccctcacgcgaggcgccctcaatccagccaggattcgaactcgagacctttggctctgataccatattaagttgcatgcaccgaccagttgcacctaaaagcctaagctgatgaggaaaggcgggcaattcactttatattccaacaataagttcattttagctcattccgtttattccaaaataagtttatttttagagcaattattacatccgagtttgtgaaattagaaaataattatcttatcaggagtagataaagtgaggaatagttgcattgggatttgataaagtggagtttaatatttttattttgtattgatacgtgtaggataagtgaaagataaacttattttggaacagaggtggtaactaggtgtactacataatttgttgttcaaatttttactgtggagccaagcacaactcccattttatagtcttagtcgccctctcaagaagaaacaatattttgggatcctcttgacaaaatcctaatttgtgatggataaagaggaaagaaggatagtggaagcaccatgaatgctacagttgtttttgatgctggaatttgatgggttgcttttgaccattactcggacaaacttaattcatggtgaaagtgatatagcaaatgtgaaaaaaaaaacagagaggatcagtcctcgatagccatgaagactagcatgtttgtgccaagtcattcatcgacaccacacaagttgctatctctatctcaaaatgttactatctaattaatatatagaatgtaatatcacctagtattataaatataaacagaaaaagattcatccagattcaaatgaacatatatgtatataactcaagtgagtgctcttggctaactttttttttaatataataagttcccaacaattcctacggtggtgcatgcagtccatgtaagaaaaagtttgccttttgatccatttgcaaggcccctaccaaatttctcccctgccacaaaaaaaaccggtgttccacatgggcggctggatatgcactctgccacacgggatccgcgaagattcctgcgcctcgcgggaagccgccactgacaccaaccgccacctctccatgacagcgggtcccacggaatcccgggcccaccgccacgtgaccggggcttagagcaagttcaatattatagcccactactatctctaattcatctatagtcaatctaatagccaattcatataataattgttaactatactattaatatattgtttcacttgtcatacacacattacgtcttatagtccgtgctacagctggctataaatctatagcccg

SEQ ID NO: 5622 - DNA, 29048 bp, Oryza sativa
gtggtaattataagtaaggagtacacgatgggtgtctccactcaggtagcggttgttggccaatgcaactaacacaattgcagctgaaatatatggctattgaccggataaagctagtactaataaacaaaattgaaggccgctaaatattactggagagtgaaaaatatcatatattattatggtaaaaagaatgttaatttagtaggaaggaacatatataagagcacattagttgcatagctgatcaggaatacagtcaagtcatatagcaaacatactgaaacaccatcaatattttatatttaaacatctacagatatagtccaattatctacagacattaaaactattatgtaagaatggtagaaaaatttcctgcttagtataagatataggagttgggaaacgaattaccttgcatatataattaagtacacacccttgattaactccttggaggagtgttcgaagctttcagaaaactccaaaaatatttttatatcaccaagctgatttagcgtgacaaaagatattaaaaatatatcttgagtatacatctacatcagaaaagaaaatgaatccgaccgcattttctgcgtagaatctaacatcgttcttgatggggactttgtgaaaaaacacatctatagatgtaccgagatatatataatttcaccagtttaagatcataattaaaatactgaaaaaaaagctccatctgcttagcagcccatatgagtgttacccagctcgatgagttgcattcttcttagatctgatcggtgacaaattaaccaatggatgcatatgatattatttgccacttccttcaaataattcaggacaaagaaggaatatgaatcaactaaatcagtaactaaggacctgaaacctaggaaaacaaaagaggatacagtaataataaaatttgttaagacaatcaaactgagcaaataatgctgctatatactgaatacgtcccataatgcaaaactgaaataaatattcaactcatgctggtacaaatcaaaatggtgtatgaacaaaattagattgatcgaacataaggaaagggaaagttggtgggtagcctgtgtcagatcattggagtgattgaagaggataaccgggtgggagatgcatatcaatctagcaagcagaattgcaagaatagtagtaaaacgccaacagcctggtagaatagtagatcgataaataagtgagatggcaaattggatagagaagcagaacttataaagggataagatctaggagaagaaaagtcattacgccattaatggatttacttgataatagtcatgaagtgttctcctcggtggttgtcgacggtttccgttcgtcacggcacccataactccagaagcattggtgcggaggagaagcgagcgcgggcccgcagcgcagctcccgcgggcacgtgcggtgcggaggaggagcgcaggggtgaaggagaagggaggcgacacgagcgcatctggcggcggcagcggtagcacagatgggtaggtgaaagaagtgggctgggcttcacgcgttaccgagcatccagattagatccaaaggctgagattttacaggtgacgtggcttaaccacaattcagctttgggtcttaactatatagaaagaagggataggggaagtaatcggtgcagtgtatacatgtagttgtgtagatgagatgctagacatcttgtgaaggattttgttcacttgtcaagtgctcatacgcatgacactctaccgaaataggatatggaggcacagggaatttatgtgtcgccgaaagcttttggttcttatccatggctctggagaggaaaatcacttgccaaagaatgctatcagatccggcgctaagctgacctatccttcagacttccagtagcgcctagctagccagcaatctatgttgccgtggaatcggccggcttcgacgacgaccctcacgagccgcattcgatcaagtgctatatggattgcttgcaccacagcctaatcggcgatgaccaaatcatgctaattaaattgatggatgtggttaagacacaaggacaacaataacgaagattggtcgttgttgttttattaactatatgtgttaatgtgtgtgatcttgaagctagattttttatatatacacacacacatacatgtgtgtgtgtctatatatatatatgtatatatgtatatatatatatatatatatatgtatatatatgtatatatatatatatgtatatatatgtatatatatatatgtatatatgtatgtatctatatatgtatgtatgtacgtatgtatgtatgtatgtatgtatgtattagttcatactccatttttatttgcatttagtttccatgtttgtctttgacatggtattgtattcgaaaacgctggcacctgggcgaccggggtgggggtggggagaaaataaggtgatcccccccccccatgcgcatgtgctcccctagggccccaccatgtatctccacaaaaaatgtttcacctagtgtactcacaatgtttcactatgtatagatataatgttgcagtgaattgaaacattcttttacaacaaatcacccacatattttggaaaccctctattaagataattcgtttttttttgttccaccaaaaatgtttcacctagtgtactcacaatgttttactatatatagatctaaggttgtagtgaacagaaacattctttttgctatttgctgaaacattgtttttatataagatgaaacaacgcccgatttaaacgattgaaacattttcgatctacttagtgaaacaattccaatatacttggtggaatatcgtgcaacatttaaaaataattcaataattaataagctaaaaaaatttcgtcggaatatatccatgtgtggtcttgttttaaagatttaattgcaacaaatttaatggtgcaatcggatcatgatttggataaataatttaagagaaaaaatagtttaaagtgatttgcacgaatgcgtcttgctgacgtcagcgcctgatttttcccccctccccatcgggcgcccgattctaagtcgtgtcctattgtatttgatggccgcaattttaatttcccttaactgctccctctatttcatgtaataactggtaatttttgttttggaattgtttggtttgactaccgctataaacatatgttagaatgaaccttttcactagcttgtttacaagactacaagaggtagccaaggacttgcaacatgtcaaattgtccatgttagcttaggaacaagtggactgcatgctaggtgactcttatacatgtggaaatttctctcgcaaactaattaagaatgttagccgaagaaataaaaaagaacctatatgatatatagcatgcatttccattgcgagaatttgtgataatatccaggcgtgggaggtgttgggaacttcgcggcctcatccaatcccaattctcgcaacccgggaaacggggaaagcattctgctactttccctctctgaccaggcaaacccgacagtgttggtggcacatatgactaaacgctcatatgtctatgtaattgcagtgttggtcatgttaactctgtttgccttcaatcgtatgtgttctacaacccgagtgacatccagattaggagggatccaaatgatgatgtgctttttagttttagtttaagcgtttgatctcgtttcattgctttttttaatttgtcagttgcatgcgttgtagcagtgttacgactgcttctacatgcaatggttaatttggttgtaacatgtgttttgcagtggcacatataaacctttgagaaaagtttctttcttttgcaggcataattttacctgaaaaaaaattactacttgatgaaacacaatccaaagtgaacagaaccacggcatttgaatattactcgcaataaatggcgaaaaccatgaattcaaccatattaaaggcggtacaagagtgctatatcgtggaagttgtaaactactccctccagtttcatatttcctatgatgtgaccatggctaccatggatgcaaccattgctcacatcatggatgaacaagaagatatcgagatcaagtactccaagtgctggaatctgattcggccacctactacactgctgacttcaaacggccaccgaatctgcatacgacctccgttttcagcccgtgagtacttgatggaaagctctcggagcctctttccaacggatccagcctcatccccgaattccatctcgtgtggccggaatcacaggcacaaggtgctgcatcacctataatgggcctatgggcttgtaacttcatttgggaccccagctcaggtggggcccatgtggggtgcgccccaaccaggtgaagcacgcccctaggcacccctaggtcatcctcccacccctatatatagctaggtaccccttcagggtttattgggttttgtttagatgaaagtttagccattgctacttccttgcagcgcgcgtgtcggctagaccgtccgtctgcttgtattcgaaaccccaacttatcgtgtgtattcattcctatttgcaattcagattgcttttatcttgttcttgcttgtttcttcgatttacttgtaggaataaggttgatctgcaccggcaagatcaacaacccacggagaggtgtatcgatcgcaaaggcgcaacacaacgtcttgtacggttgtagtcggatcgtcaatgtttctcccaaatcatagttatctcaactcaccgaaagatcgggccaacaacagtcttgagtgccgagtggaactcagggttcatcaggtggtatcagagctttcgttgctcggtgagtcttcatcttcctataaccagaaaatagccatacaaaaaaattcgtatcatttacctaaccatattgtgccattgcattgttcttttcaatttttgctttgttgaattttgtgttgcatcgtcacgtcgtgttgctggtcttagcgtctagttcgtttagagtttcaagttctggtcacgttttgtaccacagtcgtcgctgccaccgtgtctctgttgttgtcgggacctacgaaaatggaatcggctcgctgccacggttctatttttgtagtttctagaagtttctgtcggtcagttttgaagttgcatctagattttgcttgagtttgtagtttggccgtgagtctgtagttctatcgtgcttgtggggaggaatcggttttggaaatatgcaagattgatcaggaaggaaatagtagattggatcgtttaaaaataagtttctgtttttatcctacacaagtccggccttccatatcacagaggactgaaccactctatcttcgccatcctgtgagtccgactccctccctctctcacgtggttcctcggttccgagttgtgttaaacacattggtgaatttttgtttagtgtcggtttcgagatctgtttgcaaaaacagaacctatgggatgagcgcattccatttttgtatagtccaaatttttgggtttgcacttttgcatttgagtccctgtaatttgtatatttatagttgagtccttgtaatcttgcattaaggtccttgagttggtttttgctgaaaaaaaaattaaaaaaaaagaaaaaaaatgcagaaaggtgctaaaaataaagaaaacaaaagccgcaccaaaaaaaaagaaaaaaagaaaagaaagaaagaaaaagatagaaaaagaaagaaagaaaagagaaaaatcagttgtatctttgagtttgctttcacaaaaatactgttatgtttgagctgaacttcatatatcagagttgtgcatgagttgttcctagtgctatcttgtggtatcgtttgtgtctaggctcgcgtctctagtacgttctagcctaggaccagcacggtacttgactttgaacaattattcaactttgcattatctgatttgagcatttgctattcctttgctacatatttaagcctacctagagctccacagatttgattgcagccgtacagcaagtgtttgccaaggcatcgatacatccaacctctattggggtgcttgattgagtcggtgtatgtcaccattccgcttgccttggtaagatcttgtaagagcttagttaaaagcttgagtttgtgtgatttttgagctgccactatctagtagttaataggaacgcgcatatttttgtgtatgtttcttgtttgctactaaccatggcaggattgtgcccgcggaaacgagatggtcatgctcaacgtcaacatcttcaccatcaacgagatatagcgacttcttcacgcatcacatatgaggtacatgataatgatcttacaagggtagaatctaaattgcctggttttgatggtaagtatgattccgccgcttatgttaattgggaactagcagtagaaaaacaatttgatgagtatgatttttctaatgctcaaatgattaaggctgctagtaataagtgtaccggttctgtgtctttttggtggcatactgtgggaaataagcttgaaacttaggatgaatgcaaaatactgatgagaaaaagatttgtgttttcatactatagacgtgctctccttgagaaatttgaacatctaaaataaggtgacaaaactgttagggagtactttcatgattttaaaattggtatcacttatagtgatttacaagaatctaatgagaacacaatgactagatttttcagatgacttaattccaatattcaggctgggcttgttaatgtgacatataatcatataggccaattgttcatgcttgcttgcaatgttgagcgcaaaattttggagaacccaacggagcaacaagctatgcttgtgcctcctatcactgatgttttgcaggaagttcagaacagtccccaaaatgagaagaacgatatgtttgagatgtcacttccttcactcgcgaatgaggagaaggctaatgcacctacattatctgaagagggcataaaaggtaaattaaatggtgcagaaattactcaagatgagtatgcttctgatgaattacatttttccactttccatgctgatctagagcaaactttagtggaacctacttctgaattgcctttgtcacaagttgatttgcattctgttccttgtgataaagaagagttgtgcgatagtacttcacttatatccattccacaactagtgaatgaacatgctacttttaatcttgattctccatgtactgaatttaagtatgttattcacacgtccagcgagaatgatgaacttcaattgcaatcttctttaaatacattgggctatgttatgtttgatgattcttgtgagctcaattgtttgaaggacaaaatatttgctcattctgattagccaagtcctcgtaatgttatatttcacatctttggcgattataatgatcttggaatatattctgtgcatagagtttacatctgctcagatttagaacatcctgtacatgtggataaaacatgcaagctagagaaaatgttattgctaaccaaattgtctcgagtttgccttgttttgattggaagaaacaggttgttgtaaatggactacgcaaagagcactatatggaaaaaccgaggacggttttccgtaaagaaggggaggatgatgtgaccatggctaccacgtatgcaaccattgctcacatcatggatgaacaagaagatatcgagatcaagtactccaagtgctggaatctgattcggccacctactacactgctgacttcaaacggccaccgaatctgcatacgacctccgttttcggcccgtgagtacttgatggaaagctctcagagccctctttccaacggatccagcctcatccccgaattccatctcgtgtggccggaatcacaggcacaaggtgctgcgtcacctataatgggcctatgggcttgtaacttcatttgggaccccggcccaggtggggcccatgtggggtgcgccccaaccaggtggagcacgcccctaggcatccctaggtcgtcctcccacccctatatatagctaggtaccccttcagggtttattgggttttgtttagatgaaagtttagccattgctacttccttgcagcgcgcgtgtcggctagaccatccgtctgcttgtattcgaaaccccaacttatcgtgtgtattcattcctatttgcaattcagattacttttatcttgttcttgcttgtttcttcgatttgcttacaggaataaggttgatctgcaccggcaagatcaacaacccacggagaggtgtatcgatcgcaaaggcgcaacacaacgtcttgtacggttgtagtcggatcgtcaacgtttctcccaaatcgtagttatctcaactcaccgaaagatcgggccaacaatagccttgagtgtcgagtggaactcagagttcatcgtcctatctttgtgaaaataattttatttacctagcaatggttaaaacagcagaagtactagcaaggagatctaaagagagaaaaaaccgccctatggtctaaagagtagaagtactcttcataaagtagaaaatttcagtttcagagaactgaaactcccaaacctgcacatgatgtgatactgaatattagatacatgtcacattcagtaatgcaaatcactagaattacatttttttagataatgagttgggattgtacaaggagtaccaagtaactatgagctagcaatataatgaagaaacatgtcaaactttgttttgggggaaaaccaaaaacagaataatctcagattctttgcatttgagctaaaaatcataatgttattgcatacagtacacaaacttttgttccgtagggtttgagttattgcaagcggccagtatatacacatgcatatgtagagccacagttagtagcttcagctagcttgaagagaactcgaccatgagtgcatcagacagctcgagcgacggcggcaaggaaaggaaatgatcagttacatacggtcaatagttcaatatcctattatcctggcaacaatatatttgcccttacaacacgagatatgtgggattgaaaggtttcaggaatttatctaggtcgacctatctccctgtggcctgtgggaagaaatacaagacgcaaattgagtgaagagataatgcatgattgaacatgaaagttttaatccctatgatagtgttggacggagatcaaaagaaacaaaagttgtatgttatgagcaggagtgtcagaatgctagagggtgaccacacccatgtccttctacttgggttcaacccctctgcatcactatagtaactaccgctgcatgatagacattattaacatttttctatttacgtgctccatgctaggagaaggactgtgttgtaacagaggtgtagagaatataggtacctgatatccatacgacctatacagaaaatgcacacatgtgtatccaaatagatgcacacatacatgttgatacatatctagtttggtctatactctctcctgagcgattgtagcaagtagcatatatatactaccattttgatgagttcatgaacaaaaacattgataaaaatggccttaaaagattggtttatcgaagatcgagcagtatgccagtataagaagctatacatagtgccaaacagtcatagcgaggcaatttcaaagatattttacttgcttccttttcgaaataaaaaaaaaagggttatgccaaattaagtttgagctgcatggagatagtatgccataaacttggtaggtgtcaggaatatataaactactgaacaattgaaaagtggatggcacccaacagaaggatgcagaatcagtgatggttgttgggcttgctttggcagtgtatatatgtgcaatcgaaggcaatctcaagatgtccagggaaatatttgccccctatatatgtcatgcacctcacagtagttctccggccaaagaaaacaactgtgaggtgcatgtacttcaccgattgtagtacttccggcttccgttgagctctgctagcctaggagaaagctgcaggttccatagcatttgcggacgatttctgatcagccttttattttcttgctgatcctactcctttttttcatattataagtcgtttgattttttttaagttaaaattctttaagtttgactaagtttatagaaaaaaattagcaaaagaattcattaggatttttgacttcatgctctgccaccagcccgtttgatcatttagcaccaaatcggataggaacatgaacgtacgtaaaaaagaacaagttctatgacattcataatgtatcttgaatccatttacagctttccagtttccagccctatattacagccaatgcagaatgcatgcctgcactttgacttcagatctcactacaccatgacaccaaagtatgtaccaacaggcatatgttggtaaaatttttttaaaaaaaaacatcactgatgaactatatgccagtaaaggttattggcgtactatatttcagcaattctgtatagtaggatacactatgtgtcggcaattctatgttgctttggagctacactatatgtcggaaatttgtgttgccaagacaacagaggcaaactaaaatgtgccaaaagagccttcgatcaattggattaaaactgcattactccatagaattattgctcaaccctatcaagtaggaaataaaatggattacttctatataattcacggacatactagttcagtgtaacatggcaacgacggatgcatgtaagaaaacctccacgctgtgcacacattgatgtcatcgtgtggcaagaggggtactattgatcgatattgttataaaacttccgccaatagcacatcgagatctgaacacaaaaaaaaagttatagaatatgcaaatttgatgacaacactaaggcaaggcaagatatttgttaacgaggtttagccgaagcctatatctcaagacactaattattggtgttcctccccaatctaatataattataggttgtgtttgatacatgagattggtaacccatctcctccgcacggaaaatagagcggtccattagcgcgtgattaattaagtattagctattttaaaaaaaaatattaatttgattttttaagcaactttcgtatagatattttttgcaaaaaaaaacacaccatttagcagtttgaaaagtgcgtgcgtggaaaacgagggacaggggttgggaacacccttaaacgaacgcagccatagtgtattagtgtattcacgatcattgaccagctaagtcgtcagccagtcaaccctctcctatgctattgttgtcatgcatttacaacggatgtatctctacatatatttaagagagagagagtcggactctgactctaactataactatatcataacacatattacaactctaactaaaaaatggtaaccaactttgtatatatattcgatacaaactctaacagataccacctaatgttatttctagtgcatctggtatgttaccctaccatacatcatgaggaccatacattaataataccccctttgactagggctcctgtcccccctcctttctggaaaaacaatatcatgtgaaaccattatatatcaaaataacccatgttttataaatcaaggataacattaaccatgtatttatttgtggctcaaataaatatggtttctacctacatataccatacctgatcgaacagctagacgatgtttgtcgagacccaacaatgtaatgtcatgattgtcaacagtacttgcaacaattttcgtaggtatgtgagtcattaggaattagctttgcacgagttgtgctttgtatgggaactacacacgggcttactgagctttttgggctcaatttgtttcgatcatgtaaagtttttcttctgtaacatagtatagaattcctttagttttcccatccaaacttgtgtgaaccaaagtatcactgtccgctcattgcccactggctgttcgaaaactggcagtaatggttatgagccaggcagtgattctgtaccctgtactagtgaactatacgtcaggacatgggagtataggttactcatgcacgtatataactacattgcagttaaattgcatgcaacatgtgtgtagcttcatctgtatctttactacttaaaaaattcgtagtgatggtggtgagtcctgaacgatcgaagggttaacattcatcgaaggatcctctcacaggcatcagcggatgagattttctcccacgatccacccgtcgcaccccttctcatctccccgatccgcatcgcgctccctgtctctccgatccgtaattccgcatcgcactccccagccccccatccttcctcctcggcgcgccgcctcctcaccccaccgacgcgccgccttcccatcccgcccaacccgcgccttcttctccagttgtcctccctccgtattgtgccgtccctcgctccgcccgctcctctctctctccatcgcgccaccgcccccctccataaaccatgacctccctcaaatcccgatcatctgggcagccgtcgttatcgtcggactgagctcttcgatcatcaccctccgttgctgccgctgcttcggagccattggaatggaggatgggaatgcggacctcagtatggttgaggggttggacgagatgatggcggtggttgcaggcgcgcccaccaccacgctctctggagtgtggagaggcgcgcgcccgctgctgcaagtcaccggcggtgtcgtcggcatcatcattagctagctctgcatattaaaaacatatgagttgtcaagtaaagttagtgcaatgtaataagatgtttttaatttacctatgagaatcactattagtatttcctcttgcatcaatttagtggaagatatcaataaacaacagaagatattaaaaaaggaactatttggatggaaatatgcatatattgatggattatcaacacctggaagctaatggtaaatagttaaatacaatttatttttctcgatagcctagcaacataatttcattaggataaaacctttattcgtacctaatatatttccctcttgctaagatttagctcagggtactcttcattcaatggcctagtgtagcgcccgttccgtcgtggcgcctagcgggaaatttatctcttaaaaaccctaattgcgaaatttgtttctttgcttgttctctagtgtccgtgccatctcagatctcaaatccccgatctatcgccgagttcaatcccgaatccaaatccttcccaaatcaattcctccgcaaaagtctaatttgcctcccccgggttcgatgggccgaatttctctcggcccatctccccctccctccccggcgctctctctctctctctctctctctccctccctcccccgctctgcccgcgcgccgcgcgcgcgtgcgcgtgagccgcgccgagccgagccctccccctcctccctcactccgcccgcgcgtgcgcgagagccgcgtggtcgccgcccgtgccgcgcctgcgccgtctgcgccgcccggccccgctgccctgccgcgcagccgctcggccccgtgagccagcgcgcgtgcccgagccgcgccgctcaaaccaccgcgccgcccattgtttctcgcgcgcgcgtgccgtggtggccgaccgcctggtcgccgccgccgtcagcctctgccgcgcctgcccgcgcctgccgcccgtgtcgtcgccccgctccaaaccgccccgccatcatcgctgtcgtcatcgcctggcccccgccactccacgcgctagcctccaagggacggaggcagagctcctcctccctctgccgcgtcgcccccgctcccctcctccttttcccaaagaggcaagggacaagccccctttctctccccccttttctccctttttccctctcgccggcgtcacctcctgtcgccgttttggccgctagccggagcaccagctcgtcggcttgaccgtccaatgtcggttcccctctcccaaaccgacattgctgctcctataaacccaagctcctccccctccaaatctccctcgttttcgtctctcgccgccactgtcgccctgttcgctgtcgccgttcgtcgttgcgcgtgtcggaagagccgacacgagcaaggacgcggaaggggacttcggccgcgccctcttcctcctcttcctcggcccgaggccgagacgatcacgtttcgcgccgtcggctctcgtcactgcgcccgcccgcacggtagtgcctccctccgttcttcctcctcgttccatctcctccccttagactcgggtagtagcacgagtagcctccccgtagctagccggcgccgccccgaccgttgccgccgctcgccacgtgctcgccgccgtcgccgcccgagctcgaaagcgcctctcgtcgctggcctccctcgatgcgtttcctcctaatccgacgctagggacggattcccgtagccgcgtagatgctctcgctgccgggaatcggcccctcgtgacctcgtcgccgtttcccccttcttccgccaccggttgccgccgccgcaattcaccgccgtcaagcttcctccggcgaatccgagccgttggctcgtctcccctcgtctcgtgcaaccacccggtgtgctcgctttcgcctgttccggccggcatcgtcgtctacctcccgccggcccgcgtggcagccacgtaggcgccacgtcggcgccagctcggccaagaccgggtcgagccgaccccggtcagccactccctccggccccgctcgcgggcgcgatccaccgcgagccgtgaggctgcgcgtgggcccgccgcatccgcgtcctccgcgaaccgcgcgcgtgcaccgcgtctcttccccaaaccctagcgcacgccgcatactccctccgcatggtgagccgagccgctgacaagcgggtcccacccgggaccacgcgaggtgagcccggtccaccggctccctctctcctcccctcccacgcgcgctctgggccgccttttgggccggccggcccattaagctcggccgagccgccccttttctctcgggccgcgccctagccacccgagggaagtctaatttccctccctcttttcttttcttttcttttctttttcaaaaaggatttaattaaatccttttcctttagaccaaaaatccaataatcttagaaattcaatatcttcccaaccgtaaatccgtttgactccgttcaacttccaaaattcctcaaatctcgagatctatctaatggcatgcttagaggtcattaatagggctttattttcgccgtttgttgagttgtcccgttttgcgtatagtttcggagcccgaagaccagcagtgcgaggatttcaaggatcaagctccagatctcgagcaaggcaagccacctttgaacatcttgagcctatatttgaatttaattatgttgcttgaaaaatattatgcattgataggatcgcacttaatctgttgtcccgtctgcaaggcagattggcagacctacctaattcgttgcatttgatccttcctttgttaattgttatatcatgtccccttgtaaccatctagttgcgtctcgatattcgtgcaccctgtgcgagtatcgacggacgccttcaaacttaaaatctgaaaaacaacttgggtaaaacttgggttttacaaaagacttggaaaacccgacacctgggtcggtgcttgcgaactaaatgaatttccaaaaccgcggaccggggaacgtaccgggtgtacggtttccctctctcgcacttaaggaccgattccttggaatttcatccaaacataagacaagtacgaccacatgggtggaatgggacacccctggctgagtaactagcttatcaggggagccttgatgccgagagacatgtggattcgccggggtggtgtcggggaggacccctgggcttcctggcacagtatggtctgggacctaacttgttgttggtctgggacccctctcgtcggcatatggtaaacctgtgtcggctttcgaaatgccttgtcatgaaagcttggaggtctcccaacgtggccgatccccacgggctgggtgatccgggttagtaatgtcgtgtgggtaaagtgtaccccttctgcagaggttaactaactgttcgaacagccgtgcccacggtcatgggcggatgtgaggtgattcctagcgtagttttgtttgcctactgtttgtgaaattgctgtggtggaaaggagatcgatgtttggaaaatctgcagctgatgggatcagctaggcccgggtggccgtttgaaagttgttggcccgggtggccgtttgaaagctgttggccgggtgccaatcttgatctattttaaagattgatacattgcacatactccgaccggacgagacgcactgtctcatccgtgtcgtttgagaagcactcacttagttgtttttagaaaagagttcaaataaaatcaattgcaaaaacaacaacctttccttgaagcctgcattaaacacttatttcccatggcttgttgagtactcccgtactcacccttgctctatataaataatccccccagttgctgaagaagatgaagcggaacccgctgataaggagttcttccaggagcaagccggctacgatgagttttagggtttcggcttagttcccaagtcgcgcctgtgttgattggtccaagtcctggcttccgtttcccttttgtaatgcagttgtgagctcgggatctgtccgcagcccaacatgactgtacctctactctataataaagagacctctgttgctgtgacattctatctccctatgataccaacactgtttcctgggactggtatcgattaacaggttaatttggagcgtcacgggctatttccggtcgggattagttcggggcgtgacacctagccagatccatgttgcatgttaattatgacatgggttgtgctatttcttggtggagaagatcgttaagtatctcctggcatgcatgccgctgccatcaacattctttcttgatggctgtgagcatgtcatattttatctggtgttatcccggctgatgagcatcccgttcgatttttttttctttgtttacattggttaagcttgatgtatttttcagatttgcttccatggatcagtttggtcaggtagtcttgttgcaatgcagagttttagatatgaacggttcatatacttcatatcatagttgtacacagtggtttcttctaatcattcccatctgattcttgggagtagccaaattagtacatggtcagatattaggaaggaagagcagtataatatctatgtgcagtttagttctaatttaccggctattctcacacgttggctttttttattgactgagatatcattttcactacagtccaaatgtgttggtcaattcataatcgatcagcaggcctggaatttgtctcaaggtatatacatggaatagtgttccaatatgagtagtgactaaagcagattaatttgaattgtgaacagagactctgtcaaataatcaggtcagtactaaaattctattgatcactataaaattacaatctcatttgatgttgcctttttcctggtgatcataggagtgaccccttttttcatgcttcaaaggcatatggttttgtataaaattccatttctcagtatagaagttaaaactctcatttttgtctgaactaataaactatattgttcttctccaagatttgttcactaagttgcaattgatagcaacttagatatcatttttcttctgttttcactgcagtccaaatgtgctagtcaattcataatcgatcagcaggcctggaatttgtctcaaggtatatacatggaatagtgttccaatatgagtagtgactaaagcagattaatttgaattgtgaacagagactctgtcaaataatcagactctgtcaaataatcaggtcagtactaaaattctattgatcactataaaattacaatctcatttgatgttgcctttttcctggtgatcataggagtgaccccttttttcatgcttcaaaggcatatggttttgtataaaattccatttctcagtatagaagttaaaactctcatttttgtctgaactaataaactatattgttcttctccaagatttgttcactaagttgcaattgatagcacatttctacattttcttggcgcgtccatttgtgcctccacagttgcctaatatgctaccactgacatttcttattattcattcctgtttcttagagaattgtatttatctatgcaaaattgcaactcgatgtactgaggattctataagcttttaaagattactatgaacacacagtgtactgtccagagaattactcagattcatttatgtctttaatggattagattccatgtaaattcagttgtaatcctttaagatgattttcagttttgtatatatatatagtttgttcaaggcatataacttgaaatttagcatgtaccagaagattattatcagcagaccccaaaaaggtcacactccaattttgatttatcaagtgcatgacccttgataaatttactcatgtgtgtgatgtccgtgactgcttcccgaagcaccaaccaattttgttttgaggaaaacatcaactaactatgtatcacctgagagggtaatattcagaacttgtgatcttagaaaatgaaaccgtattcttctgtgccaatgcctaatggttagagaaattcttttcaagtatacctgatagtctgatacattaaccatattcctttgtttagaggaacattagccacattctatcctcttcatttgccagtcataataggcgagatgctttaatgcatatatttttcgccgttgcaacgcacgggcacccaactagtatataacatatactgagtgagcaactgagaacaacacatcaaggggaggcagtggtttcacaactcactgccgtggcgagggtagcatagggatgggaggcgtggggaaatcagttgaaacaattgctcaaactatttcttaatgctcaaatattggaagacacaaaactcctccaccgtctgaaacatcctcagactcttccggtaaaacacttccatcttccggcaaaacacttccaactgttctactttctatgcttccgggtgctacggaagcagtgttgtcttcagacacatcccgccctcaattggaaatgccctcagaaggtgaccggaagaagctaacctatgggttgttagactgaagaatagtgaaagatgtattgtagatgtctgaaaatcaatatctaccctgatgtaatctcagtgtaaacctaatcttactttgaaacgaaattcacgtggggtccccccccctccccttccctgggcagtgatttggtaaaaaaaaataattgctcagcttcagtagtagacactgcagtgcagtgtgataacccttactgtgataatctatcaccagggttttacttttacaagtggctcattaaaagtccatttgtactaatggctaagagctccggagcgggtttagaccacagttggtttgttagtcaacttttgatatagtaattaggtgccacgtgtaaaaaacaaaaataaaacagtgggcccaacatgtcagcccacctctcccatctcatatgcacttctctttctcccgatctgtttggccacgcacggcgacaactagacacctgagcaggcttccggacaattggtttgcaagacgagctcgctggccccaacctgctcatggtcatgaaattgtgagagacgacgtgagagaagcaggagaaagaatagggaggagcctatgacatgtgggccctactctttctttttaatgttttttatctgagtgtgtccatgtagaaaaaaaaaccttggtttggatgaggggtgtgatttgaatggtttcgatatatagttcgtggtgttggatattcggttttgaagttgaggttacagtacataatggttaaagagagagtataataatggttaaacagtttagataaacataatggttaaagagggtataatagatttatccccctttattaatttgccactctttagatgcgagattattttatgatttaccaatgtgactgacatatcatagcacacaaagggtcctgcgtgttattgtcatgatgaacggtgaacacagaagtactatatatgaataattttgacaagtgctttatcactgattaacgtcataatttgcacgcattacgaactgtcagaaactgaataattggattattctgcagatggaatgtgcacgtgcatgtgggggtgaaattgattctgaaacaaaaatatctatttatcgtcctgcgtagttatgactggtgagtagactagttgcatttggataagtttatattgacacaagtatcaacagcaatggccttaaaaagacagacaggccgaagattgagcagtaatctacactacatagtgtcaaactgtcttgatgaagcactgtttgtgtacatatattggctgtatggaagaacacatattacccttttttgcaaaccccagaattaatatataaaagaaactatacatgggtttgaggtccaagaagtgtgtgaagcaagatattgggtatttcttttttattttattttaaatctttctattctgaattcagttatatggcataagcttgagaggcatgaggaatatagaagccaccatcgttgtgctggtcagattgtggaggacctgtgattgtttgcccatggctgagagccgaaccagcggcatgcagaacgctcattcggtttaatctggtgtaagccgttagtttcccgtgatcacgaggttgacctccaagtctccaaccccaagtctggtttgatttcgttctgtagtaccaaatttggtacgaccgagttgctacgatatgctttaatcaaaataattgcttcttgggcacaatttggcactaaacctgatggcatgaggcaccgagaaggatcttgtctcaaaaacactacatacaaattatgagcaagcgcattctacatactaattaagggtcatagctagggattgaaaacctcggtgcgaaataaataacaggacagtaatatttttaaatacacgctatagaacatgtactagcaaagacagcggtagcgtgtgacttggagtttgctcgtgccctagcgacatccgacatcataaataaaaggaagagacaaaaaagacaacaaccaatacaaacaaagcaattacatgggcttcaccgaccatgggcccgcatgtcagcgaccatgtcagggggcagtttgcatcagaggatctgcttccctaccatctagcttcaccactgcacaacttgcttccattgagagaccaatacaggattgaaagacatggggaaccaaaccaaaccgacgaagtgatcttcggaacaggtttacacacgagattgctcatcagctttaacataagattccaaagtttaatttggtacagattggtttaatacttatacaagagtagcaatccaagagtgttctgacgatgattggtttaatacttcatgacgtgttgttccctgctcaagaaatggtcatcactattttgatgctcttctcaaaccattttgacattttgctgtcttgataaatgttcattaattatgtcacgttgccgtagtaggtatatactctgattaagaaacccaattaatatgcttttgttcaatcgactgagccagtatagcaagagaaggggaaataagaacaatctctagcatcttttgtggaacttttactacaaaacagcatgcttgtaactcactagctagtacataaccggcaatcactaccaggcaccagctcatcagtagtgatttggattgaactggcaatcaatgagtatttgtaccagttcataccgtataggaagttttcccatccaaacttgtgtgaaccagagtatcactgtccgttcattgcccactggctgttcgaaaactggcagtacgtaatgctggttatgagccagcactactacagatccgggcttcagtgacgggtcatctgtgacgggccaacgcaactcgtcaaagatgagtcatctctgacgggccgaaaaaatatcctcttcaatatatggctaccagggaggacccgtcacagatgtgaagtcatatgtgacggcttgcacttgtaacccgtcacagatcgtctgtgacggatcacaaccatggctcgtcacaaatgacatgtcatctgtgacgggtgtagtattatgaaccatcacaaaagagaccactcatctctaacgggtctttaactaacacacgtcacagataacgttatctctgacgggtggtagttatgacccgtcagtgatgagtgaaaattcaaatttttaaattttgcaaaaaaacctcggattgaaacatgtcttatataaaagttgtagctctcaatgatatccacaactttataactaacaacatttctattagagatcgtttacatccccgaacatgcattacaagtgatcagatctacttttaaaaacaaaattttgagttttttttcaaatgacatggatggatacatgccccgtatcaaagtcatagaactcaatcagatctacaacattataattgaaaatattttcatttcacaaaatttacatgtttataaagtgagatatattttgaaaaatgaaattttgaattcttcaaacaacatcggatgaagatattttctatgtaaaagttataaaacacgatgagatctataactatttagttgataatattttcatttgaagtcatttagggtgttaaatatatgttaaatgattcagacaagcatagacaaaataataacattgggttagtagtcaatatgtgttgagtaggtgagttggtaagggaactctatatggaggttgaggtcttgagttcgaatctcacttgtagcatccaagttatattgcgtgaaaaattgtgaatttgtaggtagtgatgtgtaaccatgtataggatggctagtaaaattcaaaatatttttttgaggttttttgttgcgtttaaaattcaaaaattgtatttcttgctttgtcatcagtgacgggtcgtaagttacaacccgtcagagatgagttatataccactcacagatgggttctatgcgacggttgttacatccgtcacaggtgattttgtcatcagtgaccactaatcactgaccaagaccaaacccatcaaaagtgagggttcgggcccgtcagagatgacctggtccggcgtagtgcaggcagtgattctgtactttgtactagaaaactacacgtcaggacatgggagtataggttactcatgcacatatataactacattgcagttaaattgcatgcaacatgtgtgtagcttcatctgtatatataacatatactgagagagtaactgagaactcatcagggaggcagtggttcacttcattaggtggtttcaaagttcattgccgttggtatgctagattgttgctggtagcgcagtagcatagggatgggatgcatagggaaatcagtcgaaacagtagggtcaaactgtcttgatgaagcactgtttgtatacatatattggctgtatggaggaacatatattaccctttttgcaaaccccggcccaaaatatataaaagaaactacacatcggtcatgaggtccaaggagtaagtctatatggcataagcttgagaggcatcaggaacatagaagccaccgtcgtgtcctggtcagattgtggaggacctgtgattgtttgcccatggctgagagccggagcagcggcagacagaacgctcattcagtttagtctggtgtaagccgttagtttcctgtgatcacgaggttgagctccaaccccaagtctggtttgatttcgtgctgtactaccaaatttggtacgactgagttgcttcgagagatatgcttaattaaaataattgcttcgcgggcacaatttgacactaaacctcatggcaggaggcaccgagaagtattttgtctcaaaaatactacatacaaattacgagcaagcgcattctgcgtactaagagtcatagctagaaactgaagacctcggtgcaaaataaataacaggataataatatttttaaatacactatagaacatgtactagaaaagataacagtagcccgtaacttggagtttgctcgtgccccagcgacgtccgacatcataaataaaagaaaaagcaaaaaagacaacaaccaatacaaacaaagcaaagtgttttttttttcttccctgtgtagtagtttctttttccttgttaatttgcttacttaattgttagtactaacatatctgctagagtttagtctgcaacagactgcaagcccatgtgtggttcagtgacagctagttgcattattgcacagaacaaaagaacatatccacacctggattggaatcacctgcagtagctatatctaattcaacttaagcagtcctacagctaccattggatcagaaattaacatcttagatatttcctaaatactgttcacaggagaccgtacaaagttgtattgtaacagttactgtttaaatcactgtagcatatgtttggaccgttgactgcctttatccaatgatggaaagcgatcccaactgccaaacttgcaatccctagtatgacagcaccggatccttatccatccacaactatatatgacatcgaaaaggggttgagagggtgaagttcatgtcgtcataatttagcctgacaaaaaattaccaaatgtactaattaataggcgtataggagaatgctatgtataactgcagttatattatccattaataactcttaagaaaaaatattatgaaaatctagatggtgctgcgcagttgaggcctaagttagcacactccattctcaagaactacggcattaatagtgactttatattcatctgcaatttcgaacacatacttcaaagaagagtgcaaacttatgagttgaagctaagcacctatcatctacttcagtatagctctgccagttagaacttactcccttcgtccaaaaaaaaaggttttttttggacggagggagtagaaattaaacaccatatgaacaagtagccagtacagaaaaggcagagatcggtaacaagaaatcactcgtagatacaatacaacatgtactatgtaatatcataaagggtctttcccaccccaaaaactaaccaatgggatgaagggctcctccacttatacataacctctcttgtgccctcccgcaatcaatgtgagactattcaatactctccccccttcacaagttggtgtccctcagccgttcaccgttccttcaccgcccacggtcactcaggtatataggccccgcatgcacgcacagtccatcaagcattcacacattttgtctctcgggttagagttgttcaactagttagcctctgataccaattgtataatcgtaaagggtctttcccactctaaaaacgagccaatgaggtaaggggttctcccacttatatattaggtttattgtccttccacaactaatatggtattattcaacatactagacctccatttcgcatgatctatcgccgctttatcttctctgagaagataaaatgtgtacactcctttctcaacgagacgccaactaaccctacataccacacatcacatgtttgcattcgaattgcgtgcgttattacagcatgtaaggtttggttgtctgtgttgatcacaaaaggggagagggaacagcatgcattgtatgctcatgcatgctaggttgctaggtagacctaggggtgtaagtggctaacccgcgaaacccacttataggctaaaataagccgcgagcccgcttattttaacctataagtgggttcgcagctgacccacttacacccctaggtagaccgctagagcttggtagtcatggtttggtctcaagttgtctacgtgattgtcagttgatctgtggacttgggaggcataggaaatttgtcagcaccaggattagtctcctcatcatgaataagagagcagcggtggatccagcgtagaaaagtgggaggggttgaactgaacaccaacgttaactcaattatctcgcatacaagacaaacgtggctgtaatttgaagtggtttcatatgaaaacattgagagagaaaaaaaggcaaaatacatcacacgacaattcaatattcacttgatctctaatctcaaatggatactaacaattggttcagcattcctagatcaataataatatccgagcaataaacttcactcttgccatttcaggttgtctagcttgtattcttattgttatctacagtaggagtactactgctgcagcttgaataataattcaaaaatatccttttcgaccttttgcaaacttgcaattctaggagcagccgagcagagatgatagattgctagctgagaaacaaaatttaactatgctaaatttccaatgctgagttgggctgatggcttgggagattttggatttctgctagttgggttaatggctgagtcgaaagcctaattagtgatcaactgcacgtgcacctagccacctggcctaatatattgacgttgtgttgatacatacttttctttaatttgtaaagaaaaaaaaaagcaagcgatgttttcagcatacactggtatggatgatcgtcagagtacgtttagagtccacatggccataggtcatggctgtgaattatcaggcttcagtaaagtccatgcgattgctttcacctagatattacacaatatatatatagtactatatggcctttaaaagaggttgctaaggaggtcaagtgtgtgcaatggaagacaatgtctaacgttactgcaagctgaagtagccaggtagggaatagcaaaacaattggtagatatgccaggcatgggttgcttttggcttggaaggtatcaggtgttagtaatcttggttacttagatccatggctcgatagaaatcagataaatttacaattccaccattctttcttactaaggagaaggaacaaatttgattggactttgcactttggcagtatgtgaccaggcgccccagcggtacaccaacagcgcgcgcaatgaggtgtggatatgcaaggttttcaatttcgatttcttccaaaattttggccattttggttctactgtaattcctaaaaattcaggattttttggcattttttgaccggttttttttttaaaatcttaacatattttaactgaatttgactatattttgatcaaatccgtaaaaaaatgagaaaaaccaaaaaaaattggccgagataatctcttgccgtggggggagaggggtgccgaaatttcgggattaggaggtatcggaaattcagcggtctccacggaccacggtcaagtatccatgtcttgaaatctaaggaacaaatgacttgccatcggagtccatctcattggtaatggagtaagatggcccagttcgtgatgtcgtctctacccagcatgccataaagctaatagttgttgaacaagctagaatgtgatggcacgttaaaaaacttcagttgattatatataagcccgcatgtgtttatatttcgtgtcaacaataatgatggttttgtttgcgcaggtttatttatcaaattagataatatatgaaaataaatactatcgcatccgttacaactacaattgttatccattacgctaagagcaatcttatgaaaatctagatgatgtacaggcacgattgggagctgagctagcaacgtaagaccacagcccacaagtacaatttatgatcaagaacttaatggcattattatggcttgaaattaagcacttattaagcaggagaaacaattaccaactcatatacttcaacgctaactcatactacttcaaagaagagtatatgaacttatggtttcatgaaattaagcacttaccatttgcttcagtataactccgccagttagaacgtataatagtgcttacttcgtcggcgccgttgtgtggctacatatatagccagtaaaacatcgtctctgcatcttctctgagaagataaatataggcacccaattttcaccgagacaccaatcatccattaaaccatccgcattagattaattaattgatgcccatatatatcttgcctccagagctgagaccaggaaggatatggtgtgtgagtgacaacgttcctggtgatcacaaaacaggagcagctgcagcctgcagcctgtatctgtgtatcgctagctagattagtactgctcgaactgtggacatgatcgtcactgatctttgtggacttgggaggcataggaaattcaggactaacatgtttagtctcttcagcatgaacaagaggatgaaacgctgcatcttcgacgagcttcgtgtgaaaaacagagcgaactaggagacactggacacttcacagcactgatatccctgttcctttctaagctaaaaactagctatttttgcatacatatgtcacattatgcatccaagaaaatcattgtaagctttctttctggaattgggcatttggtatgacatgcattgtttaattctgcctatattatccattaacgaaacggctaaccttctttcgacagaaattccatccccaaatcttgcaaatttcgggactccggatgagcttcgagattcgtgctccaggttctcttccaactccgatgacctcctcttctttttcggcgccggcgacaccctagactttggcgaaggatcctacgagttagggtcccggggtagagtggggtggggtgggggtgggaggggg

SEQ ID NO: 5623 - DNA, 59924 bp, Oryza sativa
  unsure (1)..(59924): unsure at all n locations
gtcccatctgatcctaagttattatattttgggactgagggaataacagagaaaggtcactgctaagtaaaaccatccaattacagaagttaccacatataacttcctgggacattgaatagacaatattttattcagcagattggataggtaagtacaagcacaatcctacctgtcatcatcatcttcccacaggtatgtagcctcctaaaacatggcaaaaatgtagcattcattacataagcgatgggcattctaaaaggaatgtaaaaatgaaaataaacactgaaaatgtaaccaatttgtaactactcctatataaattaaccatttatgaagcgactgtgcatgtaacctgtacttcagcactcatggtaagagagaaatgcagaagaattatgccagcacatgtgcaagggaaagatcctacttataaaatggtgcttttcagggtacaagacatatcacacaacaactttttacctggaaaccacgtgatttagccccaagaaatccagaacagctgcagctccacaaaggcacctcaccattgcaccaccaaaccactcaaagttgtagtcataggatagttccgttccgattggaatatcttgtttcgcaaaaattcccactcttacttccccaagaacattccatttccttgtctcacagtttggttggctgcatgcttcaataacaagctatcagatttaatcattaaatgctagtaaatggaaaaaaactcgataatcaattatcaaataatgcatatgaaagaaacataatataggcagacatatatttgctacaagacataccacgaatggttgatgaatcttgccaggctccccttctttgttgcgtcgatagactcatcagcattcagatagataatataggcatccgttaaacctaacagggcacaaaaaacaaatgttatagctagccaaaattagggatggcaatggggacccgaaccccgatacccgataggtaaaaactctattagggtatgtaaacaggctaaattcatcacccatggggctgttatcggctagaaactgtcaccgttgggtgatgcggggacggggatgttccataggcacccggccccgaatccccgtgggtgactcgagtagtgtaggcatatgtacagtccataaaagttaaaagcccacttagtgcccaatttagaggtgctggtatataaagcaaaagaaaccctacactagaccagtcctcccttgtccccttctcagatccatcagcagccgccagtcgaggtcggcaagggcgccagccatcgcacctcctccaggccacagcagcgatatagcaccccgccgccgcataaggtgaccatgccgcgcgagctgttgttctgcctccaagtcgcttgctcatgcgggaaagcaagaggacgggcacttgctgcatccgaatgccggtatatactttgcttgttattttctgctctgtcctgtttgtcgctgtttatttttctcattttgatggaagttggagctgattcttggcaacagaatcatgcaagtctggcaccatggtcatgttcataatctgagaaaatgatagatgtatgtcctcgtgctatttttgccgatctgttctacttctaccttcctactagagaaccttcttgttgatttatgcccacgagtttatcgggtgtgcgaccccgtgggtgccccgtgcacccggcgaggcttggggacgggagaaatacagccccgacaccggggacgggggcgggtgatttctaactgcacggggacggggacggggacgggggaccacaccccgccggggatggcccggttgccatccctagccaaaatgtaccaccatgctaacattgagggaagataaaatcaacagaccctggttttcatatgcttgagatctcctcttggcttccttccatgatattacttctccacaatattccataacaaattgtccagcctaaaaaccattaagaaaacaatgactcactaaagcatactcacttgaatatatttaacaacattagcagaccataaaatcaaggtaaattcagtcaccataatattctcatcagccaaaaggccccatccacgcccttcagtttttaccagccttgtcgcagcatattggcttttttgaaatcgctgccaacagagaaattgattaaaatacaaacataactaccagtgaaactgtaaagcactccagatgacattcggcctccctagcaaattggtaaaactatatattgaaaatgatagtgttcggtatctatagaaaattagtaaaactatatattagaaataatggtacatcatgtataagaaaccagattatattcaatctcacttgaaaaaaaatccttacagctaagagccagcacgactatattgaaaattgctgtacatctataataaactggattatattcaatcaagaagacaagaaagcaaaataaccgtgttacaccatttttttcccctcctgcctagtaactaggctcgagtgaactaaagtaatcatgtaagaacaaatgtatggatattcattcaatcaagatttggaacggttgcgctactacttgaacaagagaaacaccaacctggttcttgcagtatacaccgcagaggcagtatccaggcgtacactccgtgctagtcaagacgttcaagcaccgatccccgcacgcgctgtccggatccagcagattatactggcactcacacacagctatgtcctcctctttctgcctcttgtgcctagcatcgcgcaccaaagtataaagattcgcattacatccaaaagcacaggacgcagccgttgtcccacatcgccgtgaaactcactcacctcctgtgcaagaaatcgttggtctcgatgtggatgtacggcggcggcggcggcggctccatgcgctcttcctcctgcaaaaccgaacagcccggggagctcaatcatacagaatcaggaatctctacgagcgagcgagcgagctcacagagaagttaccatcagagacgctagctcttggacggcggcgaggtatccggcgagaggggtagggaaatcgcggctgatagcctgggacaggagcccgcgcggcgcgtgagtggttcgaggagcggcggaggcggcgactggggaagtggtcgccggaggaaaggcgtcctccccggggctaccgaggggggcgtcgccggcgccggaggaggtgagctccgcggcggaggacttcgccggctggccggtggtcggaggaggaggaggaggaggagaggaaagacggattcggctgggtcggatcggcggcgctagcgcttggaagcgtagcgggctgcacacgtggacggccaggatgggagggagagatcaccgggtcctcgtgccgccgtcgtgttgggccgggccggaagcaacctggctggattgcctcttccgttttgcaaacggagcaaataatctcatctataaatggcaaaaggaaaaagtataccaaaggtccctcaacttgtcatcgaattacaaaatcgtccttcaactgtaaaaccggatgacgcatctccaaacttacaaaaccagtgcaaattagatctctcggcggttctaggcggttttgactcggttttatcctatgtggcagctgactcagcgtgggacccacgtgggcccccacgcgtcagcctcttcttccttcctctctccacctctcttcctctctcctcttttctccaatttccgggcggcgcgcgggggagcagctgcacgtgacgggcggcggccggcgggcgcaggcggcgtgggtagaggccgcgcgcaggcggcgagcggccgaggaggagctgggcggaggtgcacgagctcctcgccggactaacgctagaccggctccgccatgtccgccgcgaggaggtggcgcgcctcgtcggctcgctcagctggagtgccaccgacgccgagcacgtcgacgtcgacgccgcgctgatgggtgtcaccagcaacatcgtccctcgcatggtgatgggccggcggtggaccggcgacgacaacgacatggaggagatgcggagcgtggtcgccgagacggcggagctcaccggcgatctcgtgtaccaggacatcttcgcggcggggacgacaggcggagctcgacgcggtggtcggtgacctgcaggccgtggcgaaggagacgttgcggctgcacccgacgccggccgcgccccgctgctcccccgttggctgccgcccgccgcccacgtccgcccgcgcgccgctccatcgcccgccgcacgcgcgcggctcctccccacgccgccttcgcccgcctggagttaagtcaaccattaactttgtaccagttcaaatcagtggcaatcaccaaaccaaacagtgcgagcatgtgagctcgatcttaacaacaagcaagcagaactgtagcaggaaccaccagctgctgaggatccaaagcaaatggggatcatcagatcgattgctcatcggcgtactactggagatgatgggctccagggcaaccttgtcggcggttgccttgcaggatggatggattaaacgaaaaagtacaccgaaggtcgcccgccgcctgtgcccgcctgcgcgccgctccgccgcccgcgcgcggttcctccccacgccgcctgcgcccgccggccgccgcacgtcacgtgcagttgctcccccgcgcgccgcccggagattggagaaaagagaagagaggaagagaggtggagggagaggagggaagaagaggctgacggatggggcccacgtgggtctcacgctgagtcagctgccacataagataaaatcggagtcaaaatcaccgagggacctagtttgcactgttttgtaagttggggaatacgttatatctggttttgtagttgaaggacgattttgtaacatccatgacaagttgagggaccttcggtgtactttttccatggcaaaaggataatggaataagtctatttttggtccctcatctcttgctcgtgattaagttgcctccctcaaccgtaaaactgggtataatgtctcccccatcttaaaaaaaaaaggtgccaatcgactctttcggtggtttggaggttggtttgttgacgtggcatgatgaccacgattgatttgccgagtcagcatgtaaggcccacgtgtcatgactcctctattcccctacctcttctcttctctctcctctattttcattggcgaccgcgccacgcccgagatggagctctgacgagggttcaagatgctcgcagtgtcgcggcccaacccgtccgtggcggcctgtgagacctacctcaaccaccccgtccagctcaatgacctcagcccagaagccttctcagagatcccccatgccatggcgctcctcaacttcctccgcactgtgcgcaccgtcatgctctccgttgtcggcattgacctcagctcttgcaggaaccccacctggtcctctccctgtcgggcagcgccgatgacgaccccctgcccacaaccgaggtgctccaccgtgccatcctggagatgttggcatcagtcacggccatcgagcgatgcagaacgccggtgatcgcggcaatgaatggtgcttgcgttggcggcgaagggacgatggatgcgctggtggcacaatctatcgcaggagggctctggggagcgttgcccaagcgtgctcccatcgacagcaccgtgtttgtttttgcctaacatagatagacctggctctctctctcccatctccaatgtctccacctccctgaccagcacctcccctagatggccaccctccttcttgtcagcgcccccgcgacactcttcctccttcacccacccatcgtcaccgacaccaccatcaacccatgtagcctatccatgctctaggacttgcgccgctcgctgaccaatggcaatgccctcgccttagagtgggacctcaacatcgccgagccctacgccgcctgtccgcacatctcatgcgaccacaccagccgcatcaacaacatcgaccttcccgccgacaccaccgccatgcaatagctttagagccttagcctcaacgactgcaacctcaccggcgccatcacatacttcgtgcagaactcacggactggctggtgttggcgctcctaccattgagtgacgtcgtctggctccggctgagaacaaagagagatagagagagagggtaaaggggagaaaaggaatgactaacttgtaaggctactgtttatttttttctcactgatatgtgggtcccatgagcatcacgtaggacgaaaccgccattcaaacagcgaaggactcgatttacgccggtttaagggagcaagattggagatatgtaaactagactaattaaaaaaatgttaaccacaccgaaaaaaataagcatgtgttggagctcctaccgcggagtgacgccatttggcactggcttggcgagaacaaagagagagggtagagagcgatggtaaaggggagaaaggaatgactgccatgtgaggccgttttgtcttattttctctcactgacatgtggatcccatgagcatcacataggatgaaaacgccatccaaacagtcgactgacttgatttacgctggtttaaggaaggtgaaaaattgaccgggtgattcagagttcagaaatataaaattgattcattaaaaaaaatggtcgcgtaaacaaaaaaaaaggaggacatatgacatgtggatcccatgagcatcacgtaggatgaaaacgccatccaaatagtcgactgacttgatttacgccggtttaaggaaggtgaaaaattgaccgggtgattcagagttcagaaatataaaattgattcattaaaaaaaatggtcgcgtaaacaaaaaaaaaaaggaggacatatgctaggcgtatgtgtcatgcgtcttttgcccttgggcggtgacaatgattatttcctttgaccaatgtgaatattgcgagccgtgcactcagcacgtgcagccaccggactcggggtgtgcccgtcagcacgcttggttcggctgtcgcctgccatatgaggaggactaaacgttgttagctctccggtgtggtactaaacaacgtgcaccacctaagcacctttgtgtttagaaacccgcggagcggaataaattcctcgtggaaagacgagcgcacgtactgtattcacgtacgctttcggtgaacgtaccagttccgtcataatctcagcccatctccttcgtcacacaacgtatgactagtagaggttgtttggttgctagccaaaatttggttaatttaccataagtatggcaagtaggtttgatcaagttagtgtagtgtttggttctaatcataagttagttatgccaaactttcctttaacttgaccctacatttaatagacacaataatgtgtggcaaggaggctaagatgtggcttcatttttcttggccacaactttagcaacttagccacaaatgtctggctagcttaggcagttttacacaaccaaccaaacagccacatctgccgaacaaatggcagctaaactggtataggaattgtccaacaaagtcaacaactcgttgattttacaatttttttaagaaaatttaagaagtaccattgataagtgtctggttccaaaaaaaatgccatagacaaatacgagtttcatgaattactattgtacaagcaactttgtcccataaatgctaatgttgttataattccgttagcatctccccgttggcgttgggtagacggaagaataacgacaatgatatttctaggacaaaatcacttgtacgatggtattttataaaactcatatttatcgatggtatttcttagatttatgtgtatgtcaatggttggattttctcttccttttaccatcagcgacgctagctgtggacgtaggggtgggcagaaaaagaccgaaccaaaataaccaagactgaaaaattcggtcttatttactagatgaccgaatttttttcgatcaattcggtcatcacccttagttaaccgaatttcattgaaagcccatatcagcccaagaaagcaagctcaacactagtaaaaccctagctccctctctattgccttctcctcatccacccagctagcagccgccacgctctcccacccaactaggagagagcgcttatttcttttctttttcacctgagcgctcctttctttttctctcgcacatcgacgtcgtgttttgtcgtcggcgcctctgcaccgtcccagcgtctcctccttctcacaagtcacaccacgacgacctactcttgttgcgccaccttcagtcgacacccatgctgccggagcccggaggcctcaaacccccaactgccaagcccaagccgcgatcctccgtggctccaccccgggggcacatctgatggtgcctcctctaccccgccagcgacgagaggtgccgaagccgatctgggatgagtatatgataatgaagaaagccgatctgggatttttatgaattttcttcatgtgtatgtttttttatttgaaatttattgtggatttgtgcgattcttctgaatatttctgaaatttcggtctaaccaagaccgagaccaaatagttctatctttaatatttttcaagtccgaacggtcttgcgctttaaatgaccgaacataaaacagattgaaaaccgagatcgaattttcggtattactgaatgctcacccctagttggacgtggatagcgctgcgatttagcatgccgaggcaggtggaagacgagaaaaatccaacgtgcggtagcataattgtggctgatagatacgaattattttctttttttaaattttttaaaaatatttacagaaataatctatcgtcggaaaaatttataaaaatagatcctgctgccctagtgcagggcggcaagctgacgtggcagacaacggctcgacgggcggtgacggccgattggaaaagttgaactttttgtattaacacccttgccacccattgccagggcggcaatgggcctccatgaaaaagccagcccgagaagggccattatcaacaaaggtggaaagaagcatttggccggttttttttcatctctgccttctttccagctgggcaaataagggcggtaaggaccaaagcgcaaaatgcgcacacggcgccgttgagccgccgtctgtcacgtcagcttgccaccttccactagggcggcagtgtctatttttgtaaatttttctgacgatagattatttctgtaaatattttaaaaaaatgaaaaatgaaaaaaattctgatagatacagacatacggccgtgttgagccgggccggaagtactgataggttttgcttgattgggcttccaagacaacgagctgatgggcctggacaagctccgtgtgggctgggactcgccggaagggagttcccaatggagtgtgttttcgctaggcaacctcaggaagggcttcgactctttcgtttccgggttacaaagcagctagctttggttggaaacgaaattctcgtgcctctgatagtgtttttttgccagatcggcacagtggtgaacatgatctagatagaggcggaaccttcttctctaggagatctttttagcacttaggttttttttcagctaaattcggaccctattctccccatcataacccgccatgattgttctaacgttaaagttgtattcaaacatttttcttctactataataacgtgcaaagctttttttaaaaaataatagaataaaacatcccggcctttgatcatcagagctatagccaattattacaaaagtaacacccaaacactgagtgtagttcaaatgaattaaacatacccaacaaaataaaatatcaaactaagataaggagagcacatttattcaagtctatttatgaatctccatctatagtttgcaaggagttgcatgaccgttgtctcaagcttacgacatgcaaccttcataagctctcgatcatcttcacacatttgcagctgtgcccaaaatcggagcaaatatgttgccctgaaaattacctgtatatatgagatagatagtgatttgtcaaaaaccatatcattcctagtcaaccacagagcccaacatatggcagaagctcctacaagtatgagtttactcttcttcttatctaccctcaaaagccaaccatcaaacatattagatatggtagtaggaaggtataaaccaagagagaactgtactgctctccaaacaaattttgcataatgacactctataaaaagatgttgaatagtctcatttttcataaaaaacaacattttaaactgtcattccaatttcgtcttgccaagttatccttggttagcacaacccctttaagcaagtaccacataaaaatcttaatcttaagtggcatcttaagctttcaaataatcttgtttctttcactataaccattattaattaaagctagatacatcgacctaacagaaaatattccattctgatgataattccatctaaagctatcagaggattgattcaattgaatatgtacaatagaagcacacaattcatacaaatatgtaagattctgaccaactaatgatctcctaaaggaaacatcattaaaaaaaaatcatctttcttctagaaaaacagcgtactacattttctctttctccaaaaatgaaaaagaaatagcgtcgattttacatgcatcaacttggaaaactttgtcttttcttataaaacaaatcttggccatgcagcagaggttttcagctaagctcaagacccacggtatgggccactgcatcccgtcgcgtgttccgcgtcaccgtacacggcgcctgcacacgcctgcacgaccaaagcgaaaacggaagcgaacaccaaagaccagttctccaaaaaaaaaaaatctcaagaaaaaaaactaaagaccggcaaatcgtgcctcgacacgtcacgtgctcatcaaataatcacaggtactgaggtacgggaaaaatactaatcgccacgtggcggaatgaccccgtttatttagtgttattttacatgtaatgtaataataatgttattatcatccatcaatcaccttatgaccattttccaccgttcccaatttccctgctcgatcgacttgctttgccttcgtctcctccactctgacttcctttctagatggtcaaactgcagccatcacaaaatctatatctctttttgtctcctacttgattcagagatgagaacaatccaagaatcgccataaacacacacggacaaaatttgcttttgtttttgtcttttttagctttggctcctgggtttcttgcagcagtggaccaagagtcgaagcaaacgtttagagtcagcgcagagccaccacggatcatccaatccttcgtggccaaggatcgagggactgtcttcttatgatccactgatcttctcctaattcggtttcgcttcgtcctcattcgctctaatcaaaccatttgtttttgctaatttcgatgttgcttaatccaagttggcttccgcaaaccgtgttttcgatttgtttgttttgatcatggcgatggatggggaagtgtccggtgtttggagtttcttggctttctttaagctcgagtggttgaggaagaggagcatataaatttggggggtgttcttgcatgaggtcaaacgagcgtagctactgcgtcggcgatggcgttgtcggagccggacctcgcggcggagacggaggcgatcgtgtcggcgctcacgcacgtcgtcgcgtacggcggcggcggcccgccgccgagcgaggagaccgccgcgtcgcggtgacaaggacagcgccgtggcgcgcggacggcgcgcggcagggggcggtgccggcggcgaggaagtacaggggggtgaggcggcggccgtgggggaagtgggcggcggagatcagggacccgcacagggcggcgcgggtgtggctcgggacgttcgccaccgccgaggacgcggcgcgcgcctacgacgccgcggcgctccgcttccgcggggggcgcgccaggctcaacttccccgaggacgccgccgcggccgacgagcgacgcgccacggacgccgcggccgccgcggcggcggcgtcgtcggcgcccgccgcgctgctggagtcgcagccgggcgacgtcgcggactgcctcgactactccaggatcctggcgggggcgccggagcggccgacgagctccaccgtcccggacgggttcttcggcggcggcgggaacggccgcttcttgcactcgtggagcattggcacgtcgccgtcgccgtcgggctcgggctcgggcggagccggcggtggcggtggcggtggcggtggcggcgcccctgttcgtcctctgtttcatggcggtaacggctgggagcaacgcggtgacagtgcatacaacggtttctagacgcctcgggaatcgggattagcgatatttgaagaagaaaagcaaaggattcgagaattagcatattcttttatcatggtactgagaattaggctatttttttaggtactcatagtatattcgagaattagcctattcttttatggtactccgtagtgtagtagtagtggagtagtagtaattagcagtagtagcagaataactttgttagattgtttcccgaaaaatcattgtatgttccaaaaactcatttaaagtaaggcaagcgattatttatgtagatagatacatgatgtaaactcaaagcaattttggttgtagtgatttgcgatacaaggagcccccgaatggggggcagagcaaaaataaaaaaaattgctagcgtatgtgtcatgcgctgttttttgctcaattgttgagcgaagagccgaggacaagcaacacagcaatgtccacaagtcggccttcataatccatgggttttgtttgatatgcttacgtgtgacatacgcacactaccatcagcatacacgtccgtgtgtgcgaggtgtgccttcgatcgagcacgtcaacagcgtagcaggatagatatgtaagaagaggtgaaatcctttcgatctccggtgtgggactaaaaaaaattgacggcgctaaagtaaacaacgtgcacctctgtgtctagtgttagaataattgggctagacttaatttatcctattaaatctcagacccataataagtgttaaggataataataccacctcaggatttaagcaagaaatatcttaacctaaatagggagttattggaggctcccagttgactggttgaggtgggggtcggaaagccacgcgcgcgcgccgggtcgggcgagggcgtgacgggcgtgcgtcacgtcgctattcttttgcgtccacgatcccacgttcccacgactgcctctgcaatggcgcgtccacgatcccacgttcccaggaggccgctagataaggaggccgcaagtccgatcagattcctcctccgcaacggcgcgtccacgatcccacgttcctaggaggccgctagataaggaggccgcgagtccgatcagattcctcctcctccgggcctatgctgctctcgcgttctgatccgcttgcttctttcccgggtgttagttcctcctcccaaccacaccttcgcctgagatctgcaccgggtaggcgggtgatcaggtttttggagatgcttcccgcacgactgctcgtcctcgcccaccatgtctgcgcctggagccggtgccgctactgctgctggaggagatggcggaggtggtgcgccaccaggagctggagctggagctggaggtggtgcgccaggagctagagccggtgccgcgaacaacaacaccaacggaggcaattctgcctcacaatccagcggagggccattctcaaggtatatccttctcctgttcctgttcccgttgttagcgctttactgctatattcctgttcctgatattcatgatgcctctagcatgctactgcgttactgctatgttcttgttcctgatattcataatgcgcatgatgcctttagtatgctactgcctttagtatgctactggttatgttacatgttgtcattagatcaccctacactgtttatgccatgattattgtcttaacattttggattaaaatatgccgatttatgaccatattttcaactatccaaaaacctgataggtcattttcggtagttggctttgctgctacattgaaaccacatgcttttgatggttctaactataagagatggaaagcacgtgcactattgtggttgacagcgatgcaatgcttctatgtttcacggggcaaacgaagtgaaccacctctttctcctgaggaagaggctaagttcgaggcttcggattgtctgttccgtggagcattgatcagtgtactcgctgacaacatagtggacgtgtacatgcacatgccttctgggaaggacatgtgggatgcacttgaggccaagttcggagtttctgacgctggcagtgcgctgtatgtcatggagcagttctatgactataagatggtcgatgaccgttctgtagtagaagctcatgagattcagatgctggctaaggaacttgagaacaacaactgcgagttgccggacaagtttgtggtgggtggcattattgccaaattgccaccttcttggtcggacttcgccacttctctaaagcacaagagacaagagttcagtgtttctgatttcattggttctttgggtgttgaggagaaggcgagggcaaaggacgtccggggcaaaaaggttgagggaggttctagtgccaatatggtacagaagaagaaccctcatgtatcccacaacaacaagaaagtcaagcctgatgtcaaatccaaggctgcaaccaactttaagaagaaaggcaagagaaaggcaaagggagactgctttgtgtgtggcaagtctgggcattgggctaaggactgtcctgagcgcaaagacaggaagtctgcgaacatggtcattagcgagggcggaggaacatcggggtacggtaaaatattacctacagttctctctgtttttcactcacctgattggtgggtggatactggtgctaatattcatgtatatgctgacatttctctattttcttcttatcaggtcggaagaggttcctccttgttgatgggaaacgggtcgcttgcggctgttcatggtgttggtacggttgatctgaagtttacttcgggaaagaccatgcagctgaagaacgtgcagcatgtctcttcaataaagaagaatctagttagcggctctctattgtgtagagaaggttttagacttgtgtttgagtgcaataaatgtgtcgtatctaaatatgggacttttgttggaaaatgttatgacaacggaggtttgttccgcttttctttgaatgacatgtgtaataatcataatgttgtgaaccatattagcgagaatgatgagtctaatgtgtggcattcgcgactctgtcatgtgaatttcggttgtatgacgcgcttagctaacatgagtttaattccaaaattcactttggtcaaaggttccaagtgccatacttgcgttcaatcgaaataacctcgcaagcctcacaaggcatctgaggcgaggaatttggcacctctagaacttgttcattccgatttgtgcgaaatgaacggcgtgttgactaaagggggaaagaaatatttcatgacactgatagatgattgcactagattttgttgtgtgtatctattgaaaacaaaggatgaagcattgcattactttaaaatctataaagctgaggtagaaaaccaacttgaaaggaaaatcaaacggttgaggtctgatagaggtggggagtatttttccaatgagtttgcatccttttgcgaagagtttggaattattcatgagaggacgcctccctattcaccccaatcaaatggggtggnccgaaagaaaagaaccgtactctaactgagatggtaatgccatgttagacactgcggggctttccaaggaatggtggggtgaggcagttttgactgcgtgtcatgtcctgaataaaattcgaatgaagcataaggaagtaacaccattcaaggaatgggaaaggaagaaattaaatctctcatacctacgaacatggggctgtttggccaaggtnnaaatggtacccnttnattnnanaacnnncaaaaagncgngnanaacttggaccaaatattgttgattgtgtgttcctttgttatgctattcacagtgtgggttatagattcttaatagtaaactctggagtacccgacatgcatgttggtacaatttttgagtccagagatgctacattctttgagaatgaatttcccatgaaacatacacctagcacttctagtcaagaaactgtcatgccccatgagcactttgcaccgatagaacacaatgatcaaacgcctgaggaaaatcctgaggaggacaacattgtagatactcgcaagagtaagagacaaagggttacaaaatcctttggagatgactacattgtatacctcgtggatgacaccccaagaaccatagaagaggcatattcatctcctgacgctgactactggaaggaagcagtacgcagtgagatggactcgattatgtctaatggtacttgggaagtcgttgagcgtccatatgggtgcaagcccgtaggatgcaaatgagttttcaagaaaaagcttaggcctgatggtataattgaaaagtacaaggcaaggcttgtggccaagggttatacccaaaaggaaggcaatgacttttttgacacatactcaccagttgctcgcttgaccacgattcgagtactacttgctctggtagcctctcatggtcttctcgtccatcagatggacgttaagacaactttcctaaacggagagctagaggaggagatctatatggatcaaccagacgggtatgtactagaagatcagaagggaatggtgtgtaaactgttgaaatccttgtatggcctcaagcaagcacctaagcaatggcatgagaagtttgacaccacgcttacatctgcaggcttcgttgtgaacgaagctgacaaatgtgtgtactatcgctatgatgggggagaaggagtgatcttgtgcttatatgtcgatgacatattgatctttgggaccagcctcaatgtgattgaggaggtcaaggactatctgtccaagagttttgaaatgaaggatttgggagaggctgatgttattcttaacatcaaactacaaagaggagatgagggtgggattgcacttgtgcaatcccactatgtggacaaggtgttgagtcgctttggatatagtgactgcaagctagctcctattccttatgatcccagcgtgctattaaggaaaaaccgaagaatagcaagggatcaactgtgatactctcaaatcattggttcattgatgtacttggctagtgcaacgaggcctgacatatctcatttgctgtaagcaagctgagccggtttgtctcaaatccgggagatgatcattggcaggctctggaaagagtaatgcgctatctaaagggcactatgagctatggaattcactataccgggtatccaaaagtactagaagggtatagtgactcaaactggatatctgatgctgatgagataaaagccacaagtggatatgtgttcacacttggaggtggcgctgtttcctggaagtcttgcaagcagaccatcttaacgaggtcaacaatggaagcagaacttacagcactagatactgcgacagttgaggccgagtggcttcgtgaactcctgatggatttgccggtggttgaaaagccagtgtcagctatcctaatgaactgtgataatcaaacagtgattattaaagtgaacagttcaaaggacaacacgaagtcatctaggcatatcaagagaagactgaaatctgtcagaaagcagaaaaactccggagtgatagcattggactatgtccaaacggctagaaatctggcagatcagtttaccaaggggctaccacgtaatgtgatagacagtgcatcaaggaaaatgggcttgatacccacctaaggttgcacaatagtggaaacctgtccattgtgatcggagatcccgtgaatttggatggcgaaacaaactattgtgtgactgagagaagagacccttgtaaagggctcattttcatgatgtacttctcttctttcctgcatggtaggatggctcatgccttaatgtgatccgagtggcttttccaagcagagatgttgacctgcagaacatctcaaaaggaacacacctatatgagttcgactgctagtcacagtctatgaggtttgggcgatctctagatactcatgaaaggcctggagtttgacttatatgctccaaacagaggggatgggaacggcagcctagtaccagtcaagggtctgagtgaaacctgatcacacaaaactgacaattgaaggcatagtccattgttcagttgtggtctgatgtagctcatttcctaggtggaagttcaacttaacagtctccaccaaaaccctggtatatcaaacaggcacaaccttgagaacatttcttatgagccttgaaatttggtggggattgttagaataattgggctaggcccaatttatcctattaaatctcaaaggcccataataagtgttaaggataataatatcacctcaggatttaagcgaggaatatctcaacctaaatagggagttattggaggctccttgttgactggttgaggtgggggtcggaaagccacacgcgcgcgcgcgccgggccgggccgaggccgaggccgaggccgagggcatgggcgtggtgggtgtgcgtgcgtcacgtcactactcttttgcgtccacgatcccacgttcccacgactgcctccgcaacggcgcgtccacgatcccacgttcccacgactgcctctctcctgatagataaggaggccgcgagtccgatcagaacgatccgcctgcttctttcccgggtgttagttcctcctcctccgggcctgtgctgctctcgcctcctcgcttctgatcgcttgcgcacacgagagatcggaaggagcagggcctccggaaccacaccttcgcctgagatctgcaccgggtaggcgggtgatcaggtttttggggagtgcttcccgcacgactgctcgtcctcgcccaccatgccggcgccgctgctgctgctggaggagatggcggaggtggtgcgccaccaggagctggagctggaggtggtgcgccaggagctggagccggtgccgcgaacaacaacaccaacggaggcaattctgcctcacaatccagcggagggccattctcggggtatatccttctcctgttcttgttcccgttgttagcgctttactgctatgttcctgttcctgatattcatgatgcctctagcatgctactgcgttactactatgttcttgttcctgatattcataatgcgcacgatgcctttagtatgttactggttatgttacatgttgtcactagatcaccctacactgtttatgccatgattattgtcttaatattttggattaaaatatgccgatttatgaccatatttctaacatctagaaattagaaccccgcttcttgggctccctggagcattcggacgtcgccgtcatcgtggggctcaggagtcgtatcgctcggcgccgccgcctctggtctcctctttttgatggtggtaacggctgggagcagaggcagacgcaggattaaaaataaaatggtgcgaagatgtttattttataataccaacaaaacacaataaataccatatttatatcataatcacataaaaatatagtctaattaataaattaagacaaacaaaaccattttaaatcaaagtaatatttaaaacactataggctctccgatgtggtactaaaaacaatgtgcactttccttgtgtttagaaccagctgaacatatatatctctcatggaacagcgggtgcaccacgtacaagcctaatcatgattctcgtcaacaactcgtcgtttatacattttttttgttaggaccattttacacactaataaaaaaagtttttgcaagcggtcaaaaatatttttccaagcagggaaaaggaccacctgtacgcaaaggttttcataggcggcctaacggtcttgatagtctaggataaaattcgatacattacgattcatcactttatcatagactggttcatctagagttagactggcgctcgacttacaatgcctttgtcactacgcatcactccttcccatttgtggatcttttgtggcacggcgctggcacgtccaagtacaagctatttctttggctaacatccaacgttgatgctagatggcggacctaatgtttcagtggggatggacaaccatgtcatgtgccccttctacacgcaggagccgaagacatcaaaccacattctaatggaatgtgctgttgctagacaggtgtggcacaagctgctcatcgaggtaggcctatcaagcctctctcccaatcggtagtctaacctccatctttggtgggaggagtcatatggctgaatgcacaagcaccttcaattcttccgtcctcctgcttacctggtagctttggctagaacaaaattcttgcgtcttcactggtgatgtttcccaggtagatacggtggtggacacgagcatgcaagaggggcggctctagctgaaggtagaacctttttctctttgagatatttttggcacttggctgtttttctatagccaacaccaccccctgcaccttttatttggagcatattccggtttagttagcccacttttagtttggattctccccctcataacccctccatgatcattacaacatatatgtaaacatttttttttctaatatagcgacgtgcgaagcttttgtgcctttgcgaaaaaaaaacatcattcttcttctaacatagtgacatgcaaaggtcaaagctttttcatatttgtgccaaaagttgtatttaaacattcttcttctaatatagcgatgtgcaaagattttgcgcctttaagaaaaaacataattcttcttctaacatactgacatgcatagctttttcccgtttgcgaaaaaaagattatatgtccatcagattagtctaaatatagtagcaatatatttattttccaaaaaaattgcctagaagcacatatgtaatgtgcttgggagctagtggcgggaatttggttacaaacactcaaagtttggttttagggattactatgtaggcatatcgcccacaaattacgccgccactagcacgcttcgtcaccctcagcgtgtgcttcctcttttgcacgcccagatgccacgcggacggtatttgaggggcagcacaccccctttgctccgtggtatgggactaaaccagagagtgcatcgacgtgtgcagagccaaaggccctgtgggctgtgggcactctgctggagcgtgtgggccactagcggcccaccaaaccaattgggattcaacttgcctgtataatggatctaattgtcgttgacgagctgatgatattggtgggcctaatttgtgccaaagcagagcgtgtgcaggcatggcgtacatcactgcatgtaaaaaaaaaaccctttactaaactctagtaaccattgggttttaattggatctataccattataatttttatggttttaaaatttcactgcaattgatgtattaggaatcatgctactagaatacttttaaaatctgatctatatcatgtgtacatacatttcaactctctttttcttggctatttataattttatatggatcaaaatgcctctccctcctgtgtcagacaccgtgggttcctctgcccccaatcgtctctaccctacattcctccaaccaactgagcgagcaggggacaacagagcaagtgccatcggttcgcgacatggcgtcgacagcgaaacaagcagccgggggtggcgctgaccgtgtcgacggtggagcaagcggcaatggtggcaaggtcaggactgtgcggagcatatctcataatcccaccctctctttcttcactccgttcgttgaggaccttgtagatccagtggttaagcatatctggcgatggtgacgagactcagagatagcgggtttagtagtggctcagcgtgacgcaagcagatgtagggcggccactggtgggttctaggtttagctggtgctcgtggtcggcaactcctctacgccaactcctccatcaccattcttttgcccgagtgattttgattcaaaatgttgtggatttgatctgacgcaaagcattaattaaattatactccctccgtcccttaatataaggatttttaatattttacttacattgtttgatcattcgtcttattcaaaaaaaatttggaattattatttttttacttactttattatttaaagtactttaagcacaactttttattttttatatttgcataaatttttttaataagacgagtggttaaatagtgcaagcaaaatgtcaaaatctcttatattatgggacggagggacggagggagtagtagacaaatagacaatgcataagtcataggatatctgatctgacacgaagcattaaattgtagcatcataggagatcatataacgtggagcattaaattgtagtagacaaatagacaatgcttgggcaacaggaggcatgcctattttggtatatgggaaaatacgattcaaaacgtgtatcagacctacaacatggcatggattagattttcaaggtgttacagtggcatagatcctagtaacatggcatggatccgatatgattttcaaggtgttacagtggaactgaatatccattttttcaaaaaaaaaatcacctagattttttctacctttagatttatatctaacgaactacaaaagaaaataacaaatgcatatttacttacacattatttttatcaaaattatagtgcacttacatgtcatatcaactgaatttacatatataatttagttatataggactgtaattttatattatgatgtaaatattgttttatatatacaaccaaattctcctccatactcaaatggccaagcgctgcacatggtaagtggtaagctgccttagttttttggatgttgttagcacgaatctcaccataaatttaagggttgaaaaaagagtgatttgcaacgaaaaatctgtcgacaaagatttagcagaatcggttatgaaaacctacgactcaatcacaaggtgacacatgagtcatattcatttatacaatgcagagttatcttcatttatacaatgtaaagaagaaacaaaaatgcatcattttcatcatctaataagtaaagaggaagaaacaaaaatgtacatgagtcatcttcatttatacaatgcagagtcatcttcatttatacaatgtaaagaagaaacaaaaatgtattattttcatcatctaataagtaaagaggaagaaacaaaaatgtatcaatttcatttatttaataagtaaagagaagaagaaataaaaaaagtttgctaagcgcatgtgtcatgcgcctggctagtggcggatcctcttgtggaggaagttttttgcaacatcaagtttggggatcgctacgtgcacataccgtgcacactgtgccgccactaggtcacggggatccacgggctcctcgtgtgcctccattttggcacgcccagcagccgccaaggccaccatttgagggggctgcgcacctgcttgattccccggtatgggactaaactcaccaagtaaccaggatgcatcgacctgtgcactctcttatctcgcagtcgcaggctcgcaggcccctgtgggctgtgtgcatgggcagggccttcctagcccagttccttcgtcgcggcactagcaaaccaattggggatccaactttgcctgtgaataaatgtgtctcttgatttggcctaattgtcgtcgacaattaaccagctggtgtcaaagcaaaagcgtcgagttgcaacttgcaacattggtcagtaaatattgcagggataccaccggttgttgtttcatcctcccgtgttaatgttgtcatcaacgctgctgccatctttgggcaccatagttaggacaggagtaatataggagtacgctttgtgcggttccttgtcatcgctaatcaaagctgtggaggaaccacgcatggtactactccagcagtagccagtaggagtactgatttcgagcgagatcaggattttctgcaggttctgcttgaattcgctttcaaaaatgcatgggaaagtgtactcatctctcgttatgtacatcctatctaaatagttacagaaaatttaaaataaatttaaaataaagattaatatcaaatatatcactccataatatgcaagttaaaatttaacttttaaaagttgtagaaaaataacaacgaatgtatgataactattttcacagtttagtttgtttctttgttgtaacttatagaagtcgaatttagtcttgcatgtttgtaaaatgatatattttatattaatctatattatcaaaactttttaaaattttttataactattttggtgatgatatgcaagcaacgagaaaacattcactcgaggatgaaaatccgatatcaccgatgtgcatcagtggtagggaccggagttttacagccatcaatctgttcctatcgtttgattcgtttctccctcagtcttgtattgtatgcgtaaatagatcaggagttttggtgcaatcttttaccttaattgggaggctagctttggtttttgaaacaaactgggggtggggggtcgttactgtagctgttttaggctttaatcagtataatataacaagattatataggatgataaatgtaagaattaagaaaccacgcggtcgtactggactcgagctcgtactatactttcggttagtataagtactcctattattaacggtttggtattcttccgaattcgaactgtaatcttagcagctatacagtctacggagtacggacatgacacgagacaatattacccctcccgtctaattgtatccgaaacagtaatctaattatctaatctgaactccgggtagttcagtactattcaaaacaattttgctaacgtatttgtctacacaaattttatattgtagttgcatgtaatattgtatatttatcaaagtcccattcaaaatctgaagggaaatctgaatctggacatggcaaaggcgttgacctcaccacagaccagccccccatcgacgcgacgaccgcccgatcggaaaccgacagtccagatccaacccgtgcccgcccgcctcgacatgcgcgtccgatttatcccctttttttttttcaattttccccaactcgatcgacgcggaccggaccggaccagataccccaaccccgacgcggacagacacgaccaaccaacgcaccccacccaacccaacccgagagacggtccgaccgaccgtacgacgtgccgggcccgggctcccaaaccgggtccctgtcgggctcgctccgaaccctatccacctccggcttccccccacctatatccttccctccccctcgcggcgtcgagcaaagccaaaaactactactcctctcgaggcgacgacgaagaggagaggagaaatctagcggcggaagcagcagctgcgagaggcggatttttcgattcggttcgaggcgaggcggagcggaggaggaggattcgaggcgatggatcggtaccagagggtggagaagccgcgggaggaggcggccatcggcgccaacgagatccgcatcaccgcgcagggccgcacccgcaactacatcacctacgccctcgccctgctccaggtccgccttcctcctcctccgccttcgatttgttttgttttttgttttttttttgggtggggagagctagggtttagtgcgggttcagtaatctcgccgccgttggcggaagcgaatctggggcgcgtctcgatgtttccggccgattttctggtgacctagggctctactattgcgttggtagatgctgctgctgctgctctaggtgttggttggttacgttttatttttgctaattgctactagtattatatcccatagaatatacaaattgttttaggaagtgaactcttttctggtctggtgtagcaggcggtttatcgttgctgttgatgattgataggtggggcttgttcactgtgtgtcttaggatagtactttcaccctgtactatccttaaaataaaataggaaatagatttagtagggtaaaggtggtattgtgttgtgaatgatactaattattagtaattgttttctatatgtgtggagatttgatttgtccactgtctggtatggcacagtaatcatgagggaatctgactgtagtggctttgttaaatctgtccatctctttatgtttgggactgctattttgggggaatatccatgttttctaattagtcactaataattgcttttgctttctcgttcctcatagcaggacaacgcgacagatgaaatcgttatcaaagctatgggaagggcgatcaacaagaccgtcgcaattgtggagcttctcaaggtaaatttgcaattccataatgtaatcagataatattggatatccctcactgttacgatatgccatgtgctgatctacgccctccctgagcagagaaggattgttggtctccatcagaatacctctattgaatcaatcgacataactgacacttgggaaccattggaagaagggcttaacacgtgaggatcacacaatcttttttccatgtacctgtatctattttggaaagggcttatgtgtttgatatgattgtttgtctttatgatagccttgagactacccgccatgtttccttgattaccattacattgtcaaagaaggagctggatacgtcatctcctgggtaagtagaattctgcactttcttcctcccctttcgattttttgtaaaaaaaatctaagagagctctagttggatatgattattgtcagtagttcaagataagatagaattctttccaggaatggctcatttaaaattcatcgtgtcgcatatcttaactttttgctagactgtctcagtatactactgctgctacttattatatttgctagaaaattcaaaccatagagttattgtaggcaatatttgctccaaatatatccctattatctggcggtctatttcttttcaacatactcatgcaatatttatctcttcaaaacatatgtgatgtgactttgctttgtgtagttaccaaccaccgataccggctgatcaggtcaggccgccaactgactttgatcaggaggcagaggccgtgcccagtggtcgtggaagaggacgtggtcgccgtggaaggggcaggggaagaggtaaatatctgcctactgatgattgtaaagtttatatccctgcaaattatgattggtcttggtgttgatctgatgcctctatgaatgcaattcagggttcaacaatgaagattatgatgatgagcatggagatgcagaggtcccacagcctcagggatatcgtggcaggggaagaggaaggggcaggcgtggatcctttggacctggcaggggttatggtggagatggttttgcaatggaagaagctggtggatatgatgatggggagcctaatgcacctcctatgcaagggcatggttagttatgcttaaactttattacctagaaatagcattataaattatagttccttcagttcgattgtatttttcttacctattggtttgtactgaaatatactatctgctatcatttatcacacatttaatggatgttggctgaacgttgtccgagagccacttgattttttatggtttatgttgatataaatttaagattattttgtcagatgtgtaaaataagttacaaaagtaatatttaaccttaaatttacaactactatgactgttttgccttggatttttttttgaagtgttacaaatttgcatacgtaactttgcatttgttccttactttgccttgcatcttttgtgaactacagaaggtggcagaggaaggggccgtggtcgaggccgaggctgtggacgtggtcgtggtggaggccgtggccgtggacctcctcctcctcctcaagagtagagattggctggctcgtcaactatccaatgcagtgactcgtcttcattagattagtgttatcttctgctgtaacttaatctgtttaggtttttatgttcaaaagtttgacatagtgacttcagtgtgggggatgcggctagttatgattttgtagctaggttattcttccatttgctttttcctcagttctattaccattccaactgtgcattgtagcatctttttagtgtgttgtcctcaaatctagctcagaagatccatttgttatggtgttggaagatcgcacagcattttctatgaatgtgcaaatcgtatcgaactcgcttttgaattggatatggtgacgttgcatatgtttttgctcgactttcctgtgcatgtttcgcgtaattctaactgggcagctgtttgacattcggattagctgattgcctgattccactaattgttagtgattgtgaaacaacatgcttctgttcctgcagtttaatgttacgatgattgatttatatataaatatctgtccatctggcatggaggcactccaatcctccaactgcaaaagtcccagaatgtctgtaatttacaggattttcaaacaatttaatttaatttctcataaacagcttccaaaatttatccattacaaataggcctttagtcaggaggagattaagcctatatgaatgtagttcatcaagtggatacttcctaaggccctttgtaccaagaaccaccttaccatactatcgcaaaacaataattataatttttatagggtgtatgagaaaagcacaaattttgatctaaatttatgacagtattacaattttacccaaacttacattaaactacagacttaagagggtgtatcacaatagcatcaaatttaccacaatactacaggtctaatgcataatattgtagatctacaaatttgaacactaattttatcacacaatcatagcatgtagctcaacccaaatataaactcttgaaactagtagttttataataatattgatgttaaaattgtaattttgtgatatacataaatttgtagttacgaatagttctgtgcaatttactcatttcgtaacagtttttattcaactcattcaaactaccatcaaatagtatttaatttgtttcgaatcaactcattcaaataaaaccgtgatgttgttgctatcaatgttgatgctgcaacttttcagtaaacacgtcgaatgggagtgggcatggtaataaaaaactacacctgtgatttattggcttgcaatgagcgcacaaaagaggttaccatagtatagcttgctgaagcattggctctacgccgcgttgttgctctcacttgcgaagaaggttttcaaaacgctagtaattctgaatgcagtcatacggagagttaactcattatccatggaccaatcttcaaatggcatagtgattgcagacatcaaggtcatagcagtgggtttctcctctattagttttaatcatgtttatctatgttgaatgccgcgactcatttattagctcgtttctgtgaacattctagtgatgttatgcaccgtaacgtaaccttggagtgtattcgggagatactttgtagtaatgatttaccataaccaataaaacaccgctctctctaaatagacaaaaccaaccagtagtagtattcaatctacttccaaatttgaatcaaatagtagtcaaatttgcagcatgttggggaagcactagtgggtggtgatggagtcgtgggtgcatggctccatccactagggtttaaatcctaataagataatagatgtttcaccgatctccatctcttagagtctgccatgttatctcataaagaaatcaaatctaggtgaacttttagcagggttttagtaacataaaagatgtttggctgatttccgtctcttagagtctgccatgtaatctcaaaaagaaaaaaaaactgcagtatatgttggagaaagaaacaaccctatccctcgcgggccagcctgggccggacatgtcagatgggccagagagatacacgattacacgtgggttttttcttccccccgtttatttcctttcctgaaatttctccaaatctgccccaaattccgaattttactcgaactccaaaaacccttcccctcttctcccctcgcctcggcccgccggcggccggccaccaccgccacctcctcctccgatggatctcgccgccgtccacgccgccctcgccggcaagtcctactcctccgtcgccccgctctgcgacgacctcttcctccaggtaccaatccctcccctccccacccctctcccgcctcccgcgacgcgaggagggttagcgtagcgctcctgactcggtgttcctcgcgcaggccgcgtcccggggcgccgccaccgacggctggccctacgccgtgcacctcctcgcccacctctacctcaacgacctgtaacgccccgcgatctgctcccccacctctctcccatggaatttttctgggctagggcttccgggattaatgttgtttttgtgtttctgggtgggtgcgtgtgtgagcaggaacagcgcgaggtttctgtggaagtcgacgccgcaggaggcgaaggacgcgcggccggagctcgccgccgtctggaggatcgggcagtgcctctggaaccgcgattacgcgggcgtctacgcggccgcgcaggggttcgagtggagccctgaaatcgccgacttcgtggccgccttcctaggtactggttgttgctttactgttcatgatggaaacgtgcaacagttgaattattctgtgtctttgtgcaaagttgtattgcttactagaatgaattgcatactgtggtagtattgtgttggaggtcaccactttgtggtgtgggttgggaagtcgggagattcagatgtgcatacatatacttcatggagtaattgtggaaacgatttatctgcacaatcaggctgaatcagcttccttaatgaatacgcaaagttactattagtagagtgcccgttagtagagttttgtgctgcgtagtgtaatggttaaagtgtttatcttggaaatacttgcttcctaagatagccttgttcagtgggtttatactatctccttaataaggactagtgatttgattattttcaggctgctcataagagtttggttcccaagaagttcagttttgttcctatttttacttctaattgacaacatgatgcaacaattctagatgcacagaggatgttcattaactcatgcttcaatcaaaataaacactttgtagttatcatttatgagtgaaactgttgaatgtattaatgtaatagcattataattaaacatttgcacttttttataaggtgattgttaacattttaccagcagtcattgtgacacagtagtggaactagagaagttaagttctttccatgaagtgcttactatgacatataccataataatacgtcaatcaggataataagttaataacatcatgattgtttcccttttgcttgtttaaccaactaatcttctagtattatttttatattaggaaataagtataaagcctgctgttttatattttttttagtatttataattggttaacttgaatatccaatattgttttctgattacacagaaagctacagaaagaggattttccagttgttgacttctgcatattccacaatcagcgttgctgatgtggctcacttcatggggatgaatgaggaggatgctactaactgtacattttctgaaactatcttgttgctgtactatgttttttaatgttaagtacaatgttctgactatcttcatgttaatcaacagtatagatcatagaagttctgacatggttaatatggtgtttttagtcatctttatctgtagaaatcatccaaagtcccaattttaggatacactgcatccttttcaacttccatagcatttcttcatagattataatctttcgtccaatatgtgtttttgcaagttccttgaattttggaaggtaaatgtttctccctatgtctcaaaatataacaacttttaaccctcaggatttgtcccaaaatataacaacttctccaccaacattctctttccaaccaatcacaaccctccaccattcacttttcccacctacctccactactcatccaattacaaccctccaccattcacttctatctactttcttaataaccgtgtccaactctaaaactctaaaacaatgatggtgcccctatggacttcttttgggtagcacttctattgtactgactggattataacactgcatattacattactttcctttcacaatagaaaatagaaacctctccttcatacaatacttgaattccattttgtgccatcagtgttgtccacatttctcctggattgagcattgtacattctaggtttgaataaagtgtcagatattttgttgtctttgagactcggttgtgtcaaaattaaacatacttttgtgtgcatgaattttagtttgttttgatcattgtgataatgctggcccattgattttgatgttcacaatgaggtatatccacaatttcacatctaattggctatctctgttggcttgagtactgttgtggagtataaaattagtagaaattttggcacaacccactcaaaaagagttgtcttcattttaccatttcaatatagtgaatgcattcttcttccttctaattaccaaaatttttcgtaggtcattcatgtaacatattgaaaattattttttttttgtggtcaatgcatcaaggctcgtgtatccctctttctatggctataactaaaacttgctatatttgaaacatattgaaaaacatattgaatatttttggaataagcatccctctgtatttgaagcatttttagttctgcaaattttattatgctattgtgtttgactttctgcatgatatttgcctgcttcagaagctgatgacaatagttgtcttaataatcattacagatgccatgcaaaacggttggagcttggatgcggcagccaggatgcttactgtcgtaaaaccaaaggttaagactaaccagaagctcgatgcaagcaaacttcagcgattaactgaatgcgtcttccacctggagcactaaagtccagcattacgggcatcccgcatgactcttaagaaacctatttatcatatgatgccaagccgagattgccttttctccggaaatcagagttagttcagtgttgaatttccatctgcaattgatttctggttagcgaccttagcctttctctgtaatggttgcttgttgatatggttggtggtggttcttgccagacttacactgaagtaaatgacactgcttagtgtcaactcgtaagttaacgttgttttttgaagtatgagttgaaaattgtttcccgttttacagaaagtcactgttagtgttgttcttgattagttgtggcctttatgcttgtgcttcattagctgcatagctgccaattgggcatctattgtctggattttaatgagattgttatcctagacaaaacctgtagttgtaatgcgtacattactgtacgccgtatgcttgttagtatatttttgataatggattttctttgattagtattatcctgctatattacgctgagggagctcttctacggctttagctttttctaactttgtaatctgcaaagcacggaaacgttcttatggcatatattagttattattgttctctctaaatttactgataattgaaatcgttgtagtnagagagaactcgacgttctccgcttcttgtgcgaactcaggagtgtacaaacttaggagagaactcgaagttcttcgcttctcgtgcgaacttagaacagaagaacaaagaaattaaattaaaccattatgttttctatctccaaattgtactaccgcccttccatggtgagctgaaatccggggcctccatgcattggtcaaattgcttcgtggccagaagatttttcctggacacggctgacttcctggtgcctcctagtcccattcccaagcatacacaccacaaccccgttgcctagcaaacaacaccgattcatctacgatatgaccctgaactctcaatcctctttcaggtcatatattatcacatatatatagatagttgtggatttgttctccggcctgtaccgtgcagtgatgcaactgtggcagctatttgtcgctgtcgtggtggtgtttgaatctcgtgaagatgaagatgaagattaagtgtttcacgcaaaatgaggtggtagtaatgtgtgattagttgagttttaattattataaacttgaaaaatggattaatatgatactttagaacaactttcatatagaaagttttcatacgaaacgtaccgtttagcagtttaaaaaacgtgccactttaatccaaaatttaatccactctttccaatggattcgaacgtcatgaatcgcacatggacatgctgaatcatataaaatcttggccaatgatttattgcaataagagcacatatggtgaagtatgtgtacgatggtctatttctttgacaatttttagtgcggtcttctggtggtaggaatgatgtaatctagatctttcaccatgttctaacatcttggaatgaagaaaaagaagtcagaatagtttgtatttttttaagtaaactagacattacgcttcaatgaacggaaaagttccttttctcgcatgcattttagtttactcaaattctctcacattggaagtaaacgagggcatataaatacagcaacgaatgaaacaaaacatagtttaatctagaacctacagatgcttttgaggagagatgtcattgctgtttgcacttcctcaccaattcgatcataatctcttcttcaagcaaagtagtaggaaattgttctcaaatgccttccagttcggggtcgtggggaagatgccatcttcagctgcatttgccatacgatggatatcgatggcacgacaatttttcccgctgttgaatgaagaggagattgctgaatttcggatgcttcctagtcctagcataacactcctatagtcccatttgacgcttatcatggacatcaatgatatgcgaggagatagctgaattttggatgcttcctagtcctagcataacactcctatagtcccatttgacgaattttccccgctgttcgatgaataggagattgctgaatttcggatgcttcctagtcctagcataacacttatatatagtcccatttgacgcttatcatggacatcaatgatatgtggggttgcgaattgtgatggttgtgctggaaaaaaggtggctacaaccgattaaatgccgcatctcggttgcatatcatcagttgtaagtcatcaatttatccttatacatctataccatactattattatgtttgtacctatttgtaagtgagagctaataataagtaaaaaagaacaacttaagtggtgatttcaatatatgtctaatgtctatgtcaagtgatcaaactcatccaacttatataacaattagataaaaataactatgcaaaaccaccttaggtggttatataaatggtattgtaaaattgaggggattgaatatccggtttcaaagtttagggtgctagataaactttaatttaaagtttttttttggggggggggatctggaccttttcctttaactatttcctacaccccaaatacatgcaaaagtctaacaagttggatctgttctagtttaagccagaggagtccagtatgattctgcacggtggtgacattcgcctcgatcttctttttcgtggcttggagagagtagtccacaccgctaaaaatttccgatgtctcctagttccaaggttaccaatatgatgtagagtattccattgtattggtatgccattccctaggcagagacaacatcaacaatatgaccttaccatcctgatcccattgtatgttcatctatatatatagatagatatataatgaaagtataactcctggtccccggcgtctgcattaactagaatacataataatttgtgatacaactacagcagaatcatagacaggacttgcagaccaaactctggtggacaaaaagatatatataaggggagatatcatttatgtttttgggtacactgtttggaaggctgttcacctatcttatagagggaggaagaaaaaggtcttacagttacagagtgatttgtttttagagtaattctcagttagtacgtcatataatgtcaaattctagaattagagaaagagataacatgaatcctttttttttcatgaatgatgtgaataccttagtgctttgtgaaatgcacgaaaggagaatttgtatggactcccaagtgtgtagttcttttgcatcttgcatggaagaacatcattttctgctgttaatcctgattcacgagcagcaatcacataattggctgcacttgccactctggtccgtggccaggagactgttcctaaacagactgaatttccggtgtctcctagtcccactcccaactccgaagcatactttctccgtctcattcgtttttttggatggatggagtatatcagtatactgtatatcacaaatccccattgcctagtaaatagcaacattgagtcatctacgaatgtttgaccttgaactctcattgatcttctttcggggtcatattatcatacatagttgcatgcatgtcttctgttccgtgttgtgatgcaactgtgggcctgtggcagctatttatcactgaatcgtacatggacttttccaaaccatataactttggcagatacatattactaatgacaataatttatagctggagaagagcacataaatggtgatgtaagcatacaatggtctatttctaagacaatttttatggagagtttattggtagtacaagtaataatattcggaaagtttcggaaactgactctaactgtgttatgtcgagtgcgaattagaccccaagcacgtgctttcgtattagccacccccacctgaccatacagtgcgaaaattcattgaatagagcatgagaaaacttacagaactagagtcctaggaggcaatagccaagaaagagaaaaaaaataatcaccaccacacagtccaagagaagaccagcactgtaccggttactgctaagtgtgactggcagccgctaggccaacaaagaaactacaaccgagatcgtccatgatcttctgctgatggtttcccaattcttcctaatttcaggaggttggaagctatgccatcttttgctgcattagccatatgcatgacggcaaccagacgacatttggcccccgtgtttcatggcggtagcattacctctacacactatcgaattttcgatgcatcctagtccccaattaatatatcactatcccataatcccatttcatacctatcatgctcatcgacgatatatacatggagctgcaatggttgtgtttggaggagcaatggctacacagctcggctacatgtacatgaggttgaatgccatatcctgggctccaatgaggctgtggcaatattaagacctgactatggggcatttttctgtctgtatttgtgttccttgtagatcaattcttatgatatgtgatgcttcgtaattgcaaagagataaaactgatagatccagtacaactggcattaatttttagctgttatataatccgaggtccgaacgtggtaaattgtgccaaattgtttcatactgatagagatggactactggttgagctgctatttttatgtcaggagtagatgaaatttactttgtaaacacttcagggatgcactaatgcacctttatcattctagctggattttctcatctcatattataagagaacctctccttataaagtagatatattagaaaactttccttctcatcacacttttaatcgattaatcccatcttagccttctaatgccatcgatgttctcagtttgttttttcaaaagatgttataactatttggatgatatgtaaaaaaccatttgaatgacatgtaaaaaattgggggatattcccttaggacaaaaacatgtgcgttgaagtgtgagtatgaaattgtttttattggaaaaaaagtcactgttaatgtcatttcttaatcagaataacacaactatatatgcctatatcatattctaatagggataatttgaaccatgccacacaaatttaaatcacagaatccatcaaccgggggaaacatagcagagaaaccgaacatagaaatcacagatctgacaatcgggtgcgggcatagtggggggtggggagcttagctgacggcggcgaatcggcagcgactgtgatatgtgaggcttgcaagttgcagcggcgccggtggccgctaggagggaaggagcagcgcgcgggaggtcgggagtatggaaatggcgttagacctagggtatgggaacaccgctggctttggaggcggcggcgcggaggagtcggagtgaggaggcgccggaaggaggagatgcggtccgacgattggcttccaaggggaggaggcagccacgtggcggcgctcgaccacgcccgtcgccgctgccaccgccggagctcgcttgctccgccgcccacccgcgccgtcgctgcccgggaaggagagacagagagagagaggaaagggaagaagagagagaagggagagggaagaagagaggagtgaggctaacatgtggggtccacgtgggccccaccattttaaaattatttttgtgtgcagctgacatgtggggccatattttttttttatttttccgagatatagttgccatgtaggtgccacgtcaatgccacgtgggacaaagacctagtcaaacaagccacataagcgccacgtcagccaaaaccgccttcaaaaccaccgagggacctcgtttgcccgattttggtaagttgggggacgggtagtatccggttttacggtgaagggacgaaaatcgaactgggtgacaaatagaaggacccaatgtgaacttattcgatatgaatatagcccacatagttgagggacgaaaaatagacttattctataaagaagcacgataggttgtcgtgccttcaagctggcccggcatggcccgagtcatattaggccgtgtatgcagcccgtaggctggtacggcatggcccagcgtgtcggtcggggcgtgccgggccgactaaccttggcccaggcatcacgccccgactaaccccgactaaccttgcctaggcggtccatttggcaactatacttagaaccgacccggaaaaaaagaaataggaaaccggaaccaacaaaataagaaatactccctccgttttataatgtaagtcattctagcatttgtccatattcatatggatgttaatgtatctatacatatatatatctagattcattaacatccatataaatataggcaatgctaaaatgacttgcattatgaaacggaggaagtagaaaatagaaagggttaattagatacatggcattaaaaatttgccggttttgaaatatgccattactatttgcatatttggaacgatgccattgctattagtttgtaatctcagtagtgccactaagatatgtattttgcatgtatgacgaaaatgccctcatcttctacctctctccctcttctcttatcttctagctctctctccccgctgcttctgctccggcgccgtcaccaccgctgctgctgccgctgccgcgccattgctgctcaacgccgctgccgctcacgctgctgctgccgttgctgcttgccgccgctccgcacactaccgctcgccgctcactgctgttgccgctccgccgccgccgctcactccgacgctgccgctgctaccgctcgctccgctcgctgccgccgccgtgggagaggcgcttgaacacgagcttgaagagacgggacgacgtgtcgagcgccgggtcaaagagtatcccggccaggaacggccgcaggaattgctccacgatggatggcgagaacccaagcttctccaggtgcatcgccgtggtcgtctccagcgacaagatgatgacctcgtccgggggtggacgctgcccggagccgggcgaggccgacgaggagcttgtcagcgagtgttccgacgggggagaagatggcggagagggaacgcagaggaagtcggaacgggtcagacaacaggtagaatggctcgccggcgccaaggaagacgagcgttccaggataaaacggccagagccgcaacgccagaaagtcaaggagacgccggcactccgggtagacgagtgctccgacgctgccgctcgctgctaccgccgccccctgttctctgagctgtggaaggaaggagaggggagaaaaagaaggaaagaagggtaatttgatctaaattttttttttgtaaatggtaggtagtgacatatcttgaatctgtgtaaaattgtaatagcattgtttcaaatacgtgaatactgatggcatattttaaaaccggcaaatttttaatggcatatatctaagtaacccttctttgattctcattcccagatctggtttctgcagatgcttctctaaatcgatggcattttttgttttttttccgtcttcaccgattgatgtgtgcatgtcatgccatagtcggtattcatcctagttctcgattcgtacgactcccttccttttccctttaggcctcctccaacaaggatgagtcagctagctcataaatctccatatcagtttttgtatgatgtggaagagagagaagataaggagagagaatgcactatctcttcttcaagagctaagttcctaaagaaaatgtgagaggaattgtgaaacccaaagcattttaaacaatgtgctatgagacaatctattggagagaggtagactttttgctatctcttatatgagatggacaagcatgaagcatgagctagtgcaccattaaaggaggccttactagagcagattagcagatgacgagaatcgagacaaggtgtctgcagcgtgctcgatccaagtcggggagcgcgatagcatgatgactccgtatagaggaatctctgatgcaagatacgtcagttttgcgaggtctccttctcgcgcgacaaccacgaccagctctacgtctccttctccttcttcgatttctcagctttgatacaaatccgattttctccttttcgtttttttttcttgatgcagattagggtgtacatggcgttccttgctgcaattgtcgtcgtaggccgccgccgctccttccccgccccactccggccgccggcactcctccccgccgctctgccgccatcaccgctccacccgccgcttcggctggagagaggaggaagatggagtagagagagaattggtagtgaggatgacaggtggggtccacgtgggccccaccatttttttattatagtgtgcgtgaaacttacatgtgggtcctatagaggttttattatttttcggatcgaattgctacgtaagcgccacgtcaatgtcatgtcagatgatcaccgggtcaaattagccatgtaggcgccacctaagctaaaactggagtcaaatactgccgagggaccttacttgaacggttttgtaagttgggggacttatcatacccggttttgcgatcaaggacgaaagtcaggctaggcgacaaatagagggatccaaagtgaacttattcctattcatatggttggaaaaatgggtctattttgtatctcttctttttgggccttgccctatatggttatttaagtatattttgcatccctatactatttttcttcgatcgtgctgagccgggccggccagacgtgccgagggtgcagcccaagtacggcacggctgtagggccaggccagcacgggtacgacccctgtcaggccatgctgtgcttgggctgggccacgggccgcaggcaatatggccatctatagtttggggagggagagggattataagcgatattggaatggagcgatctggcgagagagcgacaagttacaagttacattataattttttatttcctattcctattttcagtctgaggttctacaaagtaaaagtttttggaaaaaaggttgttaggtctggggagggagcgatgtcaagacccgagctcagaaatgggtaatcaactctctctctgacgtgctcaacaaatctggttggtcgccgaaaggataaactagggttctaattagcctactcctaaagacaataaggaaatttagttctttcttatcttcttcatctggccaaatgccaacttaaatagtctcttacatcaggaatcatcttacagctgtaaagagagtaaagcaacgataatgacaaaaacttgaagtctgcagtggtccttcatccgcagctccgttggatgtaaagagcgaaccgttatccatcgatctcagccattcattactcccttctcttcagtcttcagaatgttcagaaatgctttcagtcttttcatttctatctttcaggttctgtcaagcgatctgtttctgatttctatttcctatttcttattttcccggtcggttatagggagggagaaggattcagaagccatatggggagggaccgatctggcaagagagcgaaaagttacaagttacattatctactaatataaaaagcacgagttgtatagtgcaattaacatcacgattgcaattagcgtcggattaacatgcgattagcgcttctcggtcccttccttcgacaaatcgaaagaaaaaacgtcgccagaccacctgcgcctcctccttccccaccttctgccgccgcgcgtcctcccccgcattccgccgccgcgcctcctcctcctccgccttccactgccccgcctcatccccgccttccgccgccccgcctcctcccatgccttccgccacccaaatctagaaaaaatcgctcctgatggtgcgccacgccctacctctccggtctccgcctcccgtcgtcgccggtcaccgccgtttgattgtgtttatatgtttaccatgatatatagtgctggaacgtgccttgcacgtgcactattactagtagattaaaatgcatcaacggtccttaaacttgtcagtaggtttcacttaggtccacgaacttgcaaagtgtacatcgagatccctaaacttggtttattgtatcatcccagtccaaagccgtgtttaaccgtggtcctgcctacgtggcacgccacgtgaaggctgacatggaatttttttatcctttcttccttcttctttcaccactgcgacaacccttcccctcgtgccgcctctcaccaccgagaaaaaagaaggaaggaagagaaaaaagaaggaagaagggagaaaaaaaataaaaaaaaatccatgttattgtccacgtggcgtgccacgtaggcaagatcacagtcaaacgcggctttggactgggataatacaataaaccaagtttagggacctcgatgtgcactttacaagttcgtggacctaagtgaaacctcctgacaagtttaaggaccgatggtgtattttactctacattatattttagaaaaagtacgaattaccccctcccccgcgcgaactatcacggttaaacgaattgctcccctaagcttaaataccagacattttacaccttaaactatttataccggactaagaacccctgacactgttctgagcggttttgacttgatttagcacacatggcagaccagtcagcagaaaaaagggtaaaaaacccttgggcccacctatctccccccccccccccccccgagaatttagactatttaccatcaaattcgcttgtctcaatttttttaccacccaattcacgtgccttctataatatgtcattaggattgctaattagtctatttggtaccactttctctatttttattgtatttctattttcttaatttcatctatttttattgtatttctcttttcttaatttcatttgtatactttttcaaggtttgtggacgtttttgcccatggacccacctgtcagataaaaagagaaatatctctctggttctggatcgataccagacaccagcgacgccgagcgccaccagacactagcaactaccactgcgccgccgagcggctccgccccaccaccgcgccgacgagcggccgccgcccgggtgcgtcgccccaccaccccgccgtcgagcagcgccgctagcactgtgcgccgccaccccaggtcgacgcccccgttctgcctccaccgcctccgacgccgagtatggtggcaactggatgagctccatcggcacctagctcttatttacagatgatcgcttatagtgccgagcatgatggcaactggatgactgcttactgaatgttgtaggatcttaattagttctcatttacatatttcctgggtgcttgaggacattgagtctgtaacagacatgcatattgtagccaaaaagtttcaggtatattgcaatattgcaaacctctaatggcgctgatggctggggcggctggaggtggtgccgcacagtgccggccgggtggtggtgaactgtggcggcgggggcgtcggtggtggcgctcggcggcggctgagtggtggcacttgggcggcggggatggtggggctgcgggtcggtgctggcgctagggcggtgggtcggacggtcggtagtggcacctggcggcggggcgacgccgaagtagcgcgtgtggggcggcggtggcgctacgcttggagggatcaatcgatccagaaccagacatatatttctctctttgatctgacaggtgggcccatgggcaaaaacgtccacaaactttgaaaaatatacaaatagaactaagaaaagagaaatacagaaaacatagaaaaattggtaccaaatagactaattagcagtcctaatgatatatcatagaggcatgtgaattgggtgttaaaaaagttgaagcacgcgaatttgagggtccccggctaatgacatattatagagggcatgtgaattgggtgttaaaaaagttgaatcacgcgaatttgagggccccccccagcgcactctggcggccaatggcggaggtgggcggagcgagctcgcgtggctgggggcggaggcggaggtgagccggttccccaaatccggccgccgccgccaccctcatctcccagagcaggaggcagccggagctcgctcggggaggcgtgtcgaggcgggcggatggtcggcgctgacgggcggcgcgggaacaggcggtgggcggcggtggtgagggggcgcggggacaggcggatggtcagcacggacaggcggtgtgcgggagcgcggggacaggtggtgggcggcggcacggggacgagcgatggcgacggcgcgaggcgagcggtgggcagcggcgcggggacaggcggtgggcggcggtgcggggacaggcgatgggcgggcggacgattggcgtggacgggtggtgtgcggtggcgcggggaagacgaggtgcctctgcctccagtcgccgcctgcctctccatcacggcttgcctcccgcgcggcttcaccgcgctccacgccgtcgacctcccggcgtgcgcgcccccgtctccgggtgctcgcctacttcgggctcgcaccgagctagctcacgccgagcgcgtggcgcctcctcgccagcttcaccgtgctatgccgtcgcaccggtgttgcgccgccgccgctgactgtgctccagcacttcttcacggcgcttgggtgcccgcccagggcttggttcttccgcgccgccctgtgagagagagtgtgtggagagagagagagagaggaagggaagaaaattatgtaagaccgaagtcttaccctcatccgaaggactttgttgctctgcacgacacctgttccgcacgaatcacagcgcatgcttactccctcaatccccctcgtctcgcttcggttcctcattctttcgctcctggtgactggtgaggagtcgagctcgggcccgtccgacagcccacgcggcggcgccccgcagcatcgagctcatgagggcagccaggaattagaatcaaggcatcaagctcgtgcttccggcctgcttgtacaagatatctcaagatttggaagaaggtgtgtcatcgattcgaatctgctccttgaactgcaaagagttgcctcacgatgaaattattcaacgattagattttgcttgccgttgagtttagtctgtatggtgcattgcactgattatcattgagccttcaaagatttctttgtatttgagcctttcaggattataatatgttgatgtcttgacgattcttcccgagcagcgactcatgcgagcatggatgctgctgagtttctctgccacatcacgaatcccgctcgatgcccgcgacagcgacagccgcgagctcgacgcctcgccgaggagagcaaagagaatgaggaaccggaggcagaaggatgaggggagtaagcctgtcttgtgattcgtgcggggacaggtgtcgtacagaggaattaagtctttcggatgagggtacataattttcttccaggggaagaggggaaggggagatacgacggtgggtcccataactttttaaaaaagaaaatactgactagattgccatgtgtacgccatgtagaactatactactctggattagatcgaggggggtaattcgtccagtattgaaaattcagagcgaacaatgtctgtttttcaggtttagagaggtaattcggtcgaccgcgatagttcaaggggagaatttgtagtttttccttatattttgatttcctattcctatttcagggtagatatgttaggtgggacgacaaaaccactataattttttttaagtaagccaagacaaaaataaagataaagataaaataaagatttagttgagaataacaaatgaacatttctaaagggaactaacgaagaacatcattacttttgagtcatgtgaatggagctgctgaatttcatacgcctccaagtgcacacaaaccagtgacgaattgtcgataactcgagacaaaaccataacttaccatgcatgctctagcggagcaaagcaaccaactttcacaaggtcagctgctccaccaggcaccagccaaccttcaaatctaaaatacgtcgtgtgtacattgattggtggtgagaattgggtggatacatttatcttctcggttgaatttgcttgatccagtgttgaaattgcacgatttccggttagcaatctctgacttttctgtaccggctggttgcttgttgatatggtggttttccaagttctaaatggcagtgttattatatttgagcaaaagacaataataagtgcttaatttcaactcaagctcatgctcttctttcaaggatctcgcactctcgtataactgcaaacctctcacgtaagctttgagtacgatgcaatagtttagcactacttttgtgcttctgtgtccaatacccatcgtaacaaacaattgttcactgtagacaggtcaatgagcaggtcatacaaatatctaacattaccatataaatggtaacagaacgtggtacttgtgccgactccagactaataggaaacctcacccaaaaaatgaggaaaattgaaatgctttttggttaagtatgtaaccaatcacagagcatataaaaaaaccatcgcagttgggaggcaattcataaagaaataataccatcccgattatagaagggcaaaattaaggtatcttacaagctatatcattgcaggagatgatatcacacatcaatagacaacacacggagacacacatcagtaaagcacgccatctagtctcttactacttgtaacgctccgcttttcgtgagtcgttaaaaactaactcggcaaaatcctaattgcgaaaattttcgttctttgtgtgagagtctaagttgtgccaaggatctcaatttaatcccgttgttccctctcatcgaaatcgaaatcctccacctcgaaaaattccttttccgattcaagtctctgaaatcaaattctgaaattcaaatccttcctttgaatcctcgccaaatacttctacgaatctagaattattcaaatctcgcctcgaatccttcccttgacttcaccttatgttcctaaagtcaaagtatcaaggttaaattccaaaaatccttctcaaattctctccaattgaaacccccccaccaaatcagttctctcgaaaaaagtctaaattgcgtccttcttggctatgggccgtttctcccttgctcggcccatttctcctcagctccctccacctccacgtgcgctgcacgcgccgagagagagagaggcatcgcctctcttcttcctctctctttcctcgctctctctctctgcttcctttctctctctcccacgccagcgctgccgccatcgccgcttcccgccgtcgccgcccaaaacccgccaccgccttcgctctttcccgcgctcgtgcgtggccgaccggccggtcgttgccgccgtcagccctgccgcgccctcgcgtccgcgtgcacgcgctcgcgcgtgggtcgccgccgcaccagccccgctgccctgccgcgctgcaccacgcagccgcacggccccgcgcgcgtgctcgagccgctccacgcgcgtcctgccaaaacccggaggccgagctctccctctccctcctactcccttcccgaatcggcttggagcgagcctctctttttccccttctttttccctttcccgaccaccatcggcgtcaccgcctgccaccgcctggaccacgggcgcgaccgccagcccgcgctcacgacccgaaattcggccgtccgatccaccgccttcgccgcccaaagcatccacgccgtcgccgcttttgcatcgcccacgaaaccgccgctgccgccagccgagcgcttgaccgccaaggtcggttctcccctcccaaaccgacatcgcctcaccccgcgcctataaaacccgagcccttcccatcgaatcctcctctcgtttcacttccatcactgccgcgctattgttgttgctcactccactctcgccgtcgccgttcgtcgccaagcactggggaggccggtgcgtgcgaggacgcgtgacgcgggactccgagcacccccccttcttccccttccccggcctgagaacggagaactcactcccgcaccgtcggccactcgtcacggtgccgtcccgactcggtagtgactccctccattctccttcctcgttctccctcgccctctctagcttgcgtggtagctctactagcccctcgaaagcgcgtagacaccgccccgagctccgccgccgctcggcatggcctcgccgccattgccgcccgcttccggaggccgccgccgtcgctagccctcctcggtgctcctccgccccatccgatgccggaaacggatttcttgaaccccggacatgcccccaccgccttgaattgaatccccgtcacccctccgccgtttcccccttttcccgccaccggcgtgcgccgccgcgattcgtcgtcgtcggcccctcctcgaaggatccgagccgttggctcaacccctctcgtgctcccctttgtaccggtgaactccctctcgatcgaatcgctgcgtcgtgctccggtgaaaccccgccgtcggccaccgttggttggagctcctgttcttcttcctcctctcgcccggcccgcgtggctgccacgtcggcgccacctcgacgcgaccgggtcaaagctgacctcggtcagccgcctccctccgtcccccaccctcgcgcgcggtccacggagagccgacatgctgcgcgtgggcccgccgcacaccgcgtccacccgcgcgccgcgcgtggaccgcttccccccccgaaccctagcgccgccctcgcgtgcgcccatcccaccgtgggccgtatcaccgacaagcgggccccacccgggaccccgcgcggtggaatcggtccaccgggccgtctctctcacccccgcgccccctctgttgggccgcctccccgtggccgcgcccggcccaatggctcggccgagcctccttcaaccctttgggccgcaccaatgccacccgagacaagtccaaatcacatccctcatccctttaattttccaagggatttaataaatccttttcctttgtttcataaataaaattctttattccaaaattccatgaatcattttcctttggtcccgcacgtcagtgactgtcaataatattcttgagaatattatttctataaattccataaaccatttctcgtcttccagaaattccaattaaacttccaaaattcatatcttcccaaccgctcttccgattgactccgttcaacttccaataattccgtaaattgagatctatttaatggcactactaattagtctaaataggatctttctttttgtcttttgtttaggttttcgattgtttgcgtatagttgcagttatcggattttcgtcgatcgcgggttttctcgaagattcgtgaagcttcgtgaagaccttgagcaaggcaagtcaccctttgatcaattgcccctataattgaaaagtcattattattttgtttgcaacttgcattattataatcacacacttaacttgcttggcctcggtttgcgtgccaaatcgacggacctacctagtagtcgcactaatttccgtaggtcgtactaccctgattccttgtcgctccacccttgtggtacctcggtattcgtgctctctgagcgcgtataccaaatatcccacatacaccgttgtttgtcgaaaacttgggaaatgggtttgtgaagccttcaaaacccgacatgtggtgtcggtgtgtttgaaaataaaatgaattgtgaaaacttgcgatgcgggggttgtgcctatgtggcactgtcccgtattcgcatataaggaccgattcctatgggaaactcatcgaacataatcaaagtgcaaccacaaggtggaatgggacaccctggctaagtaactagtcggttcagggaaacctcgcatgccaatagttgggaacgttggggcggggtcggttggagccaaaccgggttcctggtaatgcaagaacgagaagcttgctgaattaccgatcgaggtggttggagtttgatttgtgaacgcctaaaatggcctatgtttatgtgaggatttgatccttctatgtggcatgaggtatccctgggtcggcttgggaaaggctttgtcgcgaacctctgacaccggccagtgtctggagtaagttcgtgtcttgtgggtaaagtgtacccctttgcagaggttaaccaactgttcgaacagccgtgcccacggtcatgggcagatgtgaggtggttcccgttgcgtagatttgtttgcctgtgctttgtgaaaagttgttgtggtgtgggaatcgtaaccagaatcagcctatgtggcagatggacgacctgagtggtcagaaacgaatctgtgtgattcgggatgtctgcgggcatcatagactaggcttcccgagtggaagcggattgttgtgctgctgggcagctggactctgggagtccgagaaaatgaaaaaggctctgggagccgattattcaagtggaatggctctgggagccgagaagtaatgatctgacccgggaggtcggtacatttccatttgagctgttgaaaagcatctcttaagtcgatttgagacgtaagtctcttttcgacccaaacttagaaagaaataattcacttagtgatttcaaaatatcttcaaataaaagatttgcaaaacaaccttgcctctcttccaagcttgcattaaacacctaagttcccgtgacttgctgagtacgaaagtactcacccttgctccatataaatatatatagttcctccgccctgaagagaagacaaagtgaagtgaagattagggtttcgtcctggttcccagccgtcgcctgtggtgttgggtgttagaccgttggttccgctgccgctgttgttgttggtgttcgcctcgtccgtgttgtcggttgtattctcgggctgtctgagctgcaacctaagttaaggtaaataagtcctctatttatttaaggattgctatgattcatatttgtcaccgtgggtaccagcactatgtcctgggactggtaccgagatcgcggtttcgtaggaagcggttcgcgccgttttccctacgacacgctcctgtcaggtgccgttgtacggcggtatcagattggggtgtgacactactagacttcatccagagattgtagggttactaatagatagtaggatgcacaatggataaaacaaaagtccaaacttgtgacattaataatacaagcatacctcttatagtctattaagatactaatgaaaagtggactaagggaatcttcttggaagcaaagcaagtctcaaaatatattagaacactgactcaatgaaagtgccgtcagtagtggtgtgacatttcgacttgtgcttgatcattcggagtttctttttgccaccattgccgttgccattgccattaccatggccattgcaactgttgcttgcactgccattgcaattgctgcttgcaattctgttgtctttgccaccgttggcactgccattcccattgccctggtaggtacgtggcaccacctccacaccggttatgatagcaaatgtctggtcaatgaaatcatcgccgtagtagctaattctcgtagtattgaagaaccttgcaatgcagaacttgcccgagcctatgttgacaagctgaggcccctgcagtagatcccagtcctccagcgggtcaaactccttccaagtgccaactagctgtggtttggagtccaggttggagagatcagcagcagataggtggttcttgtcagagaatccaaaccagagattgagttccggcacatactcaatcttgccatacaagggtagcatccacttgccaaccgggctccaagtgtgggtcgcaatgtccatgcagtaggtgccaacgtcctccattgatatcaagatttaggtgccaccaccgaccactgcgtaggacatgatctcggagcggaccttcatctgcatggggtcacgtaggtaaggcggcggcggcagcagttggcacttccagtacttgaaggatgtcttcttgtgctgctggccataggtgtacgcctcaaactggtcactcgtctggtctttgtagcgcagctccatattgggactgctctccatgacaaagagggtgccaacatagtcttcatcatactcctcctcgtccatgttttgactgactgcgctcgggatgaagagggagaggggtttttccttgggtttgtggaggctgggcatggtcaccacgtggtgcgtctcggcgtcgaagaggaaggtgcgcccagactggtccgcgcagagcatcttgctctccgtgagtgggaggtattggatgctcctcctctggtcgtcgtccttgggtgaagctcggaacgtgatgatcgggtcgggaagatgaatcctcggcatctttgacgcctcacagtcggcattggccaccgatccttttccgtttagtggtggtcctgggttaaagaatttctggcgcgctaggtcgatgcggcgcagcgacctcaacccaaggatgcggctgtccataatcacattcagaaagcgtcgcgagaggctcatcgtcgatccacaaacttcaaaggaaaaaaaaatcatcagaaaatatagtgaagattcagtaagaacgagagggaaaaaaaaaaagaaagaacagacaatctccgtgatttgggtacggtactagctagcaagattagattgcggggaagaaagagtagaagcacggagcaacaaaccgattcgatctgctttgcagtcaatccagggagcgtccggcctgctctgctgcaggataagatggtatcacaagttctgcaaatatcaaagataaaacaacgagaaaatgaaaaaaaattggctttccaaccgagaggataaagataaaacagatgtagaagtagaagcagcggacctggggcactcggttggaaggggcagggcgtaggcgtagctccccagtggccggccggaggacgaaggcgagcaagatggcggcggaagggcgagagaaggcgatggggatggatttctttctaggtctggacgcctcgggacaatatagtaaacgaacctacacgtctctccatgggagaagacagttattcaaagcttctccagatttcatctcaaatttaatgtacttctttttaaaaaaatcacgacgaagttctttaatgttattagtaccttcataaaaattattcaaagcaacccaaatctcatgagcagtttgaagatgagcaatacgatcataatccgaacgagaaatcccactcaaaagaatattgcgagctttgcaatttagttcaaaagtagttttttcagcagcaatattaatagtttcaagaatcacataagaaagagaaacttttctccaaatattataattctcagccataatgtaagattgcatcctactacaccaatgagaaaaatctgttccatcgaaaatatgaggcttagttgtaaacttattagaagtagccatggaaaaaactcaagatcggtaaagatcaaaaagagcaaatgtggctctgataccacttgtaggatcgaatcacaagaactagtccaaccagaggggggtgaatagttggtatatccaaaaaccaaaaacttttagtggaaataaaagttaccctcgaaatcaatggatcgcggtctgaccgaagtagtagcgccggtctgactgcctgaatatcgtcggtctgaccaaggttgtaacaccagtcgaaccgccgagatcaatcgccagctcctgtcgccgccgccggtctgaccgccctagtaccgccagtcggaccgccgcgatgccgccggtctgaccgctggtgagatgccggttagaccgccgaaacccggtgaaacataaatcgaagaactctcaaagtagatgaaaactttattgcttctctctgtgtttacaaagtgcaccaacagcactccttacaaaaatctcgactaaactcgaaaccctaactaaactagcaactcaattgctctcaaaagcgataccgggaagcctcacgctctctctctatttatacatgaggtaggcagcctaaagccacgaaccaaactcatactaagagtcctaaacaccttaggaaaccctctagtacaagaaataaactccacataaccaatcgtaccaaatttggactccttccaaattcgactccgcatcccatacgcacacaatacctccatcgtatgccatatagaatctccatcaaccacgtacatcaactctagccttagtatcccgcatgatatctgaccaccacggacatcgtcttaccaccaagccgactcccggtccatcaccgcaaatactctcccgaggcatcgagtcacctacacatgaaacaaacaaagaaaccatatttcgagaccaagctatctccaactcgactcattgttagcaaagaacagtattacatacgtatagtatccatctagaagccataaccatgaaacaatcatggatatccaaataaacaacacgaaaccgaaaccgacacagcgtcggccagtcagaccgcgggcaagccggtctgaccgctcacatagcgccggtctgaccggcaaccaccgcccgatctgaccggtcccgacaaaccagtaaaccctgttcatctcctggaaattgattatctccaaaaccacttcgacgataatctccaaatatcaaaaccgataatcacaggtaccaattgttcatcacagaattagaatcaaaacacacgttgatcttacagctacaaccgattaaatgccgtatctcgcatgtatatcatcagttgtaagtcatcaatttatccttatacatcgataccatactattattatgtttgtaccgcgctattagtaagtgaaagttaataataggtaaaaaataacaatttaagtagtgatttaatatatatgtctaatgtctatgtcaagtggtcagactcatccaacttatataacaattagataaaaataactatgcaaaaccaccttaggtggttctataaatggtattgtcaaattgaggggattgaatattcggtttcaaagtttagggtgctagataaactttaatttaaagttttttttttttgggggggggggaatctggacctttcctttaactatttcctacaccccaaatacatgcaaaagtctaacaagttggatctgttctagtttaagccagaggagtccagtatgattctgcacggtggtgacatttgcctcgatcttcttttttttctggcttggagagagtagtccacaccgctgaaaatttccgatgtctctagttccaagattaccaatatgatgtagagtattccattgtattggtatgccattccctaggcagagacaacatcaacaattgttgatatgaccttaccatcatgatcccattgtatgttcatctatatatatagatagatatataatgaaagtataactccctggtccccggcgtctgcattaactagaatacataataatttatgatacaactgcagcagaatcatagacaggacttgcagaccaaactctggtggacaaaaagatataggttgtgtttagttggatccaaagtttgaattttggttgaaattggagatgatgtgactgaaaagttgggtgtgtatgacaggttgatgtgatggaaaaggactgaagtttggatccaaactttggatctaaacacatccatatataagggaaaatatcatttatgtatatgacggtctgtttttgggtacactgtttggaaggctgttcacctatcttatagagggaggaagaaaaaggtcttacagttacagagtgatttgtttttagagtaattctcagttagtacgtcatataatgtcaaattctagaattagagagagataacatggatcttttttttttcacgaatgttgtgaattccttagtgctttgtgaaatgcacgaaaggagaatttgtatggactcccaagtgtacagttcttttgcatcttgcatggaagaacatcattttctgctgttaatcctgattcacgagcagcaaccacataattggctgcacttgccactctggtccgtggccaggagactgttcctaaacagactgaatttccggtgtctcctagtcccactcccaactccgaagcatactttctccgtctcattcgttttttttgacggagaaagtatatcagtaaatagcaacattgagtcatctacgactgcgtttgaccttgaactctcatcgatcctctttcggggtcatattatcatacatagttgcatgcatgtcttctgttccgtgttgtgatgcaactatgggcctgtggcagctatttatcactgaatcgtacatggacttttccgaaccatataactctggcagaaacatattactaatgacaataaattattgctggagaagagcacataaatgatgatgtaagcatacgatggtctatttctaagacaatttgtatggagggtttattggtagtacaagtaataatattcggaaagtttcggaaactgactctaactgtgttatgtcgagtgtgaattagaccccaagcacgtgctttcgtattagccacccccacctgaccatacagtgcaaaaattcattgaatagagcaggagaaaacttacaagactagagtcctaggaggcaatagctaggaaagaaaaaaaaataatcaccaccacatagtccaagagaaggccagcactgtaccggttactgctaagtgtgactggcagccgctaggctaacaaagaaactatagccgagatcgtccatgatcttctgctgatggtttcccaattcttcctaatttcacgaggttggaagctatgccatctttcgctgcattagccatatgcatgacggcaaccagacgacatttggcccccgtgtttcatggcggtagcattacctctagacactatcgaatttccgatgcatcctagtccccaattaatatatcactatcccataatcccatttcatgcctatgatgctcatcgacgatatatacgtggagctgcaatggttgtgtttggaggagcaatggctacagctcggctacatgtacatgaggttgaatgccatatcctgggctccaatgaggctgtggcaatattaagacctgactatggggcatttttctgtctatatttgtgttcttgtagatcaattcttatgatatgtgatgcttcataattgcaaagagatcaaactgatagatccagtacaactggcattaatttttagctgttatataatccgaggtccgaatgtggtaaagtgtgccaaattgtttcatactgatagagatggactactggttgagctgctatttttatgtcaggagtagatgaaatttactttgtaaacactccggggatgcactaatgcacctttatcattctagctgaattttctcatctcatattataagagaacctctcctttataaagtagatatattagaaaactttccttctcatcacacttttaatcgattaatcccatctttgccttctaatgccatcgatgttctcagtttgttttttcaaaagatattataactatttgaatgacatgtaaaaaaccatttgaatgacatgttaaaaaatgggggatattcccttaggacaaaaacatgcgcgttgaagtgtgagtatgaaattgtttctattggacaaaaaaaaaagtcactgttaactaatgtcttctcttaatcagaatagcacaactatatatgcctatattataaatatataatatcacaactaatgcgcggtgcactgtcttctgaactcgttgctgtgggcttttgtatcaagaatcatttatttgaatgcagctgggaaagagttggacaaatggatgtgtgaaaaaagtagccaatataatgtgacagtaaagcacaacacaacgttcaggtatctttttttttgttaatagggactgtctgtatatctcttgatagaaaatctcaccttccatctttcaaattttagactatcggatatgctttaagattcgtgcagaaacattaaccctagctcttttccttccgttcccctcgcatcgctcgttccgccgcgcccatcgtgcttttgttcgctccgcctgatcccccgccgccaccgccctactgtgtcgccgcccgcctcgccggctggccggagggtgtcaacggcgccggcgagacgcccggggcagccgtcgggcggtggcg

SEQ ID NO: 5624 - DNA, 31414 bp, Oryza sativa
tggcttataccttcctttactggttgccgttctatatccggcacaatggtatgtcctatatgcttcaagtacattctatttcttaatttttcagttgagaatcagtagagtatgatcttattgcttgatgctagttttttataatcaccgttaaccgaatgaagactgatagtatctactgtctagcactctagcaatgggtttaactcaactatctgcgctgcaagtttgttaaccttgcatcctgagccctaactttgctgtcaaactctagaggcttggaattatgttgatgccagaagtttcaagatgctgggttttaggcctgattcaaatttgttggatgattagatagttatgtagcatcatcaatacatcaattgaattcaaaaaacaaaagttctatttatgagaccgtggtttatgttcccctgtttgatttagattagtgagtgaattattattgtgcattatctacttgattatagggataaattaaatattttgagaaataaatttatcaaatagcttaaaacaagtgctctaagcaatgcagtagaataagttttcgtgagaacttactttttgaagcgtgaagcaaataatccgcttcaataatccagtgaataagctgaaaagaacagggtatctagaggatactggatctttgcatgtggaagcaccatttagttgttgattgaaaatactatgcattaccaacctagctttccagctagaggcatgaaagaactaatagaatttgatgcaagtggctaatctagcttattaagcataactatgcccttctatgatgaaatgaaagtttgtcttctatctgtaggattttgtgaatttctggtagcattatttctgttctcgttgtctggagtaagatatctatcattttagagcaaacataagagcatgttctatttactcaacatcctatgtttgattttgcagctgtggcaggtcagttcttatcacacaaggcttcaggaattttgtctgttgttttcgatattggaggagttttgggaggcatttcggctggtttgctctcagacaaaataggtgctcgtgctgtaacatcagctctgttcctttttctttcaatccccgcgcttatcctttaccggacatatggaagcatatccatgcaccacaacattgggctcatgttcctcgccggctactttgtgaatggcccatactcactcatcaccacagctgttgctactgatcttggtactcaggatgcaatcaagggaaactcgagagctttggctacagtgtctgcgataatcgatggcacgggttctgttggggcggctttgggacccttgttaactgggtatatttcaacaagaggatggaacagcgtatttttcatgctgattgtttccatatcacttgccctggtgtttttgatacggctggcaaaagatgagattgttagcaagatcagtgcgaggcattagtctttgtatttttctgatttttgaggactgtagatggttaggaagagttgtagatgatagaaatacgccatttctttgaggactgtcaatctttaatcctggagacctggattatacatcgtcggttatatgcttggcaagcaaacatttgatggaatcatttttgtacaaaatttccccaatattttttgggcgggccaacaattgtccaatatcacggcacacaatcaaaatgttctacaggttcttgatgaatttctgccggaggaaggagaagtgctgacaagtggaacctgcatttttttaatatttacccttgtcacttgcacatggaacccacttctattttaaattctttaagggcattaacaatgtttattacaaaagtaggtagtaaggtgggcctatgtttgatgaattgatggtaatactctctccatctcaatacaagtgtagtagtagattgaagatacaccacaatgtatatatatgtgtaaagtgggtaataaggtggagcccatttaaaaaaaaaacaaacatgagtcatgccacaattaaaaaataggtaggtcccaccacaaaatacttataacttggtagtaagcttatggtttagtcgtagctatttactactttcacaatgtatcttacttagtagtaagaatattttaatgtctaatactcacctttttcactacattgtgaatgtcctaatgactaggctgccgtgtcagtcaatttgacaccaataaaaaccgtttcccaaactattgaaggagtcaatttgcattagtccctttaagtgggggaagaggtttggttaataaccgattttgccattgagtgatgagattcgagcaatggcaagagttgaaggagtcaaaatagacttattcaatattaggcctctacacgatgggccttcacaacgccacccctacgccgacgccgacgccgacgccgatgccgatgctgccctggttgccggcggcggcggcatcgaccgcgacccctccccgtcggcgccaacttcttcaattccttcctcgatggcatcgaaggccaattcctggctgccggcggcgggggccccgcggtgcccctggccggcctcaaccctccccgttggcgccgatttcttcaattccttccacgatggcgtcgacgcagtaagctctgtattccccattaatccgttcacagcaacttcgacctactgatgatgcaaggtcctgcaggttgcccccaagaacgggctggttgagtggatgaccagactttttttttttttatgaaggtggatgaccagactgattgctattccccaatgcgaggttttgggtccaaaagtgagcagtctgcagatgaccaggaccgatccatctccgaggaaactactttgtttttttatattattattattattattattattattattattattattattattattattattattattttctcgtggatttagtcattgctaccatggagcaagcatgccggcagtccacttatccaagactccaagtccaagccccactcgcttgctggaataaagaaatctcaggcttttcttctactaagagataatgtgcgcgggctggctagcttcacggttgacgccgagtcacgaggccgatgctgacaccgatttcttttcatttcaggtaggcagtcattaccgtcgaaatcagcgacctgcttgatgccaccatggggagtgtggaatctgctggtagtggtaattgagtgtgatgcaccgagaccatcagtataaaatcggtgcctgtgggttaaatttcttgagagctagcgtatttgaggattgggaattgtggtggccatgaggaacccctgcatttggtgttgcttggttctgctgaccttggtggtctgcgacagttgtttgcacgaagagaggaaacatcttatggacatttgcgatgcgttcctttggccggctggcaatccgcctgactggagtagcagagattgctgccggtgggagagggtgacctgcagctccatcacagggcgtgtcacggcccttgatcttgatgcagcttatccgtcgtggtatggcctactcaactgcagtatgttccttccattccgtgagctgcagaatttgtccttgggaaatgccggcatcgcgggatgcatgcctggtgcaggtcagcaggtcttccttccttctcctccctcaagctgtttcacatatcgaagaaggcatttaggaacattgatattatatatttaccaagagaaattttacaatccttgagaggtaccacaatttttagtgcaaatttggtacctccgtacctccggtactgagaggtacaaaattttacagtagaaaatacggtatctttcggtaccttctcaacgactttaaaatcactcatttacggatttaccaatcgttgggccgcaagttgtagcaactaagaagtctctgttcagaataacttggatttcaccacaccaaggttgtcttgctagatgtaaacaccttgtccctgtgacccaccgaggaagggatcagggagctccctagggtgtgtgatgcttaggtaaaatggtcaccttggtgtccttttgttggaccttctctaggtaggtgcatacgtatgcacgcagtcggataactcctgttgcattagtctttatttttactaattttcatatttatagtgtttttcatcattcgctgcaggttttgaagtatggtctaatttacgccaactggaaatcctcgatctatctgaaaatgagttgaatgatagtagtatcatgcccttggttggacttgcatctctgcgttccccattcctcggtgggaacgccataaagaatgactttactgtccaaagtaagcatcacacatgcttgtattttcaatattagtttttttcctgacaaaagattttttatttcggaatttatctcttattttggtttatttattgtatgttataggattaagcaaaatgaagctggatattcttgatctaagttggaatggaattttcgggaacatatcaagaggtatggcatctcatttaaagtttttgtgaaagcataaaggtgcaatagtaaatgagtaaatgaccgtgtcatggttccaatattttacaactgtttctacgttgttcaaaataatctcagccacgcttacaaattaatggcatgcagtttgaagttcaaactttgaacaccgatgtgagtgtggtggaaaagtgaataactttacactttacattggggcaccaaatttaagtacatgattattatggtagtaatatatcttgttctccttcaatcgataaaataattcaaatttagtgtgatcacaaagtagatacaccaactccaaaccacagtgtgcttaacttcagtagtttagaaccagaagctcccaagtcccaagggcaaaaacttttaattgctgccttgtgggagtattctttcaaatagtcatgtcaaagaaatcttacttaactctgctctttatgctattttgaaacattagtatgacttcccagttcccaatgattagtatgtacttcctccacctcataatatagcaacgtagtactacgtatgtggacaagccccctgtccagatacgtagtactaggtgatatcccgtctagtactaggttgctatattgtgggacggagtgagtactcgcaaacatagcctagaattaggagcagctatgtgtaggaatcatgtactgacatcacacagttcatttcatttacagctgtttgcaatatgacaagtcttcgagaattgcatctaaacggaaattttttctttggggtgctcccatcatgtatcagaaatctaacttttctcagagtacttgatctgtcaaataatctcttaacggcaaggttccccactatttcgttcgcaaacatgacgttacttgagcaactttccctttcccataaccagcttgaaggtctgctactcctaaactctttttcaaatcatctccaactgaaatacctgagactatcaagcaacagtgccagcttccaagtgcaaactgagaatccagaagcaaatatatctagtcagcttcaggttcttgaactatcaaactgcaacctgaatgccaattctggtgttgtaccaagtttcttatcacaccagcacggattatacctaattgatgtttcgaacaataatctaagtggtcatttcccgacgtggttactggagaataatatatatctatcatacttgagtgtgaaacataactcatttgttggatcactcattcttccttccacagtaaatcagaacttatcatggttagatgcatcttataacaggctaagcggggaccttcctgtggacatcaacatcacattccctaatttgagctacctaaacttatcgaagaatttttttcaaggcatatttccttcagccgttagtcacttggagaatctttcaactttagatttatcttacaacaacatatcgggtgaaataactgctagttttcctacaactatgtcgatgaatcatctagtgctaaacgataataatatctcaggggagattcctactagcatttgcaccaacgtgaatcttggtgtggttgattttagcaataacaagttgactggatccattccaaattgcatagcttcaaatcatctattttttatcctcaatctaagagggaatcatttaactggatcaattccaacaggtctatccagccttttgaatcttcaatttcttgatctgtccaaaaaccatctgtctggccccttgccttctttgcccaatttgacatatctccacttaagtgagaatgaactgaatggaacatttccccttgtctggccattcggtgctaatttgaagacaatggatctgcgatataaccaattcagtggtgcaatcccaagatgtatagatgaaacttttccagagttacgaatactattgcttaagggaaacatgttcgaagggatggttccaaaccaagtgtgtctacttacctagccctgtcttttcacatggacaactttatgtcgcactctcacgtgtaacatcgcctgatggtcttcgtattctaattgagaatagtccaactgagcatgtgaccagcactcacaatgttgtttacaaagaaatatttaacgatctggatcaacaaggaatgcatacatgattacaggtaagtcaagcatacgtgttctacctattggtaatttgttgtgtttggttgccttgcccccaatgtgagtcctaggttcttttttctcagacctactaacttgacctgattatattctttgtgttttgataatgtcaaatttacctatcttcattgtttgcaggattctttatctgaaacctctgccttgtcaaagcagcacgcagttggtattattacaatagttcagttctttcctgtctattttatgtgatcttcacactcaactttcctctaatatatgccttctggtatccatggtttcttcgtaagtttgttttcctctttttatattttgcattctgaccactaaacaagttcaatgtgaaaagaagtttacagcattttacaggttacctatataaatttgaagatccttgcattcctgcattaattgccaaaagaaaaaaaaaatcttccacaccaaatctagattctctcacagctaatgcttttaagtagtctatcatatttgatcacacacctattcctattaatttagtcttggtacaagttcatagtatgctataattcatcaagttttccatccatatatatgtttcataacatgtcttaccacttcatttgtcatctcatcaactgtcacatgatattattttccctgtttcaatgtgattagccacttcaacaactgtatatggatgtttcacacacatacctattttacttaaaaattaatctgttattcactatgctaccagtcttgattatggctgatgctcataatcatactataatgcagctgccatcatacgaagaaccaagcatccagccatctcaatgatcattataaatttcatttttccatcagcaggtgttctgctagaaaatatatcaatgcacctctatgccctattatgtaccttttggcttgcaagagtgttctacgagataaattatttgtctcactcacttgtatgcctgccatgtaaataatataactattttaattgccaactgactaccgtcatcagttctttttgtccgatgaaataacatatcttacatatattatatgctttagtaagtaaacttccagtaatatttttgttgtcatgtgaaatattaaaaatatatgtattcacatttatattaacgacactgcagtttctaatcatatcagctttgacgttggatttatatttcaaaatctacatgaataccttttgtttccgtgcttcactccatgcttataataaccaattttcattatgtcccgcggcaacgcgcgaggcacatactagtgttttatgatcatgttgtggccaacagcttgtgataatgctgggtggttgttttcttgtctgcattttagtgtcagcatatttacagtgataagataaacccattttctcagaatattttgatctggtgtttgttcagagtctgtgcaattcaatctttgcttaaacattacagactggtgatgtcgttttgaactgatgatgtcgttttgactttttacttgtaacgtttgaccattcgtcttatttaaaaaattagtgtaaatataaaaaagataagtcatacttacttttgataataaatcaagttaaaaaaaataaataataattctataatattttaaataatacgaatggtcaaacattacaaacgaaaactgaaaacgacaagtatttaggatggagaagtatttaggatggaggaggtagtactagtatgttgtacaagttagcctatataattaatagcctgggagcccgtacattaacgggccaacaggcaaagatgcaaatagttagggagggacaatgattacttttcagttttcacatacggactgcgcacgttgagatgagatggaagtacttcctctgtccaaacttgtggacttgtcgttctaaaatgtttagcatgtattaaagttagaagaaaaaacccataataccctttcataaatactcctaatgtatagttggatgtaggatggtgattaggggcgatcaggtaatacccctacatcctgttggccggagccgatgttgctttttattcaccataatcacaccagtacaatatgtgaggtagcctatctaactgttgtcgacatggcggtctgaaggtctgacttgtagtcgacaacagggtagccttcctcctcgaactcgcgcccgacggaatcagagacagtgctagatccctacggccggcctctgaaggtaccggatagggtcgatccaggcgtatctctgatgtcgatatccggcggcttgtcttgacgtatgttggcttgtatgttgtcccgtgtattgtgttgattgtctcgtcatggtgggtgttgatcgtgttgatcgtctcatcatggttgtcgttgatcgtgttgatcgtctcatcatggttgtccccctgtcctcctaggggggcttgtatttatacccataggtgtcccattgttcaagtagaactaggaaaaccaatatggatacaatccgagtagtccttgtcgtttccatgtagaactctggttgtctttccttatccggaactccctcaaggtcagtttccgtataagacatggtatgtggtgggtcctgccgagatttagtcaactactattaggtatgtggtattcataaccatgacactctttgataaaggtttcgttaacagctccatcttttcacttatgtgtatgcttatcagtcaaaatttgaattctcaaccttaaatttgaagttgattttagaggggggggtttatcgaagtttatttttcatcatttgcttttagatcactaagaaaatgtatataaagttttatttacaaattttttttcgtttgcaaatatgccgtagtggacataaatttatgtcgacagatatttgccctaattatagttgattttgagccacttgattctctgcgatccgtgcaggagcaacgcagatatgaaccgattctgctggaacactagcaattaaattggaacaacatgtgtggtgatcttgggcatgtggtacaaattaattgatctattcttgcaatgaatgttagtacttgtttctcactgcctaatgcagtgaattcagttgatccgattttcttaacatgaagtgaatggcaacaaacaaattacattgcatatttaatggttacattctaattatattatagttatatctcaattacatcttaattacaatgtaactagcatgtaagtgctaaactaggaaaagagtgggtaaacgacaacttttaaatgatatgcaagttaattgttcaccagttgattatgaattactaccattcatatatcaaatgaaatattgactaatttttccttaaaaatatgccgacatatatacatgtactctcttggtttattgaaaaaacatagaaattttagaggattcaatcctaaaaaaaaatttcctataaagactgttgaaagagaggattgaattatcctatcatttgaaattcctatggaatagacaatcatacagagattttgtagaaaacttagcaagagctctgacctcttgaaacatttcctttaagtctatatctcttatcaaaatcctatatttttcgtaaggcccaatcaaataatctttcttatgtctttgcaattctctgttttatacttctatttatattagaatcatatatttttctatttcttctttttttttcattcgtgtgatttaaaatggcacattagccaccgaacaaaataaacaccctctcgcttggaaaaaaatgaatatgtatgttttttacataaatatacacgcttagaagaaatttgcagaagtataccgtcgtcgcacgacggtgccgcgtcacggtctcgcagggcgaggcgcgagaccgtgactttgtatccgtattagcatgattaatagattaattagcatcattagcaattaattaattattttaattagcattattagtgattaatcaggataatcaactcactaattaatcatttcccaaaatgctgttgctttttgggcatgcccaaatggctgttgctcggtctcgcactgtccacgcgcagtctcgcttcctcagtctacgagaccgtccgcattgttacaccatcgttattttcgcacaatagttcagcaatattgtgttgattttacatttccatacagtgacgacgttgtatttgtgaaaaaaaaaattacatccgcatatttctaaaaaaaagataaatatattttttaaatttaattcctctcgctctcctacggcagcattgtggcattgtcgtcggattcgaggtccacaatggaaggcccaaagcccaaccacgtcagatgtgacgtttctacgcccacgtgcttctcttcctctcaccatcatcataaaaaataaataaatgtctagatggcgtttgacagaaaaatacctcataaattcaaattctacagcctcgtcttttgactcatgcttataaatcaaaaattaaaatctcaaccttaaatttagagttaattttagggttttttcattgtagtttattttccagtctttgcttttagatcactaagaacacgcatataaaagttttatttattaggttataagacgttttaactttggtcatggtcgttcaagtttgactaagtttatagataaatatataatatttataatatcaaattaattttattaaatcaataaataaatatatttttatgataaaattattttgggttgaaaatgttttgtttctacaaagttgaagcagtcaaaacgccttatgatatgaaacggaggtagtaattatttcccatttacaaaatatgccgaaacgatagagtccctagaccgttggattagctttaagattcgtgcagttctaaccctaaccccccattccaggccgccgccgcaatccacctccatcaatccaactaaccaccaccaccgcaaagcttttccctctctcgcccccacaccacaccacacacccacctccatttccctcccatttctttccttctccgcagatattccccaagaatctcctcctcctcctcggattcccctctctctctcctcctacagagtagtagcttgtgcttgctttgctccgattctctctcttccctgtctctcctagctgcaatataccactagcagcagggcgcccagttgcgcgatcgatcgatcgagctccgtggtgccaagaacgccctgtacggcgcgccggtatgtgcgtggaggagtcggagggcgcggagaggctggattttggggagcccgccgccgccgccgccgacgccgggaagagcaagagcaagagccccgacgaactcccctcgcctcgggtgagtagggtactacttggttttctctctcttccgcaacgagagattcgattctttgtcttggggcgtttcttcttcgttaggttcgtttgatttcccttcatggcgtgaaggaaggaaggacgatgatgatgagattgggaaggaaggaaggaaggaaggaagcaaagcatgcccttctgggtgcttgctttgtgcacacgcctcttccgtttcttgaaacacatggagtattattagaagtgattgtgattcttttttcttgtttaattattactgctagctagtactgattgtgcctagactgatcgtgtgtgtggaggagttaagttttctgcatttgttagctgcgaagtttggtggcctggtaggtgttcttcttgccaatgtgtgatgatactactactaatactacgttattggtcacctgttcattgcattgttcattggtactttgattttgtactgaatatatataattatagtcgcagcttccaatctctggcttgttcattgtggagtactaagggggtgtttagatggggctaaaactttttagtccgtgtcacatcgaatgtttgacgctaatttggagtattaaacatagactaataaaaaaactaatttcataaatgaaagctaatctgcgggacgaattttttaagcctaattaatccataattatgaaaagtttactgtagcatcacattgtcaaatcatggtgtaattagactcaaaagattcgtctcgcgaattagtccaaggttatagaataggttttataattagtgtatgtttaatactctaaattagtgtataaacatccgatgtgacagggacttaaaataagtccctgtttcccaaacaggccctaatttcagactgttgtacctaccaaacagggcaaaaacaatcatcacgtgctttagaacaggaaagaggtagtacctgcaaagtgtacatggtactttatttccctctcttgactgaaatgaggaaaaaagagtggttcttgtgcttctctctcacccaagggcacatttttcctgaagtgatccatgtggtttgctaactttgaagtgttcttttttcttcatatcagttgtagaaactgcttggctttaattatctatggctagtgagattgttggatcataagtgttgcggcattaattttttgctatggagagtgctgaagcgtgtagtttttgatgatatatttgttgcatctagcaaacaccaggcagtagcagctatgggatcttttcttatgtgatgttaccccaagtgcttaatcttctgttttgttatctggagttacatttatcggccgttgacactcaatgaataattcattcattactcgttagctagtaaatcatctaataaataaataaaatgttcaattggggtttgaaataacttgtctagccacgtttctaaagaagcattttaaagaatgtaactttgtagcaaagtattgcctcctcttttcattagagttgttgtttcctattaattgctccagctctgaatttccagtacaaattaattgatctagcattaatccttttgtttggacagatggaaagagtttgtgagaacactacagctgctgatttcaagcaaaataagtctggtaattttgtcccaaatattcgatctggggattggtcggatattggaggtcgtcaatacatggaagatacccatgtgtgtattactgacctagctaagaactttggttatcaatcggtggataatgaagctatttccttttatggggtaagcactttcccgctcatttgtatgtttccccgattctgactgaccaaatgagtacctacctttttttgtgcataaacttacagctaaaaagagactagcatgtcatgaatgaaagtagaaacttttgtcagatttgttcagaactagatatatgttcttccagttcagtagtaacatatcaatagcatccagtagaccagtacgctagtccagtagtaacatatttgtgtagtgcgcatagtagaaaataaacatgccatctgcattttttgacccagcttatttgtgtagtgtaacaggagtacaattactaacaaatttgtatgcattcttaaggactatccaaccaatcatatccaaacatcctccatactcacacctacagaacttgatcttattcttcactgtttcaattttaatgaaatcgagatatctcagtaaagttactctactatcacatttttggggctcagtttttatttaatgttcaataagtggctttataatttttcttattcttctgcttctgtattttgataaaactactaatcatagcacgtttatgtgaattaagtctttgctccatttccactatcaggtctttgatgggcatggtggaaaagatgctgcccattttgttcgtgataatttaccaaggatcattgtggaagatgctgattttcctcttgagcttgagaaagtagtaagaagatcctttgttcatgcagataatcagtttgcaaagacaacactgtcttctggcacaacagcacttacagcaatgattttcggaaggtgcttttatgacacattaaactgtggttttcccatctttgaatagtatgcttataagaatcagttatcagtaccatgagacatgaactaaatacctgcgacaatcttggtttccttattgctattcaattttactttgggcttggttagatacttagatctactagcagatgtgttttccaattatgttaagctataagatcatgcctgtttttgaatctttatcacgtgctatagatttcattgctttattaattcctagatataattctaaaagcatgaagtggcaaacatccatatcatgtctttctgtaaactttttgctacgtttttatacctgtcacttgttcgcaaacacttatgatggatactgatatcttcatgtctactgcaggactcttctgattgcaaatgctggagattgtagggcggttctttcacggtgcggcactgcaattgaaatgtcagtggaccacaggccttgcagcctcagcgaaaaactgcgtgtagaatcacttggtggctatgtcgacgatggttacctcaacggtttgttaggagtcactagagcactcggtgactggcatcttgagggcatgaaagaagctggcaatccaggaggtccacttagtgctgaaccagagctaaagatgatcacactgacaaaggacgacgagttcttgataattggcagcgacgggatctgggacgtcttctcaaaccaaaacgtggtggactttgcacggaggcgcctccaagaacacaacgatgtgaagtcctgctgcagggagatcgttgaggaggcaataaagcgaggcgccaccgacaacttaaccgcggtgttggtctccttccacctggaggctcctccccaggtcagagtgagccgacccggtagggtggcgcgcagcatttcggctgaggggctgaacagcttgaggacactcctgagaaaccaatgatggccatcttctttgcattcttgctgcaatttctctagtatgttgcattgccgagtgttaattgtatgtagtgatctcggcacctcattgttgttagatgttaccaccattgttgtgatgacaccagctattattcttgttggtaattaagccaacgaacatgagttctgagctctcaaattgtgagaaattctaagcggctgtaacaagttgagctctgtgaagaaagaagtgagtgcccaagctcacagtgtcatatttttctcctattcttgtctgtaaataaaaatgtcagctactcaactcctgggtaattgaacgttgaccatgtaaaagatacccccattgagtgaaattgccgccaattggctcatcttttccatggttttgtctcatgttttttcagttgtttggtttcttgatacaaaaaacacggagacaaacacaaaagaccaaaataatgccttcaaagtgcaggaatgatgcatgccaaattgcacgggcactgatcattttcgtctgattagtcctaatcttccattaaaaaatcaaagctttctcgtacgccagtattcaacccaattaactaatcaagtttgtacacttttcctggaggaatgcacaagcaaatatacgcaactctgtacattccttcagagacatggatgcaactttctaggagcagatgtatatcacacttgagaccaaatacagtacttgacaaaattcttaattacatttggtacttccaagtgtggcattggcacctaatccagggaccaatggcctaaacatggcccatactttgggcagacatacttctctaaagtgtagcagagataacataaattatgcccaaattttgcatctgtacttcagattacacctccattgcagacatgagtgcagcaatcactagatgggaccatggctttgcttctgaagcaaatgatgtatatatatcatctctgggtcaaagggttgcagcaacctaacttcatagctcctcactgttccatctgagctgaagtgctagtattccagtctctgaacttttctcaggattcttacttacacagaagatcgaaatgaagacctccttgccattggttgctgctgtcctggctctgttcctgatggctgcaacagttcagagcattcggttggatgcagagagtcattcagcattcagcaaacagactgtcaataacgtaagtgttttatcactgtcatttaagttttctgataaagattgatcaatgaatgtatatgttgattccaagttgctaactgatgctcattcttggtttgcagacatctggcgataacgtagtagcagtagtagtagcaaagactgatggtgagccatctggtgaaatggagaaagccatttctgaagagaagagcagagtaggacatgagctgcctgagatccatgtagattactatggtccaaggggccataaccctagacatcactgaacattttttcttcttcttcttcttcttcttcttcttcttcttcttcttcttcttcttcttctatgtttcattctttctttagataatctgtgctcaactagtgagacacacacacttgagaaggcaaccctgctatagcaagatccaaggtgtaatttctaatttcatttatttttcccttcttcatcttcttccccccctgttgaagagggtgagaaacaccattgatgtactaacttcttgacaacatttcaatcaagaaactgaaacttgatgacagcatttcagattttcaatcaagaaaatgcaacttcgtgaatcggtacgcttctaaatgttgtttttttaaaaacaaagtttcaatcaagaaactcacaaaatggatgcagaatgcttagctgtgtgtcagtgtgtgtgtgcctaatccaacatatcatcctcagctttaggtgtcagtctcacgtatggttgagcatctcctgatgtgcagcagttctcttctcctggttttcttatttatgtcatcaaatagtttgacagaagacaaggtcaataatttttctaagctaataatgatggagtagctaatttaatcttttaagtataaaatgtgtaggaaacataccaatactttagcatttacaactagagggcattatctaaaaaaactagagggaatagtcattgcatttgattgctcagcgccattattagtaggaatttgtgattttttctgctgcttctttatgtagtggatgttttttccccttgggagcataggccatgagcccatgaagaaagaattatgttagccaattaagttgcagtccatgtggggcagaagggggtatgacagctgcaacatttttttcttcataatcaaatgtccatgtcatgatggattgctagcgtgtaaaggattttcttatattttagcttcaaaatattgcaagtaaaatgtcttccacttggatcagacaagttcatgtcatgtcattgtattgccttcttttatcatattttattcatgaactatggactgaagtatgggcaagcgaaaattccatgctaactgatcaggacattattgtttactgcaaattcggttgagcaactcgaacatttaaaaaaaacaaaatgaattgttgtttaattgccatatcttccctggcctaatcggagacaatagaatgtaggatggaaatttaaattgataaatgataagtcaacagttgctggatcaatttgtctatatatatatcgatcgtaatcatgtaactattaataaagaaaatgaattcataatcttacgcagattatcttcattaacacgttatagtgatactcctcataaaaagtgattgtgacattgatcctagttataagtaaactagctgagggacattatagtattattaacaataaataaagactaaactgcagttgactcaagctatagatgtgattttggttatggcgcccacagcccaactcgtaggtgaaattttagaccgtttaggttgagctaaagtgaacaaagagcatctttgggtaatgaattgagcataactcggctagtaagattagcccctttgattcataggattggtaaaggatttttataggattcaaattcctatgaattttttcccatatatccttttgattcagaagaaagaaatgaaactttccatatgattgtattcctatgcttcacattacataggaaaactagcaagaggtatgatctctttgtaaacttccctttatttttcccatggcactatcaaataattcttattgtttttcctgtatttttttattcccgtaggatttgagaagcgtactacgtcaatactttgatttgtaggaaaagtgtaggaactttggatgatttcaatcctacgaaagtctttgaaacaaaggattgaatcatatcctatcctttaaaattcatttgagtctatctctctcatccggttcctgtgtttttcctgtggtccaatcaaacggtcattcctgtgtttttcctatattttccaatcctctgttttacacttgcattcctatcagaatcttgtattttttctattcctcctttttttccattcttgcgattaaaaggggccctaagttttaagtttcggacttaagatatgtgttcacatttccttgtgatttaatctcagtagataatacttaaaataatagtacttgcctccaatctctttaacttaaaatgtgccaggacacatccacatggttttgtatgtgtgagcacaagtgtggtgtgtgtggatgtgtcagttccacttgtgctgtgaaaaagagtaatatctctgtcccaaaataattgtaattctagattgtttagtatatattaagatttgagaataaagactattgtgcttctcattaaatagtgtataggtaagtgtgtggtggtggttgaggatagaatagagaggaattcaaatcaaaagtgattaatggaacaattggtactatattgtgacaactattttaggacaaatttgaatattagaaatacaattattatgggacggaccgacggaggtattatttttggattaacccctttccatcactagtttggttttggatatagtttttctttaactgaagttttggatatagtgaatacgtacataggtgagttcctccttgctactaagggcccctttgaatcaaaggatttatgtaggaatttcataagattcaaatcctataggaaattttcctatttggccctttgattcaaaggattgaagctttccaaatcctatgaaattcctatggaatgacacattgcatgtagattttggaggaaatttagcaagagctccaacctcttggaaaatttcctttgagtctatctctctcatctgattcctgcgtttttcctgcgctccaatcaaacgaccattcctgtgttttgcaatcctctgttttacacttcaattcctgtcagaatcctatgtttttcctattcctccattttttctaccctgcgattcaaaggggccctaattgttagaaataaaatttaggatgccaccatgaaataattggacaaaaaccttccctatatcatgattttctataggtgcggaattaatcacaaaattacttctcaccaaacttgcattgtatctatccaagtacaaccaaagtacaaatatacaagtataaattaatccccaaaacaaaacaaaaaaaatcattaaatacacacaaaatccaaatcgcacatgtacacttgtatagcagcaaaatcccaaaacccaaacgcatgcaatcaaatccaaaaaaaacaaaccaaccaaccacgtcgatcgctcgcagtcgccgccgcgctacggcggcggcgcgacggcgacggcgccgaaccaccgcgagcaggtgtagaccgagcagaaggcctgcagcgtggtgagcagcagcatgaggacggcggcgaggaaggtgagcagctgccacgagccgaacacgtagcgccgcatgaaccgcctcgccttcacccgccaccgcgcgccgtggtaccggttcaccccctccaccgccgcgtccatggccgccaccttcgtcagcctcaccgacctgctcatcccgttccacagcctcgccgcctcgccgtcgctcttcatccggttcagcaccacccctcgccgccgcagcgccgccacgtcctcgccggtgtcgatgatgccgttcatcagctccgtgtaccgggcgagcaccagcggccccgtcgccgccgacgcctcgtaggcgaccaggttgcggagcaccacctccgtcgtgctgccgtcaagcgtcaccacggggaggtgcagcgtcgccgtcttggcgtcgaacgagaccgtggtggcgtcgccgttcgtcggcgcgaactggacgccggcggcggcgagctcggtgactgacgggatcatgatctcctcgatcagcggtggccggctgatcgcgtggtggtggtcctgccccgccgccgtcgacgacgacgacgggtcgccgccgccgccggacatgaagaaggactccactgggtgcttcatcgccgagaagcccgggaccacggtgagcatcttccatggcgccttgacggcgaacgagatcggcttcgccacgtactgcatcggcccgctcttgaggctcgacacgatgccccacaccgcggcgagcagctgcttcacgtactcgcacccggcggattgctgcttctcctcgccgccgccgccgccgccgtccaccggctgctcctcgatgtcgtagccctcgtcgtggccgtcggcggcggcggcggcgtcgtcggatggcttcgggacgagcaggtggtagaggagctcgaggaggtgggcgtgcttggcgacgtcgatggccgggaagttgtccatcatcttgaaggggcagagctccttcatgaggccggtgaccatccgcccgagcagctcgctggcctcctccgccgacgagcactgcggctcgaggagcttgcggaggaggaagagcgggatctggttctcgagcatgagcatgtcgcggaggatgaggttgtgcgccgacttcctcccggcgaagtccaccaggtgcgccatcctcgacgacaccctcctcagctccggcttccctccgccgccgctggcggcggcctccgcggcggcgaagatctgcaagaactcgagcaggaacgcgccgtcgacgaccatcatccacgccagcgtctcgccgctgaagtcgaggtagcggtggtagtgcgccctgaccttgcgctccgcgcgcgcgaactgttcgacgaggtgctcgagcttgacgccctcgcggaggtgcctctgggcgcgccgcgcggcggcgagcttgtatcgctccatctcgtacagctccggccgccaatggtggtacggccccagcgcgatgaactgcggcacgtacgcctccggcttgtgcgcctgcagctgcttgggcacgttgaacacggacaccgggatgccgttgtcgtcgtcgtcgtcgccgccgtcctcctggagggagcgccggatctggatcacccaccggagctcgtcgaacaccagcggcgcgccgtcccggccgccggggtggtggtcggagcccgccattgccgatcagctcgagctctagctagctccctaattccacacgtgcgagttaagctgcagctgcttgttgcttgtcagtctgatccactttggcagtaatatatagtgaaacctatcatgattcatgaatagattaaatggtgtgtaaattcaattaaaaattgaactaataaagtactccctccgttccattttaagtgcagccatgattttccatgcataattgaactaataaggtagagtcgatggcgataagaacgtggaaattaaaaagaaaaggtttagaattgctcaaaaagaaaaggaaaattagtttggttcgcaaagttgaaacttgttctgtcactctgggccatgcatgtctcttcgtttttcgcatgctcaccagccccagagagatgcagattgatcagaaaaatgtttcaaacacggaacaaaattggccaaattcctttactttgcacatgattaacactgaactgtactaagaatcagcattggtagatcaattggtgtgtttagttcatgccaaaattagaagtttagttgaaattggaacgacacaatggaaaagttagaagtttgtgtgtgtaggaaagttttgatgtgatggaaaagttggaagtttgaagaaaaattttggaactaaactcggccgtagcacgtcgtcagtaaaaaccaactgaaattaaccccgaattctgtcatcttctgacgaactctcactctcacattcaagaggagcagcttgcagcaagcaacgctggagtctggatctagccaaggacagtgacagtgtgacactgttgctgaacaaaacggcaaattatgcattgcatccataaaatattcatcagatcacgcatgattactacgagctcccgatcgatccatccatatatggggttgcatgatatgatcagagcatgacattaattcaaacacaagaccagactggaaaggacattgatttggttttttgaatgaatttacagatggattgctgaagaatctgaatatgcccacttgagtgtttctgatcgactgaaacttcttcgcatggctataatacattaagcgtgcagcatgagcgttggcagtgagtagtttgtggcccggttaagcttttgtttatctacatgtgggcgctaaattagctgtttttttggtccaagaaattagggttggatggtcattcgcaatgatcatgccattattcaagtcccttctgatgctgtcatgccacctaacattagcagtgaaatagtacctgtggtcaacactgcaatggagaaagttaacctatatttccctcatcatttaaagataacactgttcatccaaatagttgttaaaaattctaaaaaaattgacaacattcatagcatatacgtaaactacttaaaaaagatcagcaaatgaatagtattgctactattcatgtctgaatttgtccttttcatttctcatatggaaatggattaaactcataaactggatttattttccatttttcaccccttcgagggactagaggtttttcttttacaaatataaactttgaacgaaaatgcccccctacccaaatgttccatccatttggccggcccatcagcccatcatccacacgagtcttcttcacttccagccctcccacgaaataagttctctttaggtccctcgtcttaacctcgaatttgaatttcatctttaaactgcaataccaaatatagcatgtctctcaacttacaataacgatgtacccgaggtcataggctggctaacatgctggctaaatcatcgtgggccccacatgttagcatcatcctcctctcccctctctctcccctcctagctttcttttcctctttccccctctcctctcttctcagcctcctgggcggcgggccaatgggatacagggagagaggtgcactagtcgcggtgcatggggctcaactcgaggccaccgccacgattgggcatctccaccccatctatgttgtcctcgtcggcaggcgcgagggggagtgaaggtagtgacgctgctatcggtgtcgaacagcggggagaaggggctcactccccggaacgtgccaagatgctagaactcccaaaaactgagcgtcggtgtcaccagcgggaactcctccatcggatctagattgctaatggtaataaccttcgtcctgctcatctctcatcccagcaagccatcccgctccttgtcacgccgcggcggcagcttttgatgcatgaccagacaagcaccaccaatctcaaaacctcgcataccaatccgccgaagaggtggtgggacgggcccaacacagcgttgtcgtgggatgaagtaggaggtgacggggcgagcccggcgttgcattgtcttgggatagagtagaaggtggcgaggtaggcccaaggcggcactttcgcgagacggagaggtgcctggggtaggagaggtcgagccttggcgatgttgggctactggcgcggaggatgggttgtcatgtcagggaggaggcggagagggagtaggatccgggctatgcccggcacggcggtgggacggagaatgaagaagaaagttgggagatgagagagagaagaggaggaagttgacatgtgaggtcatgatgacttaggctctgttcgtttcctggagttcccaactcccccatctcattttccgtgcgcacgtttttcaaactgctaaacggtgtgttttttgcaaaaagtttatatacgaaagttgcttaaaaaattatattgatccatttttgaaaaaaaaatagcaaataattaattaatcacgtgctaatggactgcttcgttttccgtaccggagggatgggttcccaactcaaccaaaagaacagagccttagccgtcacatcagccaaaaccaatgactatattgtctataaccacgagtacaccgatggtgtagatcgagggacgtgttatacctgatactagatgaataccccgccgcgttgctgcggaaaattaagttgcataatatgtacaaataagatataatatgattatcaaaactaaaacaaattgatagtacaattttgagtctaaaaataattgagattgcatggttttatgagagaataaagaagtgacaatttgaaccatagatctatcatttaaaggctagaaataattagggtgatgtggcttaatgagagaagagagaaatagcattaactacacttagtggcgatgaactatataagggcaagttttatagtggaggtgagtgccacatctaatttaaaccatgttatcttctcattaattaagaggtaacaagtacaacatgtcacctctagtacacaaaccccaatattagtttactcccacatcatcttatatttttattggagattgtgtgggagattgccacttgcatgaggggtggctcattctcatcttatatttttattggagattgtatggatgttgcctcttgtatgaggggtggctcattctttctctcctaacttctctcctccaactcatcacctaatcttatgtggtaaatttagaggcaacatgaaggggcttatagtactttccctaagtactactccctccgttttacaatgtaagtcattctagcatttctcatatttatattgatgctaatgaatctagatatatatagtatcaatatgaatgtgtaaaatgctagaatgacttgaagtatataggataacggttcaattcaaagacgagattcatattcgacgttaaggatgagggacctaatcggagtttattccccctcctcctcctcctctgttccttccggcccagcccaccgcgtcgcgcctgtcccagtggagaatccatcgcttttccgcttttcccgcaccaaatccaggtactaccctcctccctctgttccatattaattgacgttttgaataaagttgagatcaaacttttataactttgaccattaataactttaaaaatatttagttttttaaagcattataataaaaataaacatgcatttatttattatatatattataataaaaaaataagatcaaagatatatcttgtactccttccttccctaaatgtttgacaccgttgactttttaaaatatatttgaccgttcgtcttattcaaaattttttgtgaaatgtgtaaaactatatgtatacataaaagtatatttaacaataaatcaaatgatagaaaaagaattaataattacttaaattttttaaataagacgaacggtcaaatattttttaaaaaatatatcgtatcattgtccaaaatgttaattaaaatgaaaccggagggattactggtctactactccaaccccgtggccaccgtggccgccccggcacagtccccgtccgtcggacaggtcccaatccgctctccctttttaacacctcatcccccaacccaacctgctctcgctcccaccacgcttcgctgctgctgatcaaaccccgcttctcgatccgaccagggaaggaggaggggaggatgaggggggcggtggcggtgaaggcggggagcaggccgccgtgggtggggctaggggcggcggtgtgggtgcaggtggcgggcggagccagctccaccttcgcgctctactcccacgccctcaaggtcgcgctcgccgccgaccagcgccgcctcgcgctgctcggggtcgcctgcgacgtcagggagaacctcggcctcctcccgggcgtcctatgcaaccgcctccaccccgccctgctgctgctcgtctgcaccgccgcatgcctcctcaactacggctccacctggctcgccgtctccgcctccggccccgcgctcccatagtggctggtcatctctctctacccttctctttgctctgtaatttccttttttttttttaccttttttcttttcttggatctgttgttgctaggtgtccacttctgagatcgattcgcactgtattttttttcttgtaattttagttttagaaaattgcatttggatgcgcattagtggtgcattttcgttaggttgtgaaattggagtcgaattgctctagtgtattggtagtgcgcttcttttacgccaagtggccacttttgggcggtgcaagtaacgactttttgagttagatatagcaaggaacctgttcccgggaacaaaaggagtcattttcaaagatcccagcaacaaaaagtaaactacaaaataagaattgttgtaccaaacactaactagcgaacaagtatgggtcacattcacatttgggttggaaaaaaatgcgacatttggcttcacacgccagcaagatgcacatattggggatttttactggaagcttgttctggggcaggtttctggggttagcttactttgctaggctgctagcttcttctgatggtgagacgccgagatttaatttcgtaggacagcttaaactgactagtgaccgtactgttgtatttcagatatggtttgccttatgccttgctgcaaacagtggtgcatggttggggaccgctgttttggtaaccaatatgaggaatttcccactcagtagaggtgccgtcgctggcatccttaaagggtacgctggtttaagtgctgctgtgtacactgtaatatacaccggagtacttcatgattcagcttcaaactttctgctttttgtcaccctgggagttcctgttgtgtgccttgtgacaatgtacttcgtgcggccttgtgaaccctcccttgtggagaactcttcggagcaagtgcattttctgttcacacaactctccagtgttcttctaggggtttatcttgttgcagccacgatattggaccatttcgtaactcttactgatgctgtgaactatgttctgcttgtcatcatggtccttgtcctctttgttccacttacagtacccttgaaaatgacattgtttccaagcaaccgaagaaaagggcaatccgattcatcagagtgctcttcttcttctgctgatcatgatcatacagaatcattacttccttcttcatcagcatcaaatcttggtaatatagaagatgatgattccatggatattgatattctcttagctgagggagaaggggctataaagcagaagagaagaagaccaaaaaggggagaggactttagatttcgtgaagcactgctgaaggctgatttctggcttttatttgcagtgtattttattggggttggatctggagtcactgttcttaataatctagcacaagttggaattgcagcaggtgttgcggatacaaccatatcactcgccctcttcagtttcggcaatttctttggccgtttaggaggtggtgctgtttctgagtatcttgtcaggtaatggaatttcttgtcctgcataattgtgtttgttttgaaatgagaatttcaataggatagtttcatcaactagtctccaagtactagttagtcatcctgtcaagtttcttggagattgtggctactgtttaggacctggtagctagccaacccatagattttacttttaggggagcaagcatgttatactctaccattgttcattggtcatctatttcctgatctaaccatcaagcccccaatccagttttaatttttcagtaattagataatgaaccgaccgtaatttctctccttttttaatagaagaaacagtaggtatggtccccattaccattgtataaatgctgtatcaaaatattttcttttgggttcatcactgaagtgcttgtttttaagttctaaattttctaaatgaccattctgagttagttcactgatcttctttcgcaggtcaaggacccttccacggacaacattgattacatgcacccaagtcatgatgataattatatacctgctctttgcattgggccaccatgccacacttcatgtctctgttgctttacttggtatttgttatggtgcccagttctcagtgatggtgtcaacttcatctgagttgtttggattgaagcacttcggaaagattttcaatttcatctccttggggaacccacttggcgcactcttgtttaacagtctcgcggggtatgtttacgaccaggaagtggagagacagcatgccacaacaatggacactgacattgcatgccatggccctaattgtttcagacttacattttgcgttctagctggagtggctagcttgggtacattgctgagcattgttttgacagtgagaatccgaccagtatatcagatgctctatgctggtggatccttcagccagccgaggagctctgctcactgagaaaggcttttccggaattcacattgatgtagcatgagatcgagatcttgtttgatgatattcttggatccactgtattcagttatgagtattggtgctctacactgttatttcagctatgaggttcaggaatgagagaggtgctttttgttgagtttgtaatgcgatgctggtgctgctagtattaggctgatgagctaaagcaagaaaacgagaatgtaataacagaaattgctgcttttgtataatagaaatttatgattatacttaggcacacaagctgtgtgatattcaggtgttctcatgttctgataaagaaaatatttcatgcattgagcatctcaacagactaacctattggccatttcttcagaggtatggttactgaagctagctagctacttgtccattttgacattgtcccagcactgaacgtggcatcaaacgaggtaactacaacctcctgtaccttaatctccataatttatctgcctctcagttctgaactgtgaacactgaacccaaaccatgtgcccatgtggccaatttaccaattactaccaccaatcaaatgcatgtcggcatgtcactatctgactctgctgtaatttgtaataacaaatttctgtttactttgtgtggatcaagattccatgacatggcaggcagcaagaatcctcctgaagcctcatcagcaggctgaattttcaacaggcagatggcagttcagatttgagcagcgccaaggttggccagctacactgcactgaaagccgacagatctaaaccctgcacaaaaacgtcctctcctgcctttttgaatggccgaagaggctgttattcctaccactcacaacaatgtcacactagcagttcggatctggaaaaaaaaaacaactttggcatatgctactatcaccctagcttgtttcgtttctgatctgaattgtgaaactgtcagcatgtgctacgactgccaaggccctcaaaagtaagctttgtccttagtatctagctgcacttaattgtttgagatactaaattttatacggtatttattagttctgaactcatgtcatatcatggcacatgcacaaaacaataatacagtgaacagtgatgtgtgcatggctatacgtataatccgaacctgaaaatgaagatgcactgctgaaaaagacatggtttgattggttgtcgctgggcctgaatgtaccaaacaatgcatgaaccaaacaagacgaagaagaaaatgttaccagaatcaattataatttccagctccacagacaaagaaagaacatggtaaaaacggttacaaaacacacataaaagcttcatcttctctcgatctctacacatgtacagttacaaaatacagagcatacaaacagtaagtagtggagtagtgacagtgagccagtgaccacagtggatgtggatttacatgtacgcaccttgtcttcttcttcttcctccggacacagatcgatcgagcagccattgttgcatgcttggagctcgccatgaatggacgacactacgcatgcagctaagctagctctgtttatgtgggcttgagatcttggaacatggactcccatcgcatgtcctcgccgtcgtcgtatagatcgaattcgtcgtcgctgtagctgtaggcgtcggggtttgcggcgaagcagccggttatcgccgccgccgccgccgacgcggcggcgggggcggcggccttgtaggtcgtcgccgcgccgtttgtcgtcctcgtcctcttcccgccgccgccgccgccgctggagtggttggtgagcatgggcttgctgaggtgcctcagcagcgccatcttcctgccgccgttcc

SEQ ID NO: 5625 - DNA, 11654 bp, Oryza sativa
ctgcgcgccgccgctcagctcctcccttgccgcctgtcgccctctctcgctctcccgccgccgcccgctcaactcctccctcgctcgtcgccctttcccgcgctgccgacgctctcctcctctcccaccgcccccatcgtcgccagcacctcccttgccgcgccaacggcaccaccctcctccatgccgccgttgccttgtgttccggcgcgccgccgatgcctagtcaccgcgccggctccccaccgacaaaaaggttgagaggtggaagaagaggggagtgagggtgatatgccgccaccgccgctctgcccgcgaacctgctccgtccgccggccgccccactccaccggtcagtgaggaaagagagagatgaagagaggggagatggggagagaggaggaagaagaggggtgaggatgacatgtggagcccacgtgggccccaccattttttttaatttctatgtgaaactgacatgtgggtcccacgagctttatatttttccggatcgaattgccacgtaagcgccacgtcagatcaagaccccacgtaggtgccatgtcagccaaaaccgccttcaaaaccgccgagggacctaatctgcaccggttttgatagttgagggacccgttgtatctggttttgtggttgaaggacgaaaatcggattcgttgacaagttaagggaccttagatgaacttattccccaagagaataaacgaggcagcaacagaaatttccccatgatgaagataacgaagctccagcctccaggagagatcaagcagatggacaaaaaaaaaatgatgtttgttttaagataaactagtgacgagatttgacacaccaaaagcacattaaccgcacgtgaaatgcaaaaatgaacctcacaccgagacctgaaaacagagcgaacaactctagaattgctcagcgaatcaattgttcctcatagaaagctatttcctgacataaacaaatataacttttcctaactttgataatgagatggcagcagatatgttgtgcacctaacagatgagtcaaacatccggataaacagttaatttgctttattaaacaattgcttcagtgacagggaatgccaccatatgtagcaagccgcaaaaataagtttgcaagtcatacatactggagatgcatggaacgatggaaaacagtacatggacaactataactgaaccaaaaatgttatatcattcttggataattttagatcataaaaattccaaaagttgtggcaatctctgcatgcttcacatttagtatctgtgggatagcttctcctgctccttgtagtacattgcgtacctgcatagccatcaaaatagaccaggttatattgtttgtgatgctgtcaagaaaactgatagtcatcaatgtcaaggaaacagtgttactgcacacaaagaaacacaaaaggaagtcatcaattgtttacaacgtgaaccagcagtatacacactccaccatgttcctccatccttggattgaaaagaaggcctacttgcatttccctcacgaaaggcaaaaagagtgaatgctgtcagcgactcagtgttctaaaagttagcaggcgccaggtagccaccgtgtttagcaattagatggtgcaataggcggctagagtgctcttgtgttactattttagtgctatattgtttagcatgtaatatgttgctaatctcttggagtacctaggcagcactaggaacttaagaggccagccctgccaacccaactcctcttttcaattcaagttctcaaaaaacatttcaatcgttaggctcattgttttcaataattcacaatccgaggtgagggtttcctgatattaggaaaaacaagcatgcctataactgccaggcaaaaaaaaaaaaaaggtaactcatcagtactaagaaccatggagactatatgataagctgcatcaatggtcaaaacatagcatattgcatctacttaagacaacttcccaaaaatcctatggtacaaggtaaacaaacaacattcagatggtatttcttcaggcttcgacacatagtgagctcacaacgccaacaagctgtaacatgcagtttaacaagttcacataaagctaaatcactgaaaaatccatgttggaaaaaaatagtataataggctaactgatcattcaggcattcatccgaagacataatctagttttgcatatctcaagcttgggcatagattctccaggagacatgtgagtacaaaagctatatgtggcgctcaaaacattcagtttggaaacagtaacaaagccaatcaatattagaggcaaattcaactaaataatacagtacaagagaagtacttagctaacatgattggatcagcatcatgaccatacagaataccaaatcaatttgggtctggaactctcgattgaaacagcaaaatcgttgtgagaacaaatacaaatataacctcacagcaaataatttgcagcgagtccactgctccaaattctgcctaacctaattggatcgacggggcacgcgtttcccgagtcaaatgacaacccgatgcaacgttgacacgcatcaattcacgcgaaatctgcacaataattccgacgaaatgggagcaaatacagagaaactcatccccgcatcgcagacctaacgaatcaaccgaaaccgcaacgagaagaccgatccaaccagagccaccgaagctaaccatgcctaacaaccctagatccgcccagatccgccgaaaccgcatgcgcgcgagaggaggggggagtggagggaagaggatgggggaggcgtactcgtaggtgccgacgatgggggcgaggaggagcgtggcggagatccagttctcggagaccttgtggtggatcttggtggtgatgtccttccacagccccggcatcaccttctgctggaacggcgacagcgcgtacaccaccgccttcatccgcaccggcgtcttccccatcttcctctccctccctcgccgccgccgccgccgcctcggtggtgtgctccggtgcgctcgcctccgatcacctctacacgccgatcgatcgatgggcttctggattgttcgtcagctagggttcggtatataggatggatagaagtcgtcgtgtgttggggtattgggctttggcccaatcacaaacttggcctcttgggcccggcccaattacacagcgattttttgagtaaatttcagaagagcgaattataatctctaccatggcgagaatgcaagcaaccaaatcgtagatgtgaactctgaagaccttgataaacgatactggtagacctaactgtgcagatgcggtttggtagcatgattgttcactgggaaaaagaattatattagtttttcgaaatcatttttaaaatgtaaggtgttttgtttttgtcttgagttaaacatcctcaagtttaaccaagtttatagaaaaacaccaaattaatttaattatacctactattgaatatgtttagaatgttgctatcttttttcataaacttggtcacctaagacaccttaccacttggaacttggcattgattcgcgtgggaattacagtcagttccctatgaatttctgcatagttcttgtattccaaacctagcattagagttctcacttcttaggattgttaacatatttgtgaaatcccttgttgcctcacaaacaactcaacaaggttgaccaaagctcacatgcaaatatgcaatgtagacaaacaagttgcgtgcaaggtaagaggctaacatccaatggtatgtacaaacactgttctttcaatccttgcatcactgtcagtggttgcaaaattgcagttcaaagaaaccttctataaatatcaattgattaagaccatatcatggtcagttggtcaccatatggtgttaaaaaatttgggatagattgtctttattccctcgatgacacagcagcttattgagttgaccaatgaatcaatcacccacacagatagcacccacatgaccacatctacatccctaacgaacaggaagggcacagaattcacaggctctaagctggaccagaccggagagcatgatcaagatccgctatgaggtcgtcggcatcctcaattccaaccgatatcctgactagatcgtctgtcaggccgcgctcctcgcgaaccgcagaagggatgctggcgtgtgacatgaagcatggcaggctaatgagcgatttcacacttcctgcatttagttttaatttggattagcaagcaggaactgaaaactttgataagaaatgactggatcggttatattggcgcagtttcatcatggtttcttaaaaacaatgactcctgatgatgtatgacagcagaacattgagagaagcagaaatatgggtttgtctgaatgctcaccaaagctaactgttacattgaagtactttgtggtctcaacaacatgttttgagagagctaatgaaccagttaggaaactgagaactgaacccgctccctttgcctgcaaaaggaaagggaaatgttacaatcaaaagttattaggatgttctgaatccagttccaagatgtcaatccaaggaaatatcctaaatagataactatctaaagccacttaatgtaaggcaatttgaaaactactccaaaaaacaacctgggaatagtgtagagatcgtccaggatgatcaggaagtcctgcatagttcactttctttactcttggatgagaagctagaaattcagcaatcttctgagcattagcctgccaataatataggggtggtccgtctcttcagttgaatagatcacattaatgcatatgtaaacataaggattttggaaacagaaatataattaacagaaggcagactacaaagtcttataaattttgttgatactcgatatgtatattgaaatacatgttatggcacatgaaagaagttacacctgctgcttctccacccgcaaagccatggttttgattcctctcaaacaaagccagcaatcaaatggtgccaaacctgatccttcagcattttgtagaaatgcaatctctttagccaagctgctgacaaatgaaacaggtattacatcacagtttccatcagcttcaatttttaaaagtctaccaacttcaaggaatattgagtagatgtattcagcaagaaaaacaaaagagaaaggaattgcccattagcatccaccctggatattcatgcctattcatgccaccagcaatagataggagaagtgtaaagtgaggtccatttcaagaaaagtagaaaaggagggtagtgagaactgaagtactgtttgccaccagacaccaacataatattgaacagcttatagacatgaaatgggatagatgaaatggagaaattgcaaaagagtcaatataatcgttgaatgaagaatttagagcacacctttcacccttcaccgcaagaattccagccataagatcgctatgtccagctataaatttggttgctgagtgcataacaatatctgcagaggaacaagagaattatagatgaaactctgttgtcctatggggatgcaaggatgcttgaaatggaaacctgttgttctagataagtaaatatacaattatatacctgctccaagttctagaggacgggagagcacaggagacatgatgctgttgtctactaaaacaagagcaccatggtaatgagctatctctgctattttctgtgaagcaacaaaaacagtggaaggaataagaatactaccttaaaaccaaggcgaaaaacatctggatgaaataaaaatctagatatacgcttcatgaccaccacatacatcgaccaaatcttacctttatatcagtaatttgtagacggggattggtgggactttcaagccatactagtttagtcaagggcccaattgcagaagttacctcactaattttggttgtatcaattcgtctgtcacaagaaaaaaaatcatataacgcttgtaagtgagaataaagaggcaacaacaaaatataatcttactaaaaatatggagataacactaactttactacaatcccatgtctcggggcaacttgtgagagcagacggtctgagccaccatatatgtcctctccagcaactatttcttgtcctgagaatcataggtttgacaaataattatattcacaaatgcatacaggattccatggcaagaacatgagaaatatggaacagcaaaaaacataacaataccagacttaaggaggtgtgttactgcagctagtgctgccatcccactggtgaagcagaatgcctgatccgccttctcaagcttagccataaggctgaatatgtcctcaaaatcatgaaacaatcaagaaatgcattttttttcaccacagagtaaaaaacggatgagaaattgacctaacctttggagaacatcacgtgtagggttaccacttctagtgtaatcataaggtccattatcggttgctgaaggctgcaaattaacttgcaggagtaagtgtacttggaaatagacaagacaaagtgcaaattatgaaccaccataaacttaaaaggtataatttagttcttcacaaccaaattgaattgcagatattcccacactttttatcattcttagctgcatgtcatgattcttgtataactagagaatagagatcattagatcaattaagaatcatttacattatcaagaaagataaaaaagaaagcaccacgttcattttggaggcccaaaaattaacacattaaacggagaaaaagaaaaatatttacactgttagatcatggtgggtccaaatcataacagtggagattgattgatataattgtattaagaacaattatatctatagaaagaaatagaattctatctttaaaatctattgtatataaagtacaatggtgtcaatagaaatagaagctaaaatttgcatattggatcctattttgcttctgaaatctagctctgcgcaatttgcgcgggaaaatccactagttcatgtgattatctatccaaacattcaatagttgcattacagtggtatgcttaaggacagccaggacaaaatggcacaataaacaaatcaagatgccgtaatttgataattacaacggactcaaagggtctaaaaaactacaaaatcagaaaaccaattttgtatggccagcattcgcacacatcaacaaataggtgcattgaactattcacatttccacgaaattggatttgtcttccaaaatagataagttcaaaacagttgcctgctgccaatttccccataactgcctgactgactatccatatccttctccaaacatttcaaaatgaaaactagaatcctaaaatgttgaatccttacacaccacctaatacgaatcatcagctattcagacattaccgcaactcttcgtctaatatattgacgtgcaatcctttttgcatgttcacgaaaaaaaaaagacattaccgcaacctcatcacaagcattaacatgcataccaagcaaccgtacagccaagcaatgcgattacaaaacagcaattgtaagtgtatcactacattgacagaacagttgcggaggtataatcctcactggctgccaccatttctatccctaattacctgcttaaacgtggccgtctggtacagcggcgtgctcatagacccgaacccatcgaacgagttctcgaagctcgtcagtatcgtcgccacgctaggctccttcatctccacatctacacccccaaaagcaatcaccactcatcagttccaccaaaaccacaacaaaaaccccaaatcccacaaaatccccccacaaacccaccgaaatccggagcggcgacggcgcccagcgcctccgcgccgaccgcggacgcgctcaggtcgccgccgccgtgggagtcggcgatcgccgccggcgcctccatgcggcgagagagcgtgaggcgtgggtggtagctgaggcggaggaggggttgcgctgagctgccgctaaggttccgggaggggttcggggtggggcggaggtggaagaggcggccgagagaggtggggattgcggcggcggcggcggcggcggcggcggcgctcatggttggcgatgtgtcggaagcgggagtggattttgtttggtatcactgtcatgtcgctgcttattttaaaatgatctggtaattaattcttttgtaaatctttaggatttgacatacaaaatacaatgcgggtaattagttacctgatttgtttttgcgcaacgatgaatcagcatttttaatgtatttaaaattctgattcatcatttctccaaataataatcttgactcatcatttcgccaaaaaaatcataattaattaatacagaattactgaggattgagggttcataataccgagcttgccggttaccccgggtgcagtaacggtgcccgggctgtaatctcaccaaatttaaacaaaatttcaaaaaaatgattttttttaatattttttattttgattttcatggtttgtcgttgttaccacggctaccttgtcctcggaaattatagatttataaaagcatgttctttttgaaattgtgtgattgaaaaacaatgatcagatatgtagatcgaaattcgaaaactgtattaatgttctcaatttctctcatcaaagagtaaaaagaaaaaaaaaacagggtatgtagtatttgcgggttaaccaattagtgcattcataaatatggtatatctggactagcacctacaatgcattatccatatgcaaagttctgtaggtagggattttttttggtatatttgccactgaatcgattaatgatcgtatctctatgatctgtgaatgcattgtatatttatgtgcatacaatttatttacccttttcaaattaggaggttgcttcataacttttgtttcttacagaacttattatttttcataaaatacaagtcggatacatacacaccatactcactgccaccatagtaaaaaaacggaccaaaggtcgccccgatctggtcatcggttcacatgttcatcggtcaaaccgccggttttttattttattaatattatatttgatttgcattattttaaatatagaatcatcacaaaatggtgaaaatatgcataaataaactagtatttctattattatatggccacaacataaaaaaacaaatgtagtgtggtaacataatagattcataatgctatattgttaggacaaattaaaaatcggttcgatttttaaaaaacctctaccagttcatcggttttaataaaaaccgcctggttcactgttttttacaggtttgattgcaggggcggtctttttgttgaaccgagccaccaaggtcgccggttccgattttcccggttcaactgccggcccagcccggtttttttactatgactgccacacatttccacatgagttgaggaccctaacaaacgaaaccatgcgcagttcgcttcatagcatatttgtatgtgcatagctagctgattttttagtaaaaacaacgtatttgtatgtacatagttgtgtaacatacttgtgtaggagtagtttgtatatttaaagtgtataaactttatggtatatttatttggcaatgctccggtgtgctactggtacagtagaaataatttgaatcgttcattattaatggtaatttggtactttattaatacaatgattatgaataactttatcatttatatttttgcacgactagatcgatccgtggtcattcattgcactaacattgctcatattccatcagaaaagctaaaaaaggaggaaaaagagcttcatctgctaaatgacgattatactgactgcaccttctttttataataatgatcttccacgtttctactatcgataactgcagggtctttgtaggaagggtgctaggccccacacctttccattcgttagagttttgattaatagatctaaaccattcacacaattttttgctgatagtgagacgccaaagctaaggatcacataatttgtgtatgatgcgtaaaaagtgcaaagcattagtataggatctcgtccagattcaatgaatgcattgaggaaggaaagttttcctttgtggtaactggtaagtgataacaatgtccagattgggatggaataaatccatattacaactgatgaaccgaagctctcatgttcaaaagtctaccgaaacttgaaataccttagtatatatgtagattgtaaaatcaaatgtgtttttgattattattctatgatgaacaattaggcattggagattattggttttgttatttggaatttattcacgaagtggttttagagatgattggatttacaggtgatcgcaggattctatcattttatgtgaccggtcagaccgggctctggtagccggtcagactggcggtgatcgagcggtcggaccggccagcccgcggtctggccggccgacactgtgtcggtttcggtttcgggttgtttatttggatatccgagtttatttcatgattatgacttctagatggatactatacgtatgtaatactatagtttgctgctaatgagtcaaattggagatagcttggtctcggaatatggtttctttgtttattccatgtgtaggtgactcgatgtctcgggagagtatttgcggtgatggaccgggagtcggcttggggataagacgacgtccgtggtggtcaaagatcatgcgggatacttaggcaagagttgatgcacgtgattgatggagattccatatggcatacgatggaattattgtgtgcgtatgggatgcggagttaaatttggaatgagtccaaatttggtacgattggttatgtaaagtttatttcttgtactagtgggtttcctaaggtgtttaggactcctagtatgagtttggttcgtggctttaggctgcctacctcatgtataaatagagggggagcgtgaggcttccctgtatcgctttagagagcaatagagttgagttttgagttagggtttcgagtttagtcaaaatttttgtaaggagtgctgttggtgcactttgtaaacacagagagaatcaataaagtcgtcatccactttaagagttcttcgatttgtgtttaccaggtttcggcggtctaaccggtgatctaccggcggtcagaccggcagcaaacggcggtcagaccggcgggagcacggcggtcagaccggcggcgacgacagcaagcggcaggcgatctcgacggttagaccggtagatcaacaccggtcagaccaacggctacgcttcggtcaaactggctaatctacgtcggtcagactgatctcatcgaaattgagggtaacttttatttccgctaaaagttttcggtttttgggtataccaaccattcactcctcctctggttggtttggttcttgtgattcgatcctacaagtggtatcagagctttgttttcttctttggatttttatcgatctagagtttttgccatggctactcccgctaggttttcaactaagcctcatgttttcgatggaacggatttttctcattggtgtagtaggatgcaatcttatattatggct

SEQ ID NO: 5626 - DNA, 20649 bp, Oryza sativa
ggggagacggtggttggcgcgcgtgacgaggtaggtggaggagcggtggggcgcggcgcgggagagcgtgtggacgcggagcgcgtcgcgcggatttcgccgcgacgcgatcgcctcggcgggggttttggatgggccggagggggattgcggctcggctggcgtgtgggcccattttattattgggccggaacatgatcgtggctggctggcgtgcgggcctatgttaattgttcccgtgaaattttgtgtggtgggcccatgttaattatatgggatgggcttatgggatgatgggtggccccgtttagttgggaacggaacggggtggcagctgacgtgtgggcccattatgttcggcccatcagtgtggttctcaggagcgcacttgagcataaatttgacaggaaattttaaaagggaataaacctgcgatcttctatgtatgtactatttattttgtgatgttttttagctacgcaagtaggatctgttctcgctacattgtaatgtacatgccatttcttggagaaaagacaaaaagaattgtcagaaccatcatttcgcttattcgcggaataagcaaaacggtatatctgcaaacgaaaagtaatttgtgaataaaatttttatatacgtgttcttagcgatctaaaagcaaaggctgaaaaataaacttcgatgaaaaaaacctcaaaatcagcttcaaatttaaggttaaaaatttaaattttggctaataagtataagtataagcgaaaagatgagggcctgtaccttggactaaaatcaaatgcaaataacaaaaaaaaaacacaagagaactaaatgcatacactatcctttggattgctcagcagatatgagacattctcaatttgaccattaccaaatagaacaaaaaaattcatatacccagcaatttgtcaaatatgacagattccggggaacagataaaccaagaagaacaaacttggtagaaatgacacaaaaactctctatcatacgtgctaccaaagtaccaaattgcgatacgaattaggatatgcatttctatgaagttctgaaccaagccatgcacattgcctccaaaagaactgagtttataccttagccggcaatggcctcattgaaatggcaatgagatatggcagtgtattagccggcaaagatcgatgcatcttgtagagaaggagaaacagacttatattcagtgttgggaaactagtagaagcatcgtacattctttgcagaaactttcaggttccaagaacaactgatatgacaaaaggctgtttcttatctgaatttttaaaaacgaactattgatctgatacaaacggctagatgtgctaatatttgacgttattccaattgaatgaccatgtcacattcagcatttgtatcagtcatctatctagctatcactatgtctcgaaaacaattttacaaaaccattgacatagacaaacaattgcaatttggtggtctgaaaacgcaggataattgcctctttaagtgcacgtatttgtcaaagaaatcttgattaatacagttcccgtggcaataattcttgatcaatccacattggacccagctatcccatatagattattctgatcaaaattcaggacttcaagatatgtatttggacggtagcagttgcaaaatcctgtaacctgttggcctcttctccctggtttcacttgccttcaccaactagtatgttaaaaaattcttgtagaatccaaaagatcaaacaggaatatttggaaattctagagcttacctttttcaaatagctgtacactcggtcgtcccggcttagatttggtttatctaacttggatgataggacatgtacatttctttcagaagctcagaaacgtatgctgtcttatttctttctcattaccgaaccaaaaaaatattgtatttttgtaggaataccagaagatctgctaattttctattaaagtgaggaaggggtatggaaaagttcagttaatacagaaaaataaaagcaagaaaaaaagaacattatgtagtccaatcaggatttctgaacatttacctcaatgtactccagttagtgtctcataaacctgattgatcatgttttgcaactcaatatccacgatatttaattttcctataaggaattgttcgtaatcaatccaatcatccataaagaaaaaagcattaaacaacggagccttttccgcgaaacaagcttatcctttttctagtaaggtatcaatagaagtggcggtgcaatgcaaggcgaaattgcgtacaaaccttgatcattcaaatcaagatattttttcacaatcttatccaagatgagttcaattcaagatgtgagagcccccatgtcctttctcccaatcagcccccaccaatggccacagttcagccaacaaagcccttgtcacacccactatgattgagccaatttgtgcccacaaggaaagcaaaagagctgtaaagccccatgcagctagattgggtcgtttctggatcggcaggaccagttgagatcgagagttgagagtggtgtgctactaacttttcttggatcatgcatgatcttgtccaaattttgaaaggcaggtgtagcagatggccaacaaattgactcgtggtcaatcctttttctctgtctaaaccaatcagattcaccatccatggccagtagtagcctgacaagtgacaagcacattgctgggacaaattctccagtctccactatgcatggagcaaaattaattgcaagacaaacttaggatcccaaatattttgaggggatctgtacttttcctctcaagttaaattcatgacggaaatctccgttccaacatggtttacgtgggttttaaaatcttacttgcatgatgtacttaacgcttctcgataaacccataaccaaaaccaagttatcctttagaatccctaaattttatgctcagaatttcttttaccaacttaccggtctagagtgagtttaaggtttcaaccatgactcgtcccactgtggaaaaatctaattgttgtattctaattgttttctaatctattacactctcataaggtatacatagaagtaaataggggacaaagacttggagtacaatacaagtataagagtagatttatctctagcatactatctctaggattctatctctagaatatatcttatctctatatttatatttgtatttgacttttatctctaactaacatatttgtacttctaacacccactactcgtattgtaatttacacacccacttattacaaataagaatgcatccaaaaccaaaaccgtcctcttgtcgattttctcctagagatcagaaatctccaatcagaccgaaccactgcagccggcaagtatgaatgatcgatcaatcatccaagaatgcaaatgtaccaggctagacagcacgttggattcctagaaaacctttttggtgtttttagtaccattgcatgctcccctttgtcttccactgctcagtactgcactgcactgttaatcactccctccgtcccacaaagaatctatttttcaatttttgatacgactattcgtcttatttaaaaactttttatgattaatatttttattattgttagatgataaagcatgaatagtaatttatgcatgactattttgtaaaacaatttttgtaatttttttaaataagacgaacggtcaaacgtttgagacagaaaccgaaaaatagagtctatgtgggacgaagggagtacagtgttactgcttgccgaaatttaacctctccccggtcaaaacctgaccaaaattaaccgctctaactgctagcgaacagaaaacgaactgttcttttttctatctttcttttgcccgggcttaccgcgtcatcgtgcatggaaggtgatggagctcgagatcaagaatggcggtgaaaagggaaaagaaaaatggaggagaaattaaagaagctgaagcattctactccccaccaccaccgcccttatcttcttcctcctcctgctgctgctgctctgactcgatgcgtcgcccttggcgttttcccatttagtatttaggcagccatggtgtaggtggaggtggaggtggccggcagaaagcgccattgcccacctgcccacctcaggtctagccgggtagggtagggtagggtaggctcgtcgtcggcgaggcattccgccattgttgctgcttgcttgctttgccgggatggagatgaggcggtttcttggtgggctatgcttcttggctctgctgcggctgggcggcgccgcggaggccgtggtcggggtcgccggcgttgacgggcggcgcgccattgccgccaccgacgaggacttcgtgtgcgcgacgatggactggtggccgccggacaagtgcgactacggcacctgcagctggggcctcgcctccctcctcaacctggtcgagaatttctcgctccaaattctctccaaatttttctctcctcctcctcctccggtgaaattaatccaaactcacacgagctttgcatttgcaggatctctccaacaaaatcttgctcaatgccattcgaggtagtgtgcagcagtagctctcgtgctcgtgcttcttctccggcgacgtgatcggagtttaccttgttttttttttttttggcagccttctcgccgttgaagctgcggctgggcgggtcgctgcaggacaagctggtgtacggcaccggcgacggcggagggccgtgcgcgccgttcgtcaagaacacgtcggagatgttcggcttcacgcagggatgcctgcctctccaccggtgggacgagctcaacgccttcttccaaaaatccgggtaatcccaaattgtctagcctctgaatctgaaaaggaagttgtactgtatcttttttttttttagcacgagaattcgacgaaatttgctcaaattcgcagcgcgagaatcgtgttcgggctgaacgctctcaacggccgggttccgttgccggatgggtcgatgggagggccatgggattacaccaatgctgcatcgctgattcgttacaccgcgagcaagggttacaaaattcatggatgggagcttggtaagttcaaatcatcttgcaaatcgaatcgaccgtgcctcgaaatgtgctatctctgggtgctttttggtcagaaacaaagctgatttctcagttctgacgcatgctgtcaacatctgtttagtttaatgttcaggttaccaaacctaccaaataaagaacaggatgagaattcttgttctacctgcccttccatttctgctttcttttagcaaaagaatctttattagttagaagtacaaaaattcttcatgcaattcaaccaagttgattttggggaagatttgtactgtccttgcaggaaatgaactcagtggcagtggagttggaacaaaagttggggctgaccaatatgctgcagatgtgattgcactgaaatcactagttgacactatctaccaaggcaatccatcaaagccacttgttcttgctcctggaggtttctttgatgcaggctggtttactgaagttatagtcaaaaccaggccaaacctactgaatgtggtcacccatcacatctacaacttagggccaggtatgctcaccatgaactgctgataatttggtacatgaattggagtgtgaaagttctgaacaaacgcgatggattattcctggctgaaagttctgataatttggtcgccgcaggagtggacacacatctgattgagaagatcctgaatccatcttatcttgatggaatggtgagcacattcagcaatcttcaggggatactgaaatctgccgggacttcggctgtcgcatgggtcggagagtccggaggcgcgtacaacagcggccgccatcttgttaccgattcatttgtgttcagtttctggtaaaccaaaagcttctgaagtgcaaaaattgtagatatcaccaaagaggttgttctgaatttgtgtggttttcaggtttttggatcagcttgggatgtcagcaaagtatgacacgaagagttactgcagacaaagtttgattggtggcaactatggcctgctaaacaaagaaacattccaaccaaatcctgactattacaggtaactgatattcttgggctgttcttcagtaggtaaaaggcaactttcatatgaacaatttcctttgtatgatagtgcaaacaaagattttgatgcctctagcaaaagtttagaattatccttacacttggaaactagaagtagctacttaatggccaagataagaattggttccattgcatataatcttgcagaatcaagtgccaaacttgttgctttcatgacatttccccttacttttattcccctgcagcgctctactatggcatcgcctcatgggaaccaaagttctatctgcaacattcaatggcaccaacatgattcgcacttatgcgcattgcgcaaaagattctgtaagcaatccagaaaacccaatgcattttcatcagaacaatgaaaaaaaaaactcatctactaactgaatctatgctcaatctcttccttgcaagttcagccaggaataacactactgctgatcaacctcagtggcaacaccacaagccaagtttcagtgacaagtgaaggtgctcatgcaaacactgtgaagaagcatagcagaaagaccaggcatcttgcagctggatcaatgagagaagaataccatcttactgccaaagatggcagcttgcagagccaagtgatgctgctgaatggcagggcattggttgctgatgaaaatggggaaatccctaggctggagcctgtcaaagtggatgcagcacagccaatagctgtggctccttactccattgtgtttgctcacatacacaatttccctgcccctgcatgtagttagattagggcaagattgtttttatttttgggtgatttggtgtgattgttattgttgttataggaaaggtgaagttaggatgggtagctaagcttgcccatctcaagatgaagtaaagctgcaaggctgaaaagtttgtgattttttttttttggggttgttcaattgtgtaagattgggaaaaaaatgatatgatgaagaaaaggaaagggaaaagctctttcccattgaagatctttctgagatacaacctttttcaccccttgtttttctgagatgcaatctttcaacttttattttccctgagatgcaatctttcacttttgtttggatagaaagagcatgaaaagacaaatgagaaattatgtaagacagtatcaaactatcaatagaatgagaattctaggtaatcgactccaatttgagaatgtagaatttcatggctgctactgagtaggcaatcgactcaaaattgagaatgtagaatttcatggctgccactgagtaggataattcgtttgccccagccatgtgaacttgcaagttccaagttttaaagggtaagattctagccacccaattggagaaaatggcatttatatgtacgtgggcaatgctagaaagtcttatagtatgaaacggagggagtacattattgcaaaccagattttgatcagatgaagagatttaccaccagtaactaacatgcaacaatcatcatctcattgttcaagagttcaaacattatcgtcgtcatcatgggacgaggaaaatttgccagacacgcaccagagatgggagaacatctggactctggtctcttctaagtgaagctaacagtaaggctaaggtaacaactcccaagaggccaaagataagacaacagcaatcctgaaacaacatgagacccaaaaagaaacggtgcgggcgattcccaagcacaacgtacactggcagtcgttattcgtgatgtccgtcgaagatttcagcgctgctgccaatggtattatgttcttagaaccacttgaacagcagaccaccgtgtgtggcgaagaaaggcgcaaacacaagggactcgacggccatgagcttgatgaggatgttgagcgacgggcctgatgtgtccttgagggggtctccaatggtgtcaccgatcacggcggccttgtggcagtctgatcccttgggaccaagggtccgagcatgctcactggcaccagcctgaaataaaacagggagcaagttgatgtaaagttaagtctcgcgaaggataatgagttgcaaaacatgatcaatcaggattttctgaacatttacctcaatgtacttctttgcgttatcccatgcgccaccagtgttggaggccgagatggcgatctggagaagaggaagattatagatccattgaactagcaaactcgcacaagcacataatgagggagagagaacataatgccaacctgaactccggaaacaagagcaccagccagaacaccagacagggtctccacaccaaagagagttccgacgatgaggggggtgagcatcaccaaagcaccagggggaatcatctccttgatggaagcatcagtggagatcttgacgcaggtggcatagtcaggcttgccagttccctccattagcccaggaatggagttgaattgcctccgaacctcctcaaccatcttgagggcggcacttccaacactcttcatggtcatggcagagaaccagtacgggagcatggctccaacaatcaaaccgatgaagacctttggagacaggacatcaacaaccttcactccagctctgctgacgaaggcaccaaaaagtgcaagggacaccagagcagctgatccaatggcaaaaccctacaaaagaatataaaaggatcaaatcacagaaccaacataacagttcttcctaagcacccactaattctaatgcttaattaactaataatagcttgggaatgctcatcaagagtaagcacatgattgtaccttcccaatagcagcagttgtgttgccagcagcatcaagggcatcagttctctcacggattctgtggctcataccagccatctcggcaataccaccagcattgtcactgataggaccataagcatcaatggcaaggcctgttgcaatggtgcttagcatgccaagagcggcaacggctatgccgtacattgcagcaatagagaaactaacatatatgctgacagcaatagcaaaaattgggatgataactgatttgtatcccagagcaagaccaaatatgacattagtggcagcaccagttctgcaggaatctgcaacatcttgcacagggctgccaaaaagaagcagtagggattaaaacatgtaatgtaacaatggtgaaagacatcataattggaaactaataggtttcttacctgtatgcattgctagtgtagtactctgtcacaaaaccaatgatcagaccagcccacagaccaattgcaacgcagaagaacaagcccctgtgaaaccacagcaaattaatcagaaagaatacatttcacaaacaaataacaaaactagacaacatttcacaaacaaagaaagttagacaagtagtttaccagttggtaacttccttctgagcaccaaaattgaagatggtgaactttgctggaagggccaaccagctgattattgcaataccaacagtcatcaaagcagtggagatgatgagctgcttcttcagagcaggttcaatttctttcactgccttgatctcaaagaaatcagttgcaaagagtgtggtgatcaaacaaacaatgatgccaacagagctgacaagcagtgggtagcacatcccagtgaaatcatggttgattccaaaagatgagatagatgcaacaacaagagcagcacaggatgattcggcgtatgacccaaagagatctgatcccattccagcaatatcaccaacattgtcaccgacattgtcagcaatcacctgcaaaacaagaagaggaagttcagagagggaagatcatgaactataatagtcactacaatactgcgggactgatacgattatccccttaacttccctaaaataaaattaatagcctgacaaagagatgagaaaactcacagctgggttcctgggatcatcttcagggatgttcctctcaaccttgccaacaagatcagcacccacatcagcagccttagtgtaaatacctccaccaacccttccgaagagagccatggaagatccaccaagaccataaccagtgatagactcaaaaagaccttcccagtcatcaccataatacaacttaaatacattaatggcgatgtaaagaaccacaagaccacttgatgccagcaagaagcccataacagcaccagagcggaaagcaatgataaatgccttcccaacacccttccttgcttccagggtagttctggcattggcaaatgtggcgatcttcattccaaggtaaccagagaccaaagaggtgatcgctcccagcaagaaagatgcagtgctaaagagcgcgttgaaaagggcaggcttgcagtacttgtccttgctgtatgtgcaaggctggctctttgtactgaatccctcgactgaaccaaggaagaggaagatcacgacagcgaagattgacatgaagataccaacatattggtactccgtgaagagaaatgatgttgctcctgctcataaaaagaaggcaattgttacaaaaaaaatcatatcattcaacacgacttagtgtcagtataagcaaagttttgctaaattacattgcaattcccatacaaactatgaaaaataatacagaatattgatttgtcaaaccaatgcacatgacatgacactgaacaccataataagctttggtcggattttatcttctgacatcagcaaaaaatggaagaagagcatgtgcacatatatactagaaaaaaataagccgtaaaccacccgagagcaagtgacaagccccatgtccaaatcctagcagatattccagaagtagctcttcctgtgtccccatcacaatcaaagaaagaaggcatgagccaagattggtgacatacataaacaaaccgcactaatgggacacgcatctgaagagcattaagccatccatactgatgaagacagcaaattcataggtcatgtgctaagctgacacgttggtgacatatggcttggtatccttacgtttccagactagatctaccgggcaccagaagattggagcccaggtttacattaatgtaaaacttaagtcagcctaatactgactagatcaacttgttaagttgggacagacagatccctcacgcgccttccactgcagaatttgtactactactgaaagctacatctttcctacaaaaccgacacagggtaagagcaccgcttcaagcattaaaagaactcattactgaaccctcgatttagcccaactaatgtgcagatctaccgtcttggggcaaagaaaaatatttgccagcccccactcagtggcatagacaaaagtgaattctaacgaaaacaaaaaaagaaaacatatcaacacaggaggagcccccactagaaaaaatacagatttggggcaaaccaggagagactaaaatatcaggaaagcacatatttggacaaagtagcactatttggcagcccccacaaagaaaccaaaagccccaacgagaagatttggcttccatcgcctaaaacctccaatctttaacatcacttcagcggttcatctcggatttttcatgattcttcttcattcacaaagccatcttttttgaggagcttttggaagttttcccatcagatcgtcgttattgaaactaactaatcaagggagaatagaaccaaaaaacgaaccattttgcccctgcaatgtcgcgctcatcgacaaaatcatacgcccagatacgaaatgacttaagaatgatttaataatataagtaatccccacgaagaacgcgcgaaagccgcatcgtctcggccgaaacggccacgggaacgatcagatctagccgaaccaggcgacgcggccagatctgagagggagagagagattcaccttcggagatggcggtctggatctcgtggcacttgacgacgacgttgtggtcgttgagcccctcctcctcctcgatgaggtagtccccgtacccgccgttcttgctcccccccgacgccgcggccgccgccgcgtgcgccgggttgaccttcacccgcgcgacgagcagccactgcgcgacggcgaacgcgacgccgacggcggccgcgacggggatgaacacctcggtcccgagcgccgagaggatcgccatggcggcggcgcccaccacgaaaaccctaaccctactacggttgcaacggaggcgaggcggcggcggcggcggcggggaggaggtgacgcgtctctcgctctgcacactctcctgtgagctcgggagtcgcgttattatatagcggcgcgagtgaggtgaggtgaggtgaggtggcgatgcgaggagagagaaaggggagctggatttgatttgggaggtattataaggggttatatgtaatattgcctcaccatgccttgtgtggggagaaaattgatgagagatgtcactcttttttaaaaaacacatgggcctctttgaattaaaggatttatgtaggaatttcataggattcaaatcctatagaaattttttctatttagtcctttgattcaaaggattgaagcttttcaaatcctataaaattcctatggaatgtcacattgcatgtgaattttggaggaaatataacaagagctccaacctcttggaaaattttctttgagtctatattcatgcgtttttcctgcgctccaatcaaacggccttttgtgtgtttttcctgtgttttacaatcctctgttttacacttcaattcctatcagaatcatgtgtttttcctattcctccatttttttaaccttgtgattcaaaggggccctaaacgcgcagacgttcataacatccgtacgctcattgttatgaacacacacgtataacctattgtatctccgaacaaactaggtcagcatatcttgaaatatgagactgacgaagtcatgataggtacctcgctatcgacaggtatgtcaactaccattgaaagaataagatttaaacccgggtggattggtttcaccacaagtaacctaaccaattgagttgtgctcacttcgctatgagatgccactctttacgcgtggattcgatgaaaatgccaacacgcgcttctttgaaatgtggattttaaaacgaaggaataggaaaaaaaagtcatatgattttgataggaatatgaatgaaataaagaattataaaataaatacaagaatgatcatttaattagattgtaggaaaagtcgtaggtatcagataagagataggtttaaagtggaaattactaaggagttagaactcttgttaacttttctcctaaatctctataagaccatccattccataggaattttaaaataaaaagataaaatttaatcctttatttcaaataccttcgtaggaaattatcttgtgtgattaaaatcttccaagtttctaaagtttctagtataaattatagggttgcttagaatactcttgatatacactacattgtcattcttgataaacccacaattttgggaatacttaactatttactactttttagatgtgacaattaatcatttatcatctgaatctacatgtcatagatgtatgaggatctacatgttattgatatatacgtaagtgataaatgattaaacgtcaaatgtaagaatagcaaatggctaaatgtccctcaaatttaagggcccctttgaatcgtaggaatgaaaaaaggatgaataggaaaaacataagattctgataggaatgtaagtgtaaaacagaggattgcaaaatacagaaatgatcgtttgattggaccacatgaatcggatgagcgagatagactcaaaggatttttaccaagaggttggacctcttgctaaattttctccaaagtctatatacaataagccattccataggaattttgtaggatttgaaaaacttcaaccctttgaccataagaatgtcaacatagcgaatagtgctagtattttatcaattgcattatcaagtgtgctattttatcaaagtcacataaaaatggcatatcttttcccagtgcggggagttggaattaattattggagaatagtagggtgtgaagtgtaaggtttgcatcactgtacttttgtaattttgctggtgaggtggggtggaatttgtgcgcttttcttggggtccctggaggatgcaagtggggcccggaataaaatatctttctttttcactgatatgggaaagactagaagaattttcagatctactagtagtggcatgtttgcccttaaaatggagtgtagtacaaaattgctgttgaacattgccggtgaaattgtgaatgcttgtggcaggaagaaatgtgtgcgaaatgtacaaatctatggtttatcatgtataattatggccggtttggtttgaggcttaaattggtcttaccaatatttggcaatttcaatagtgtttagtgtctatttggtttgaaactaaattttggtatacctaagaaaataggccatttcaatagttaatttaggctattttgacttcaatccaaacacaactttacattgccaaaattagctatgccaaagcttgccaaaatttggcattgataaaaattggtaaggctaatttatgtcacaaaccaaaccagcccttaattttgcgctgggcctcattcttttctgttatatattatatattatgacgagtatattacttaagccctaaaaaatatagtaatatatgtttcttagataacattttaaaataacttttcaactttataatagttaatattaatatattcgtttgtacccggaaatattgtcacaaaatcatataatatattgttcagtcagatttaaaaaaactagaccattaatgtaatattggcaacaaaattgtctacaccccactctattgttccttgtatcagttagcttacggtttaacttaactgacgatccaacttatcaacgaccaaatcaaaatccaataagactctggatggtcagtactatttttccaccaaattcatacaaactactgtaaatccccctgaattacaaacagtacattctcaaatctcaacagtgaagttcagagcccctctcactcgattcgaaaggaaatcgcgcgtagctcggtcacagctaacgcgtggacgcggagacaaatccgattcgtctcaacttgaattggggccaggggcgttcggtccaactaacgatcgatcccccacactaacagcagcagcagcatgaccatccccttccatttctctccacgattagcccactgacaccacatgtacaaatctgcaattaattgtatatgattacccaacattatcaccttgagaaaaaactaacagctcttggctttacatatgttgtcaccttgaaccgtaatttacagcaaaatgtgtaatcctttcaaattcagacaatgttaattgatcttgatggttaaaggttaaaacctgacacaaacaactgggacagcgcagtactatgaattaagtaacctggatcaaattctcgttttgttcctttctctgaagccatgtagctatcctagtagtaaattaacagtagcgtatttggaggttagggagtacacgtcagagagtgttgccacgctggttagtttaaggattgctttcttttatagctgggcttttcggtgcactgatctaattgctttgatggggatctcctatcctacccacctcaccactgttgggtgatataattcagtggttgttgcatgaaatgcctttttttttggctctttgaatttgtattatattgtttgagaaaaaaaaagttggttaattagtcatattctactcattattctagaactgcattgtctatgcattttgttcagaaaatcttctcagttatggtacactcattcttctataaaaaaccaaaaacaaaagaaaaaaaacaagagtagatcctattcaatgacctctcaacaacaatgagcttcttctttaattacttttaatttttaatggattcataaaggataaccaaccaggttaaatatactgtcctgttactatcctttataaggccatcatagtatgaagataagatatttcatggacatccaagatgagcactcattaattagctagtccttttttcctttttggatgccttaatttccaagttaaaaggctgaaagcagtacgtgcttactaatcacgtctcaacaaccttaatctccatcacctctcttgaatctgcaacggatcggatctcatgtatatgttggcaccaaaattcagtccagcgtttccatcatatcccaactcacggaagtaggaatagctgcatcgcgtgatcgatcggtatcacaataattttgggatttttcattagttcttgggtcgaaagccattgcagcctcgtcacacctggctgtcacacacacacacacaacttgtgggaatcggaagaagaaatctctacagcaacacgggagatgggaaaaaaattgtcaggtcagtagatcaccgactgcaaagaaccaatgcaaggagagcgaagcgaccgacactttgcagcggcagagcacagcatctgatcgatcatgcggtcggtcgccggcgaatggatgccgtataattcgcgtggggtttttgacgccacatgtgagctatcggccgccgagacgaggacgagacgagacgaaacgagatcacgagacaccacatgattggtggcccggttgcatgcttgcacgccacgcggttggcaggcaggcgcacgccgggcggggcatgtgtgatccggccatttttccgaacgggaagtgaaacactgaaacagtgaaactactcccgtagtactctgttcaactgcacggtgtcatccgtccattggtgttttttttaaaaaaagacaatctttacctcgtatatattgatagagcagggaaaaaataaatataaattagtatttaccaggcataatcaaaatgaggcccggaaaagactttacggaattcctcccaaagcggtaagctctcttaggctagtcgcccctgtagtcatccaagtggccacttcttctttaattttggcgagaacggtcgttagtggttgcatcttgctccgaaagattcttacgttccgtttgcaccacagctcctaggagatgagaatcactagggtctttatgaccttaatcggattttgcatactgtgcgtaagcatgtaccaccactcttcgacggaggtgcaattgtcctaattttgaaggttaaggtgtaggcccgactatcttttaatctatctccatccaaattcgctaggagaatctacagtcctgccattggtgttggtattagaggttatgtctcgctgcaaaacgttaagaattatgaaactgaaaggagtaggattagacgtgttattacgtgactacgtgagtcgatcgatcaagtagctgactttgccaagttgccagccactcactcaccacttcgcaagcagcgggagaatgtggcgcggccaactacctcgaggctgcctgaatttgctgaagcaaagagcgcgcacatgcttgattcgaaattgctaaacttcatggacctaattcgtgggtgtacaatactaccagcctagctacgaaactgaaatgtaattaatcccaacatgccacgaattaataatgtactagtactactactatcattcattcaagcactactgttaggtgtaggttcaccaacaattttcaacagagatcggccggccaatcaaattcgtgtaaaatctcccgttgggagaggcgacgaaatactgcagctgcatccgcgccgtgacgcccgcggccggcacgctccccaccccaacacggcatgggcattcaagccttttttgctctcagcctgaccaccgcctgaccgtgtggggttgtggtaaagggcctgttcactttgatgccaaaaaaatctaactctaaaccaaaatttcggtatagttgtcaaaattttggcagaattttttatatagttacccaaatttggcagcaaactaaatgtagctacttttttggtaactttaccaaaatttggtaaggttgaaaatgacatcaaagtgaacaggcccaaaattgtcacaggtagggatgagaactgacaaaaaagaaacgcggatattagggaaggatctaaatatcaaacaataagaagggatggggcttcgaacccagatcgtctagcccaccaccttgtgaaactagtcggaagacctctgggtttttctcgagatgaaaacggaccgattcatgaacttacttgtataggtcaaataagtaataacccgtggattttcgtgccatgatccaacttatcgtatctagggatttaaggaggttgatccataattttatagatcaaattagtatgtaatccatgagtcaatccgtaggttactcactaatttttgcttataagcgggctccacgggttcacaggcttgcatttcgcaagcgccaacacagacatcgctgccaacttgcagaagctacacctatctgcacgtataccaactctgtttttttctgctgctgtccaacatgtccagccatgacgattgacgataggtagatggatcatgggatgtgttcttggtttggacgtctagccatgaagatgatgagagccaaggaaaaaaaatgccaaaaatggggagacgaatttcgtttgttcaggctccagtagttgcaggcatgcagagtagtgctgagtagcactagtgactagtgagtgagcgtatgatgatgtatttctgaacaaactcttaacaaccgtagaagactgtgtttagatttaaagtttgaatccaaacttcagtcctttttcatcacatcaacatgccatacatacacaacttttcaatcacatcatcttcaatttaaccaaaattcaaactttgcgctgaactaaatacagccgaagtcccagtcacatggatcctatttatgggtactagtactactagtagtgattagaagcaactttcttaaaaggtacggattagtaacacatcgtttgattagataagctgtcatggcatgcgtttcccacaatgtcacggatgggagcataaacaaatgccgtaatacctagctagtttatggtttatggttcccggcccgttgattaaaactcttgtggtggaggtgtcatctgcacatgatctgttcttccctcgcataaaatcagtatgtaatcactctctgctccatcagaattcagatctctctcctgcactacagctagatccaccatagtaggagcaaggatatagtagtagtactagtagtaagatggatggctagatccagtaacctcactgctccctccatgttcaaagctttgctgcaatttgtcccgacctatcccataattgacatataaaattttgcagagcagaggtgctgtctcccggtgcatttgcagcctcgtcaatgtcatgctagtataaagtcatgtactaatgttgcataaccaatcaccggtgttttacgacgttgatgatcgaccatagacgatgtttataaaatcgtttggagtgaggttgctgccaccccatgattttggtatatcgtggttctagaaactgaaaatattatcgcatgatatatcattattttaaaaactgaaaaagttacctcatgtgataataaccactataattgtacgattttataaacactgccatagactagtgtgtttgtgtccatccaagccttggaaaaattcttggatcctgccgtttcttttttttttccttttggtatttcttttacccgtccttaatacgtactccctccgtctcaaaaaaaagacaaaccctattccgtgtccaacgtttgaccgtccgtcttatttgaaaaattatgaaaaaaattaaaaaaataagtcacgcataaaatattaatcatgttttatcatataagacggacagtcaaacgttggcacgaaaacctagggtttatcttttttttttggaacggagggaactcattgctgaataattgcataggtttgtgtttgttggcgtcactgacgttggaggcacgcatgcacttgccttttatcctttttccccttcttttttgccgtgtcgtttcttttccgttccggcggctggttgcaaagggggctctgagcgagacagcgacattaccagtacccatatggccgtcacggacgtgtatttatcatcactggtgaaactgcccaacagcagcagtgccggatgcacgcactctagagttgctaccatctgttgacgcaggggcagggtatattccgcaggcaggtcgggttcacacctccaaggctccaaggagagaagggaagaggtgaaaaaaaaataattcagtaagagcaagtttaatagtatagcccactaatagctccaattcatctatagccaatataatagctaattcatacaatagttgtttaatatattatt

SEQ ID NO: 5627 - DNA, 32031 bp, Oryza sativa
atactcgagatgatttacctaaaagatttgggatgtgtgggccaaaaggctagatttctgtcacactctggctcaaccttgagatgcagccgatcagaccaatccaggatctgatctttggtttgcacaggatcatttccatacccttctatctgaaaacgcttgccatcaatcaggttgctcagtttcttcttctcttcaactggctgccgaaaaaattccctcgcagcctcgatcacagcatcgatcagtgaggtctcaacgccatggttagaaacctaatcacacagactgttaattactttttttcgccgggtcggcaaacagccgacagagtatattaagatggaagagactgttaattactcgtcacaaaaagaataagagcttattccgtttataggattttgaataagatgtcacatgcactccattccttaggaattttttctcgagatctcacctcatgctaaaaattccatggaattaacttgtaagactacaatccttaggaatatggtagaatccattcctataaaacgaaagatgaatatagggaaaaaaatttctaaggattcgattcctacaataatcttatgaaaatattctaaaccgaatgagccctaaggtgcaagtgcaagttttttttaacccatcactagttcaaaatcatcatatactccgacaaaaaaataggtttaggctgtgtttagttcagcgtaaagtttgaattttggttaaaattagagatgatatgactgaaaagttatgtatgtatgacaggttgatgtgatgaaaaaggactgaagtttggatccaaactttggatctaaacacagccttagaatgaaagatgagaagctcaccaggaagaggccccagttctgcagagccgaccgcagcttggcagcctcgtcggcaccgtccgatcctgacagccggccgagatcgatggtcgggatgggctccggtatctcggcgccggcgagctggtcaccgccggcgaggtcttgcaggtaccggctcggtggctcctgcacgccggcggccagttcttgcactatgtttggcagcctccatggctcgtcagccattggaacttgttcgatcggttttgcttgctcacttgatggagcgaggtgatttcttgaattttggctttgcacgcttgcactaggcaagatggatagattgaaacagctagattttgaagtgtatatatatgtatagatgggattgtttcgtcattgtgtacatgatcatctatgaatagaccagctaccaaccacctgcactaacagaaaatatagtaaaagacaaatgcacatgatgagaaaatatattctttgacgaatcctttaaaggtcaacatattttggatgcaatggcttttttttttggtttttattcatatcgtaacactctgaattttcgtttcaaccaataaaatgacatcaaaatatagttataaaacattatagaaaatatctagtaccacggaagacattcgctagtcattactccgtaaaatttcacatcagaatttgatacacgaattaagggaaaaaagggataaattcaactgaaaaaatttctcagaaagacatgcaaaagaaaaggcaaaccgtttgcaaaattttttggagctacgcttgactcctagtggtgtgtgtggagtccacctcaagatcccgtttttgactcctagtcacgcacacacttattaattactccttctgtttttttaataagtgacaccattaacttatacatgtttaaccattcgtcttatttaaaaaatttatgtaaatgtataagatataaatcatgcttaaagtattttgagtggtaaaacaactaaaaaaataaattataattacgtattttttttaaataagacgaattgtcaaacatgtatccaaaagtcaacaacattgcctcttaaaaaacggagggagtagttaatgttttaagattaaaaaaatcaactaatgttttggcccattcaagctgattcttttcggcctaataggttttgggcctagaattttacacattttttaagcgaaaactaggcttccgcttccctccgaaagaaagagtagcccatttggtaaagctataacacctaaatttaactctaaactcatttatacctctcaagttcattttgtgagagcgctctagccagctccatatcttttttggtggtgttgaaaccgtttggttgggctccaactctaagagaggtggagctggaattggagctgtgccaaacagatccttaaaaaactatattccaaatcaaaacatgtttaaacataccaagttccattaccccttctttctataaagttaaaacccaaagctgcctcctcaattcgccacatcatcaacattatattagctgttcgatcaatatgtaaatcagatttacaccattggatccctcatctttttgcccagcatgcatggtaatcaccttgctccttccccttcccctcccttaatcacatgcattaatttacagcagaaaccgccaaatcaattgggacatgaggtgcgatggttaatacgattcatgtgcctcttgcgattctcttccaaaccttttaataagcccctttacaatccccactataaccaagtctcttcccctttgcatgaatcttttcatcatacgttcgattttatttggtaagcctgaatttaacagttattttgaccggattctatttgagtatacattatgattaatttgaaccaagcaggagcactatgaaagttttgtcaattggtttctctaaacttgaagaaagaatcactatcctatacatttactgttgtcttagtttcttaagaaaagattcatcatgcttgcagccaatacttatatgtcatatcactttaatttatttgaacaattaggaatgatacaaaggattgctatatagctgtcctgacatagcgagaagcagcttaacttgctcggtatgtattttgtttttaggttcaaacaatacaatctaattgttcatactaatatgcatatttacatatgttctcaaatgtgcccgcaacgaagctcggggtttcatctagttattagaaagctatattccaccgatccaacaccgttacgacaacaatctcattctgacatcttgacagtgtcgatgactcgtgtccctcttgcaaaagtctcgtagaagccacttaagtagtccttgatcttcatcttggcatactgcctcggcctcttctcatcgtccaccagctccggcgccggctccagctccttctccggatccagcgcgtagaacatcaccaccgacactcgctccctctcggcgttcgtcaccaccctatgcaccgggctctttaacaacccattgctcattatctgcatcccagaataggtgtctgttagtcatatctttttagataatggaaatgatttacatctccgacctctgctacttagtcggactaattccctaaaagatcaaatataatcagacgtgtaaatgatgatgtactcaaaattgaagctttacaggtctactttacgtgcaattcagattgttgttcagatctcccaaatctctgatccctccaaagatttcttcaggagaagataaaaggaatcatgatatactttaggaatcatggtagaatacttttggaacaccgtaatattttggtttgggttacatgggtgcagtatccttggataaacaaccactaacaagtactccctccgtttcacaatgtaagactttctagcattgcccacatacatatagatgttaatgaatctaaatacatacatatgtctagatatatgtgcgcaatgctagaaagttttacattgtgaaacggatggagtaaatgtatatatacctccattccatcccccatgttgatgagcagagcattggggacgacgggcacatcgtaccagacgccttgcctcagcacctgaagcccactgacggtgtcgtcgacggagacgacggtgatcaccgagccgtcggagtgtggcttcaggcccaacacatcctccggcctcaggcagcgagggtagtagttgaacctcgcgtacgtcgtggcgtcctcgtcgaacatgtcgacgaagtagccctctcgcaggccgagcagcctggccaatctggcgagcacaaggctggtgatctccctgcacctcatagtgtactcatgcagaacatctctgtataaaagaaacaggaaatttcagacaaatgtactggcagaacttgacagattttaagttcttaatcatgcgtgtagattgcagagtgaacaatggattaatcaaggttaggaagattcagtgcctgaaagaaggaggctgtgttggccagaggctatgggctatccgggactcaggctcaacgatgtggtagaaccggtcgcaccagttcaggatctgtttctctgacacgaccatgtcgttgccgtacccttcgatcctgaaatccttgccgttcaccaggttggagtacttctgcttctcttccagtgggagcttgtagaatcctcttgtcacattgatcatctcactgagaatgctcccctccattatagtaccaaataaccctgcaccttatagtaccataggtacccaaaaaaaaaaagtaatactcaatccgtttcagattataagtcattttgactttggttaaagaaaaacgtactccaaattaaactaaatttgtagaaaaaaatagtaatatattcaacacaagataactatattataaaaatatattcaattatagatttaatgaaaataatttgatgttataatattaccaaaattgtctataaatttaatcaaatttggaacagtttgactttaactaaagtcaaaataacttataatatgaaacgaatgcagtggtacttttatttaccaggaagaggccccagtcctctaaggcggagcgtagcttggcaagctcgccggcgctgtcttcaccattggaggcagacagccggctgaggtcgacgacggggatgggctcaggcatgtcggagccggcgatggcagggcggtctttctcgccgaccatgtactggctcggcggctcatggacgccggcggcgagctcctgcacaatcggcggtatcttgacaatgttccagtggtggccgtcagccatggttgtctgaacgcgcagtgcttctgttcagtcaggtgattcctagccagccggtttttatcttatttcggcattgttttgtggccatggatgatgacagagtgaaattggtcagggtttagtcaagatgaaagattttatgtaaacaagttggtaggtcagggatgtgggaagacatggtagtgccactcattagtcagagaggatcaaacacacggtccttgtcatgatagacacaggaacggacccatcgaataagcgaaacggtatatttgcaaacgaatagtaatttgtgaataaaacttttatatatgtatttttaacaatctaaaataaaagcaaaggttgaaaaataaacttcaataaaaaacctcaaaatcaactccaatttaagattgaaaaatttaaaatttggctaataagcataagcataagcataagaaaaagacactccggcagtaatatggtatgggtcgttgagctttacatcactgtcaaatgtttgtctgccgagcccattggccttgttcggcagccagttttgctgcagctgctgtggctgcagcagttgaaaatcgctgtagcgtgctgcgtgcagccgtagctgctgccaaaaaatctctttcgaacacacccattataaaaatctctttcgaacacacccattatcagcggggagattttgcagagacatgcaacaattactcccccctcccaattttattttacttactacctccgtcctaaattagtagtcgctttaacttttttttttgcaacgtttgactattcgtcttatttgaaaaattagtgcaaatgtaaaacatgataagtcattaaagtacttttgataataaagcaagtcacaaacaaaataaataataattccataatttttttgaataagacgaatgatcaaacattacaacaaaaactcaaagctaaactaggaatcacggcaaaatacattgctaccctcattatttacattctaattatctttcttaaagcaagcattaaaattttcttgtgagagtactggtactaatatggctatatcgataaaagtaggaaaaaaaacatatccaatgtagttaatagtgtaattacattacaattatacaataattacaatataataacactataatattaataatgtctaattacaataccattaataatattatagttacatttgaaagttttttgttaaaaaaaacttgcgacatgcttttagcaattccctcaaggaaaaaaacatatttattttcccaggaatacttgctactgaaagctgctgagcttgcaacaatcatgctactagtacaaatcagatcttcagggagtcgatgtatctctctcgtcgagagaattttccaatgatcccagccctgaactctccgacgctcactttcctgtatcttgcaggccgattctcatccagcaaaccagccgccggcccaatatctttctcatcattcacactgtaaaacatggccagtgagatcctctccctctcggcgtttgtcaccaccctgtgcactgggctcctgaagatgccattgcacaatacctgcacataaattttgcatccaaatatgcatcaggattcagaaacctgggtttatcatcatattacagatgtctctgcagattcagagagaaagtgttttggatgctagatgccaattacctccatggtgtcacctaagttgatcagcaatgtgttgggagtgacctgaacattgtaccacttgccatccctctgaatttgcaggccaccgacatcttcgtcgacgagaagaatcgtaaagagggagccgtcggagtgaggcctgacgccgaacacaaggtcaggccttggacagggagggtagtagttgaatcttgcaagtgcaggagctttgttgagtcggtcgaagaagtaatcctcatcaagcccaagaagcttggacatagcctgaacgatatcgtctcttattcttttggttcttgatgcgtactcgttcagaacatccctgcagaagaaaaggctctctaatagctcagtaaaaccatttctcgatacatcgtcaagttattctttctgaattcagacaacaattcttgttactttgttagtaatacatgaacaataaaaacaccatcttttgcaccaaaaaaaaagagtaggaagaaattcagacgtgtgtaaactggaaagtaaaacatcgatcactgtaaggtgagtaggtgacctgaaagattcaggatggtcaggccagaaggcaagatttcgctcctccttgggttcaactctgagaaacagccgatcagaccagtccaggatctgatcttgggttaccacccggtcagttccatacccttccacctggaagttcttgccgtcgatcaagttgctgaattttcgcttccgttcgatcggttggttgaagaactctcttgccaagttcaacacatcatccatcagagaggtttctactccatggttggtaagctggatcacacacagccaggaaaattggagaaattgatacaaagtagcaagttttttattaagcaaagtaggatcactgcgttagtagctgaccaggaagaagccccaattctgcagagccgccctgagcttggcagcctcgtcggcgccggctagccggctgagatcaacgacggggatgggctccggcagctcggcggcgaccagctcgtcagaacggtctttctccccaagcacgtaccgactcggtggctcctcgacgccggccgccgccagctcttgcactatcgccggcgtcctccatgactcgtcagccattagtgttcttgttcttggatctttctttgcttaattttcttcttgcctgaaaagaaaaaggagatctttcaactcatttatagcctgcaaatatgttgaattggatatacttggatgaaaatggattgacaaattaggcacgtgaatggaatctgcttctcagctactattcaacagtagaagaaaggatgcacaatgtacatggtggaaataaaagacacgttgtagataagatgtagatgtagattgagctgaataaagggataggtattcaaactgtttgacatcgtggaatcgagcacaagaaagggaaccttcaaattcattttttgaaattaaaccgaaggtattcaaactgtttaacattgtggaattgggcagaagaaagggactggtatttcaagtagtttgacattgtggaagtgagctagtcctgactcctgagttctgaatgcctgaatgggggaaaacaagttccattgcttaccttttcttatctccttctagatatttcaactggtgtaatatggtgacacaagatctgcaccagatcaactatctctcggtttctatcaatggttagtaacaggagtagtaacctggagagagctgctattctgctcgaaatcaacacaaagtcaattagtcactcatatcaatagacagaacacaattcctatcgaacaaaagaagatcaaacataataaaagaagataaagatgtattattttctaaaagaaaaaaaaaagatcaagatgtgtagatcaagggaaaaattgaaaaactctgaagctgtcaaatgattatgcttgccttttagatggtccaactgaagtactagaattcacaaggctcagctaaatgattcttgccttcactttcttgctgccttgcaaagtggtggatgcttctcaaatatcaagtactagcagtcttgtgtctggctcagtttctttccaaggatctagaaacaagcaaagaaaaaaagttagttgattagtcacaacccataacactgaccaactgtacttcaatgagttatcttccacaaggttagaattttaacctagcatgcagagctcatcaaactgtttggagtagtacaagtacaaaactcatcattcatcctcagcaaacacaaaatgaaacctcacaataatatttttcttttctgataaacgctacagatctggatggcataattacatgagtatgcgaccatgtgactcatactctacaatagttctttttttctgataaactttacagagtacatatcacaatcactatttattttaactggcatagtgactcagatcttcactgtgtcaatcactcttgtcccttgcaagaaatgttcaaagagccctgcaaggtagtccataatcttcaccctcttgtatcttgccgggtgcctttcatcgatcagctcaagtgctggctcaatctctttctcaagattcataaaataaaacaacaccactgatattctctccttttcaggatttgtcataaccctatgcaccgagctcttaaaaatcccattgctcattatctgtacaaaaaagaatgtgtagttcagtgaatcaagaacttggagatgcatcatggcacaacttgaacatactggtagagacaagctcacagtaagtttttttttttgccgggaaggccgaaggaggccaaccgagtatattaagaaggaataaaagttacaagagaaaaaacatcaaaatgcaccaaggtgcattgccacacaccacacactaccacccaagcacaaaccgctgagggtgaaacctagcaccaaacgacccccgctaaatgtggccgaacgccgctaggcctacggcaacaccacagagacgaggctccgaaaacgatgccaccatggtggtcacgacatccaggatgccgccatcgcccatctaaaaagatgtggttttcacccagagaagctcgccaagaaagggagagggtaaccctcgacaacgctccaaggaaattacgacgcccgaagacgtagccgctgtcggcccggtgaaccaccggactaggctttcgcttgggaccctacaaccttgactgcagatcgccgtccaccaactcagaaccaccacacagacaaatggcagcacgtggcatccaccacaccgcaccgacgcccctccatcggccgacttcaacgaaccaccacccctgagagctggcccaggactcctccgttccaccacccgccggccgcctcgccagatttggccgaaggagaacccgggactaggtggcattgcttcggcagcctgagcttcccccactgacaagctaccgcctcaatccaaactataaactccccgcaaagaaagggaggagctccatgaaggccgagggtgccgaccggcaacgaggaagacgacccaccgccgccagctccctttgcactgccatctggccgccggtggtgctgctgctccggaccggcaccacccgccggcgcccccgaagtccggccgccgcgcctcacctggccaccgcggcggcatcccggctgcccggccaccaagctgagccgccaccgaggcctggacgacccaccgcgccatgggctggcgccgagcggccaggccgagcgagtgagcgggggcgccgctgccgctccgggcaggctgcgctgcccgccgcctccgcgaccgggccggccacgacgagccgcagccatccgccgcgcgcgcccgccgctgacgagccgcctccgcgcgcctccacgccgagcctcagccgtccaccgcctccgcgcccgtgctgggccggcctagccgtagccggccgccacctcgccgccttgccgctggccgccatcacgaccgcatgccgtcgcgccgccccaggcctcctcgcgccgccgccgcgcagatccaggcaagggagggccggatccggccatgggggctccgaatccgctgtctcctccccacctcgccgccgtagctgccacggaccacgccggtggagagcttcgtcgtcttcgtccttcgcgccgaggagggagacgctacgaagagaagaaggcctcgctaccgccttccctgcccgctgccggattcgccgccggcgggctccagcgacagcgaggtggggggagggagggagagaaggcgcgggcggctagggtttttcgcccccgagccacccgacgcgaaagcgacgcggggggcttttttgctttttaactcccctcttccgctcacagtaagttcacccacacacaaaaaagggggaagctcacagtgagacagtgagttttagcaagagctaagatagcatgatgcaatggtgacaagaaaaacagcattcgtggacagatatatttacctccatgtgatctcctaagttgatcagcaaggtgtgaggtttagttgggacatcataccagacaccatctttaagaacttgtagcccaccaacgtcgttatcaaccataagaattgtaagaatggttgcatcagaatgaggcttcatgccatagacaagatcaggccttggacactgagggtagtagttgaatcgagcaatagtggtaggcctgtcagagaattgtctgacaaagtaatcctcgttgagtttcaagagctttgccattgatggaaggagactgtttttaactccatcacattttatgagaaactcatccagaacatccctacataagagtcaattcgcataatggattggtactggcgaaagtgttttattgacataatttgaactataaattttgggacagagggagtactaaatttttgtgacacgttgcaaccataaactaggccttataagttgtttaccatcgccgtaaacaaatcgtaaaacatctctgacactgtgtttgtgatattacctgaaagattcaggatgcttgggccaaacggaaagatttctctcgtctgctggatctactttcagatacaatcgatccaaccaatccaggatttgggtatcagatttcacctggtcatttccatacccttctagctggaaatgcttgccgtcaatcaagttggtgtatttttgcttctctccaagatgctgttgaaaaaactctcttgacacattcatcacgttatccatcagagcatcttctatgccatggttagttacctgagaacacaattgcagatatagaatataagccacgacatcatgttatttaaagaagccaaggcagttcaacaaaaatctatcaaaggtacactgactacttattaccatgaaaaggccccaagactccatcgcctgccggagtttcaccgcctcattggcatcaccatctggttgggacaggcgaccaaggtcaacaatggggaatgatgcagtggctgcaatggtcggttggtcttcttgttgcacaatgtactgtcttggcacagatttgcttctcatgccggcaagctcctgcacaagtagtgttgatctcacatcctccatgctcccttccatacggatgtagctcaggtactgtctcaggacttaggttgttcaatgctgttgagttgatacggagaagttactatatatgagtctgagaccatgtacgaaaaaagagtaaaaatactgccattgttgcacaagtggtcatgtaatgaaaacaatttatacctggtataaaaaaatgctgtaagttgcaaccaaattgctgaattaaccaaaaaaaaaaggcaatttgacatttatggagcagagttaggaactgcccaatagtggctgacaattaagatttaaattcaagctcaacatctgattccctaacttcaatataagcacctagagcgcagctgtgtactagcctggagttggcaggctgtttgttctatccttaggtagttgggctaatttctggtggcacagcaaccttgtttgtttatttattacttgtaacctctccttggtcttaatttgggcggcatacttttgccggacaatgaaaaatataagcacctagaagaataaagattcaatataccatgtgaatcagaaaaccactccatgtgttacacaacatacaacatgccaacttcaacttgagaggttgagcaaccgatgatgcacagcacaggcccttaaatttaagcttgtgataacgtcctttccagaataacttaacatcttgaaggagcatattaactgaacctggcaatatcgcttcttttttatttggaagtggcgtatttcacatcaaattctatgacatcttgtttctttttaatttgaaagtggtgtacttcatgacaatattgtttcttttttatttgaaagtggtatagttcatggcaatcttgttcatcttctactactttgaaagtggcatgcttcatatcaaattctatgcaaggaaccctaataccgtgtgctgttttttttttaaaaaaaaacgaacgattcttgttcctacgggatttttcttcctgttttttggattgcacaaaatcaatcctgaaaacattgcacattcgcacagtactaatcccaaataaatttcccccaaacttttcaaagaacaaaaaatttaaccgaagctgctttggcacaaacctatccgccccgattccctatctgcgtaagaagatgggatcgaggcaacccgcaggaagtagcctcgtcgcgcctcctcctccggtcaccgccgccattgccgcgaaatggaatcggttgctcgccgccgccgccgccgccgcctccatagtcccacacggccaccacctgccgccgccgccgaagccccccgacccgacctccatctccgacgaagctcctcattgccatcgcgcggcccaactgccgccgcggcgagcccgcgagagcccaataagtggtgggcttagatgggccgggccggaccatcagtggcggccttggaacgtgtggcccatgatcaaaactaggcctttttcacttttcagttcgatctctcccgttcttcaccggctccggtgagctttgatccaaccaaacctgaaattttccatctcgagtaagattttcatcaccatttgatattttgaattttgattgattgatttctctgctctgcaaagggacaaacaggagaagttgcagcatcaataatgaggcgtttgtacgcatccaatccacaacgatatatcttaatatctatatcccggctatgatgcatataagggagatcgagagagatcgatagcgatgcatagcttgtgatccatcacaacaaagagtggcggcggcggcgcactgatggacggacacggcggctcgccggacgaggacgtacgccggcgacgcgtcagtattggagcccctgctcatctgcaagctaggctggctcggcacgattctcttatattttaaactccttccgtattttgtattttaatgtatgatgttgttgactttttaaccaacatttaaacattcgtcttattttaaaattatgtgtaaatataaaactatttatataatacttaaaaacatttgatgataactcaagtcataataaaaataataataataatatatattttaaataagacgaatagtcaaacgttggtaaaaataaatgacgtcatatattaaaatacggagaaaatattaataatcatatataagaacaaaagatatggttttcacatcaaatgcggaatttagctttagcccaaacggcatgcatgattggagctcgaattttttaaattatttttgaggactcaagtgcgcgtgcgatatttgcttttggctcctcaaacaccactcaattaattataaaaaaaatccgaaaagatattacagtacaacattgatacagttgatctacacacaacgagaaaaaacaggaggacaaattcagttacaaatagtactataaccaaatttatgacttcaggttttcaaatattgcatattataacatatgtttagaaacattttgatgatatatatgcaaagcaaaaatatatatatatactccctccatttcaaaatatttgacaccgctgactttttagtacatgtttgaccattcgtcttattcaaaaaatttaagtaattatttattttttttcatatcatttgattcattgttaaatttactttcacgtacatacatagttttacatatttcataatttttttaataagacgaatggtcaaacatgtgctaaaaagttaacggtgtcaaacattttaaaacggagggagtactactttggttgtaaattgatttccccttcatgtggagagtaaaagatcgatctatttcttcacaccaaagtgaactttatttttcatcatcaacacagttcatgacacagtcgatacaacacattattgataattcatccgtttcacaatgtaagtcattctaacattttccacatttatattgatgctaatgaatctaaataagtatatatgtttagatttattagcatcaatatgaatatgagaaatgctagatgacttacattgtaaaacggagggagtagtagattattagactcacgtaatacgtctcaaccaacctagtaaacaccaacgtgaacatctatcattctatctattattccacatatttttttagtttaagcatgcaggccacgcgattaattagctagattcctccatcacatcacgcgctggtcgagacggccgccgccgccgccgcctccggctgctgctgctggtgctcgaccttgaccttgaggaagtcgatggtgcgctcgccggcggcgaatgcgtcccagaagccgtcgccgaaggccttggccttgagcttctagtacatcgccggccgctcctcgccgacgagctcctccgacggcgccagctccttgtgcggctccggctggtagaacatcaccaccgacatcctctccctctcgctcgtcaccaccctgtgcaccggcgccatgaacacttgctcatgatctgcaacaccaagcaatgcaaacaacttaaatttttattcaagcagatctatttttttactcaaatagctataaaaaattaagaaaatagtaatatcaaatgggatgacataaatttatagaaagactaaatttaatctagaactagaaaagagaaacaataaaatcagctagtaaatgtagatcgaatttaaacttccatgtttacgcatggagcctcactgtagggctatctactggtagtagaaatcaatttaaagtgttaatttcatttgattgaagagctcagatctatttatactaccagcctagttagcggtggtagaaacgtggaggagtattagaaaaaatagatgcgagggcataaacgttatttagcaatgactaaaccttttttttcttctctttttttttctttttcgatgaaatataagcgatgccaacacaatcaatgaatgatcatatatctatttagacaaggaaaacataaataacaaagtaacttttaatcattataatagtaaattactaattatcctttataatactgatggtataataccaccaatagaaagcaccgaagtatcactcttatgtattattattatcataatctatcttaccaactttttataactattacctcaatctcgtcgccggcgacgacgaggagctcgttggtgagcaccggaatgtcgagccagcggccgtccttgagcagctggaggccgccgacgtgcttgtcgaggaggaggacggtgaggacggagttgtccgtgtggggcttgaggccgtacacgagctccggccgcgggcatggcgggtagtaggtgaaccgcgcgtacgtcgtcaccttctcgccgaccttgtcgccgaagaactcctccccgaaccccagcgacctcgccgtggcggcgagcacccgccggaacacctgctcgctccgccgcgtgtactcctcgaggagtccccggagcgccgccgggtgctccggccagaactccagccgccgctcctcctccggctgcacctggaggtagagccggtcgcaccagtcgaggatctgctcgtcggtgtccacgcggtcgatgccgtagccctcgggctggaacctctcgccgccggcgccgacgccgtcggcgtcggcggcggcgaccacgttgctgtacctctccttctcctccggcgggaggtggaagaactcccgcgtcgcggcgaggatctcgtcgaggaacggctccggcatgccgtggccggtcaccgcgaagagcccccacgactggagcgccgaccggagcttggccgcctcgccgccgtcgtcgacgacgtcgtcaccgctctcggcggccagtcggctcacgtctatggtggggatggcggcgagctcccgctgcgccgcctgcacggcgccggccgccgccaccgggcggtccttctcccgcagcacgtacctgctcggcggcgccccgagctcgccgccggcggcgaggtcttgcaccatctggccctgagctgggtgcaccatggtctgtgactgtgtgtgtgtttgcttcactgtcagtagcctctactcattaagtatttaaatagtctggatttaactccgttatactacctccgtcacaaaatataaactacctccgttacaaaatataaacttctagctatgaatctagatagttatatatccatattcattgctagaaatgcttatattctggagggagtatagattttttttatttgacgcaatcgttaacatgcggtgtagacattggacaacaccacactgtatcttttataaaatcgagtgtggaaccatatgatattttgttaggaaaaaagcttatcatcagttcatcacccgtcaacttggtgatcatgcagattgtttcagctattttctagtgtagaataattgctaggtgatccgtgccatgatctattctgatcgtgatcgtcttgaataatttcaatggagcaaaggaaacatgtgcccaggatcgcattgtagtgactgaatcgtcagtctactttgggcttcaaatcaggatggattcggggatatacttgaacttcgggagttcatctacaaccccgaactttagttttaacaaatacatcaaattaaccatgagcttcaccgacaaataagctccatttttatagtttcaacaaggtggaatccatttggatttattagatttggaatccatatgtaaatgtgcttcattggatctcgcggatttgtcaatttgtttatggcctgcaccgctcacgttgatttctttctttaatatggtacgatgagattagcttgttaaaaaggttgagtgtggcctggtaattaagtaggactgatgatcaacttgttaaacacatgtaggttaggaatggatctgttggacaagcttactgtgagactccacttcaatggatagtttttgacgatggaacgatgttgcattgagaaagacccggaggtcttcaactgtcatatttttaaccggaaggatattctaaaaagttttattatcccatttcaggcgacttgtttaccctgcaaattgtttccgtcattttctagtctaaaaaatttgctgggcgatctgccatgatctgtatcgatagtgatcgtcttaaatcatttcaatggaaaggttgcacatgctgggattgtatttcagggacagtaaagcatctactttggctgcagcagacgcagcctgccctccatttgtttgccactgcccaagaatctaagatgacatgcattaaacttatgggttgaagtgacaaatggtgaaatggaggcctcaactcagggctggatttgaagatgttaatgagaaaaaaagttggagaagagaaggccagtatatcccctaaacttcgaacagaagttcatctatcaccctgaatttggtttcgactttcgacaaatatgtcaaacaggaagctccaccaaaaataagctcagcgcttttatagtttttgtcaactagttcccctacacttgtatttaagtatactgatcggataaagcagcgtttgaaatgatgtatctatttttcattccagaagccgcttggtgtatacaaaatggcaaaatatacagcgtcacctcttcatcaggacaccaccgtcataaccatgcgtgctgctaactcatgcgtgggaacatactttctctgcatacggcagcagaattacagcattagcatagaagtaccgccatgaattgtccagggtaggataatggattcaggaggcgagcttttaccttgtctagaactgccgcagcacaaacggtcgtcatcaacataagtagtattcagccccatcatccatgaacctactgatatgtcatcatgggcatagctctgtagcgatgcactgcatatcgaagagaaacaaattgctcaaatttcggtcaaattttgactgcatatactcctatattgactagagatatcaattggttactgttgtattattgattattgacaaagaacatctggacagtgttcctgcatcatcaagaccatcaaatagatggcagatggctaacatttatatatcagttagtcagaacagcatttcagtggccggttattaattcataaatgctaaagacagtattagtaacttatatgaaatccagcgaatatagcctgttttctgtaaatcacatatacaggagaagactcatgtaacaaaaaactaatttgtcgtttgaccaccaagaaaacatcatcctaattgcaacatttattctgtattaattgaactgatgcactgcaattgctcagaggggcctggttggtcaccaaaactggtttagcttagcatgactcaaagataaaacaggtggatgcgcaccacttacctgtttatgttaatgtagcgtgccaaattgttagagaggataaacaaagcaccggaagcatggcgaaaatacctgagaattaaaaatcacagtgaacggaaaaaaagtgatatactagaaagttgaaggagccagagaatgaaaacgctgaagaaacagcagagaacacttctcatagatactagtatcacccaggaaacacatctatttaaactaggcgtattccttcaccaaacaaatagaaattacaagcacaatgcaaattaagtctaaatataaaacagatgggcttcaccagatctttaagactcgtaaaccatttgtgaatcaaggagaaaccgctattagcatgaaaaagtagttataatgacatcatccgctgcaagccatgcaaggttatacgagtagttggtaatatgaaaaaaaaaatcattcttaggtttgcattgaaggctgaaactcactatcaggaggttgaaatgtttgtagcctcaatgtagcattagactcagaaatccaaatactaagaaagaacatgagatcggtgcttcattaataatgcccataaaacatgtaagaacaccactagacacagaattattgctaatcacccaacactaagatgaatattaggataatagacaaatggcaaggaccttgaatatgttagtttactcacgtttttgaatctccaaacttccaccattcaggttcataccattgttgacccctgaaattgaagttggtatcaagtggcttcaatgacgggttaacaaagggcaaagcaatccaatgtactgaatgaaatattatccctgaatatataaatgatgcaatgcaattaagagtgtgcaaggtacatgttttctcgatatcaagcaatggtagcacctaaggtaaataatgggactaagcaattcaaaagctatgattccttgattggaccaaacgtttcagatgctcaatgcattccactacatttacatagctttcaaagatggaaggatgtcagcatggaagcatcactgctaaatggatccgcaaggaaaacaaatggtacctcttatgaaatggatggtctagttggtgttaacatatgccatgcatgttgtctaaaatctaaataaataaaaacctactgatgatgggaatgaaagcacatactcttcacttacaacacctcctgatttcatgcaacccatgtacagtccttggctacctcgacgggcttcaagcatctcaattaatccagctaatatatagattgtaatgagtcaaaacattaagccgaaataagccataggtgtaatgtttcaacagaaaaggaattacccaggtcaaggttaatgttgtcatcgactttcacatagaactctgcgtcccaagcttcaattgctgcactgaagaaaaacttaactttgcttggtaactcctctgcagcttcctcatgactttcctgtgtgacaatttattgactatttatgtcacattctgttctccataaagtgcaagcagtttgttcaagatttgacaatgtcacaaaaatggttttgatctaagctgtatatccaaatgtcaaattaaaaaccgacatttagatgaatcaggacagtgagataacttaaaataggtactgaattgaaggcccaatacggacgagaatgtaagatagtcttccatgccagaaaacaaccaagcaaagccaaaagtcttctgcatgtactacagtactaattttttgtgaaggacaaattggaaaaatgatattaaatgttattagatccttacaagaatcaagaaatctttcgtccgacgattttcatcatcgatgttgcggtccaagctatcacctcgatttgcactgaaggaccaaacagaacaatttcagtaggaaaactaaacatgaagaaaagcctgagaatgatatggggcgaatgattgtctaaggtgctagagatgctacatataagagatatggatccagaataaaacctccgaccaatgacaaaacgaatgaccacacccttctcctcaagcttcttcagagcatcacctgaaatttacagtgaggtaaaagaacaattatactcctgtagttgaaaccttataagtaacatagtttgcatcagcaatagctattagaaaaaaaaatgaagctgcattccaaccaaatgttatcagggcgcacacattttatcgccgtaaactggaaactaaaagagcaagaacagcgaacctctcggcatccatgagccacggaaggtgttcctcttgagccgggaaccaaaaccagtgtaaactccaataacagcaaggagcttcttcttgtcagaactaccagtagcagttccattcccccacagatacccctcgctcttcgcctttgtaaggtccatttctgcctccgcaatcttcctcccaattccactgccaccaaacaacccatttcaaatcagcaactaaaattctgaattctgaattcctcttcagagagagagaggggggaattacatgcatcctagattcctcagcttgtcctccaccgacagcaccttcggaagctgcaatttaggcgataccatcacacgaactgacaaatcaagcggaaaaaaaaaacgagaagtgggtggagagggggagagatccgcacattgccggagctcttctcgaggagaccagacaggatcatccgcgtctgcgcgtcctgccacagcctgcaaaaaaaaaatccaatcaacgaaacaatcagaaaactccacggaaattccccccggatctgagcgcgcgggcgcgcgtacgtaccggccggcgacgtagagccacgcgaggcaggagaggaaggccatgacgagggggaccctccccgaggagagggcggcggaggcggaggcggaggaggaggaggggggcttgaagcggcggttctcccgccgcatggcgctcgccagcgtctccatggcgatctggtggcgatctcctcctccctaccagccgccgctgccgctggtagagaagaaaagcttcggacacactgcagctcgcctccaccactcgtaggccgacaagaagacgacgaattcggcccaaattcaactccatttttgcgaaggagataaaaacgggccgaattcagccccaaatcccacgccatacgcaaaattgggccgaaatcagagaaaattggagtaagtctaatttgtctccctgtcatgcttttgagtgaatcaccctcctcaaccgcaaaaccgggtataatgtctccgcttcaaaagccggtgcacatcaacataaaccacttcctaaacccccaaaatagtcaatttgcactggttttcgaagatgggagagacgttatcagacaaaaatagacttatccgcaaaagaatcgacttgcactggtttagatggaatagatgttatatccggttttgtagtcaaaaggacaaaatagacttattgtcaaaattctacgctgttcgctaatttgggccgaattaagccgaagcctgcgccgtttgggctagcccgttgaggcccaactcgccgaatgccctacgaaaccaaccacacgaagcccgcgagttttccgtcaccttctcagttcactcgacctcgccgccggcaatggcgctcctcctcctccgccgccgcatccaccgcggccacaaaaccctcctcccgcgcgccttctcctcttcctccggcgagggtatgttcccgcctccgacgtccgaccccgcatccgccgatcagcgcaccaccaagctctcctcccacttcgccgaaatccgcggccacctcaacgccacccctccctcctccccgccgcgccgcatccccgaatcaccgccgcccgacgatgtccgccgcagcctccacctcttccgcaacccccatccctcatccggcgcgacctccgccgccgccgcgaaccccagcccctccttcgccgacgtcttccgcgccaggcccgcccctccgaccagccgcgccaccggagcggacgcctttcccttcagcgcgctccgcgagagcttgaacaagaacctgggaacgagccccacggcgtcggcggtgcccctccccggcgccaccgccagttcgccggactggagctccatcctctcctcgcggcagagacacgacgggaagccgctgccggagtcggtgttcgggagggaaacgaggggggaggcgaggagaggccgtgacggcaaagtggaggagcagcagttcatccggttgtacagcgacaatgagctcggcaagaagctcagtgaactgcggccaccggtgggtaaggatgggaaggagtggttctccgtggaggagctgagccggcgactcaagaagctgcgagagatggacagggaggaaagggctctgcagtccgggctgggcaccgacgtgctgcgggatgcgatcgtgacgctgcagaccaaagatctgaagacgaacaactgtaatgatacatcgtgattttgctgttcttgtttagtcgccattggtgaatgcctgatgaaactgatggataacctttttgttactgatgatgctgtggttacatttggtttgctagtggctgcagcacagagtatgtcggctttgatggcctttggctctcaggccacaccggcgtacttgctggggaaaccgcaacaggagttggtggagagggtgagctggaagtgttgtgcatttgatgcattttgttgtttagattggatgatgtggtgttgagaattgtcagttggatctttgcagtacttccatcccgatcatatgtcatcagcggagaagatgaagcaggagctccagagtgtaagggatgagttcaaaatgtctgagaatgactgtggttctgcacgggttcaaggtattttttgtttcttctgtaaccatagagttgtgagaaactgacatcttagttatgaggagctttatatgtgatcatgttcaggtctttatggtcttacgtgagaatttgttctcatatcaaacactcacttgctatctattaaaattcattacttaaaaggtacacggtaaagcactgatatgtgttaactggtgcaaatttatgagtaagtttcttttgacatgtattgcactcatatgtgttgactgctgcaagtttatgagtaagtttcttttgacgtgtatttgttccccatgagaaatgacaacgtggtgtatacttttacagtaggggtagttttaaggctcaattttgtgtattgaagatgtcgtgcaataagagttatttgttaatactgatatttaggccatttctgtttgacaatttttgaactttttgttgcaaacttctgctgccatttatttagtcaccatctaagtcatgttccacgcttgggtatgttatgttgagtgttgagtgtgtgaataagctatgtaatatgcacgtcacgttttaaaaccctgaacccagtggtttagttattacgagtttagttaagatttggctttatatccaaactagctaatcttgtcctctaaatttgaagttctcttttccaagcttctttttagctcccaatctgtaatatagtttttcttgattcaaagaaagttcaggttcatgattttttatgatgcttccataatagatagatttgctcggtaattgcatgtgactttgaggtgtttacattggcttgaaaagttcaggcatacgaccaaagcaacacactaggacaattgcatctctttaagatttcacattccttctcttttttacccagaaaaacttcctttgttgtaattggtttcagaaaaagggaaactctgtcagcaaggctttagatgagcttttatctccatgcatgtttatgactttatgtaaaatttcctcttcccttccacctttctggcttgtaagtacatattttaggcttgtatatctgcaattgatgcccgtctatgttttgcagtggcacaacttaccacaaaaatcaagcatttgtcaactactctgcataagaaggtgatcttacatgaccattttcatacagcatcacggtttaccttgccatagaatttgccgggctcgcctgattttcttctggtgaagtgaaagtaatatgtgaacttgacgtgtaattcaggacaagcattccagaaagggacttcaagagatggtgcaaaggaggaagaaatacctcaaatacttgcgcagaaccgactgggattcatactgccttgttttgtcaaaactgggacttcgtgatgtgccggagtacaagcctccagattacaagagcaagagaagcagcagcggcaagaccaaagccaagagaaagatgaagagaaaaatgaaggcataagatctaatggtagatttttcttcccgttgatttggatttcgtgaccagaaaccgatagatagattagaagcccaggataagtgtagattggtctcctggtcactgggagtaactgtgttttattttggagctgagcaaataataccaacaatcaaggttgcgttttacggatcatattttatagaagaaaaatgtttgaaatactaagaatgctcctgatctactgacgatgattcgtgatctcaaatactaattttttgttgattcactcgtgtactttacttctactcacctttttgtctcatggtaacttatcaagggccatcaatgtagagagcttgtttattttgttaccaattctaacattaccaaattttgacaatatcaaattttggtaagttttacattgctaaattttagtagctggatgtatttagcttgatgtcttccaaattttgttagtgtttttgtttgaggaaagtttcagaactaccatattttagtacgatggaattggtaaggtgatggttagtttgttaacatatcaaaatttggtagtgaatttgttaggcaaggtttgggtggagaaactcccaggggtctttcggctagctccacgaggtgtggtgggctagacgacttgggttcgaagcttcaccccttctaattatttgatattatgtcattctctaatatttgtgtcttttttaggcaaggtttgggtgaaagaattgggtgaacaatctagttacttgcaacttaaacccaacatcctgtgagtcacctgcttccctgctaacttcatcccgcttgctgaaccgcatatgctatgcacgccgccttgatccggtatccttgtcgagctccgccgcggcgccgccggcgccgtgcatcctcggcggcgatcgacggagatggcgcctcggctcagcgtgaagaagtgcctgatcatcctcgccctcgccgccgccgcggccatcgccggcttcttgtccgtcgccggcgcgggtcgcggccgttcttcctcctcttctccggcgcgtcggctgtcgaatggtctcgccgcggtgcgtgtggttttcgtgtacgccatggtggagagtacgttagtgtgatgagctttgtgcttgtcttttttttttcgtgtgtcatcaggagagggcccggatggcgatggcgagggcggcgtcgccgaccgtggagcgggagctcgacgcggcgcgagcagcgatacgccgggcggcgcggcggcgtcgacatggtgatctcgccggcggcgagggacgaagcagcagcaacgtcagctcggcgaagtggctgagcttcttcggcgacgcggaccacgctcgcctggagcgcgtctaccgcaacccggcggcgttctacaggtagtacataactgaaatctgtccgtacgccggcgacggcgactcgctgacatgtacgccgccgtgttctctccggtgagggggaagcaggagctacgtggagatggagaggcggttcaaggtgtacgtgtacgaggaaggcgagccgccgatcgcgcacgagggcccgtgcaagaacatctacgccgtcgagggccgcttcatcgaggagctcgagctcatggcgccgccgctcggcggcgtacggacgtgggacccggcgcgcgcgcacgccttattcctgccgctgagcgtgtcgcagatggtgcagctcgcgtaccggccgctgtcgtacgacctctcgccgctccgcgccatcgtcgccgactacgtcgccgtcgtcgcctcccgccaccgcttctggaaccgatccgccggcgccgaccacttcatgctctcctgccacgactgggcaagtacaaatcatttttttcccttattttttcagagaaaaatattttcccaacaccaaatgatttccatacaaatttcgaaacgagtgcaaataataaattcagtacatactccctccgttcaacgagactcaatttctgggtttccgactttccgcgtccaacgtttgatcgtccgttttatatgaaatttttttattagtatttttattattgttagataataaaacatgaataatattttattcatgacttatctttttaattttttaatatttttttaaataaaacggacggtcaaacgttagacatggaaacccaaaaattgagtttttttcgaacggagggagtagtgtggaaagaaaaatagaatgaaatgagggggcatcgaaagatccgaaattctggaaattttcatccgtgaacatttcaaatttgaaaaaaagatctgccaagttcaaaaataaaagaacttccctcgaaataatgtcatatcgggggcacaaaattctccgaatttcgaaattttcaaaccgaattttatgttgcacgtgcgtgcgtagggtccgcacgcgtcgagggggcacccggagctgtacgcgaacgccatccgcgcgctgtgcaacgccaacacgtcggagggattccggccggacaaggacgtcagcatcccggagatcaacctctacgacggcgacatgccgccggagctcctgtccccggcgccgccgccgccacggccgttcctggcattcttcgccggcggccggcacggccacgtccgcgacctcctcctccgccactggaaaggccgcgacccggccgtcttccccgtctacgagtacgacctcccctccatccccgtctccgtctccggcgacggcgacaccgacgccggcggcgagggcggcaacccgtactactggtacatgcggcggagcaggttctgcctgtgcccgagcgggcacgaggtggcgagcccgcgggtggtggaggcgatccacgccgggtgcgtgccggtggtagtcgccgacgggtacgcgccgccgttcgccgacgtgctgcggtgggaggcgttctcggtggcggtggcggtcgccgatgtgccgaggctgagggagctgctggagcggatcccggcaccggaggtggagcgcctccgcgacggcgtgcggctggtgaagcgccatttcatgctgcaccagccgccggagaggctcgacatgttccacatgatcctgcactctgtctggctcaggaggctcaaccttaggctgaacagtcactaacaatctcatgatcagtaaccaaagtaaaaatgccatgaaaaaatataggtctagaattatcagttgcattagcactccatttttactgaatacaacttcattaactagttcttaacatgtttcttggctttcacatctcagagttcagaagaaaaaaacttggtatactcctgtaaatcattttgaccacgaagtgtctgaaaacttccacaaaccatattggtaacccccttactggtagaaatataagagggagtagataaaagagtataagatgtacaaaaacacaagattatgttgaacttgacagaatgtaacacggctcaaaagaggttcatcagtaagcatctcctataccaaatgcaaatgtcttcagttatcattgtagggaatgtaccaaatcagaaaggagccaaggatggttagcgcaaaccacagtaacagcacatataatgtataaaaggtattgaaatcaggaaattccatcaaacacaaggggaaactcctcttgtcctgaaatctgcaagttccagtctttttgccttctcatccgatcccccaaacatctgttctcggagggattgtgtggtcatcttatgctgtgaaataggacatgacggttctagccttctagcctaactatgatacccagattcacagtattgacaaggctgactttgctaatctgaagaactagatagatggtgctggaagattgcttgctatttcagcagctcaccaccttctcatctctccataatagtgttcttgattcactgggttaccggatggaaaaccagtggcagctaatacagtaagcccaacaatttggccagtcaattcaaacctataaatcttcagcctattgtgatatagacaattctacaaaacaacaatcatctttttctaggtaatctaaatgctgaatatgatatatcaatggtagttcgacacttccactgtataacagttgcaggttatcttgctaatactagatagaaaaattacacggcaatttgggttgattctcaaattgaaccatggttggaaaccactgtcagcaattctgccaaactataatggtgaactctatcaggatcacaactcgaaccaataaattctagggatagagaaatacaccatatcccaatacacaaagattagccatttgtgtttctgtcaaaagctgcatactgaattggatatgtccaaggtatttgggctctataaatatactcaatataaccatataatcactaagaagggttcttgctgataagaaataggacgataacacacaacaatctggattgatttcaaaccatagctgatggcaactcttaaaagaaaatttatactaaattcatcaactgtttaccatcacatggattaaacaccaaccgaattgcgagaacaagaagcaaaccatctcagtagatcaagcctcaggcgccggctgcgagaggccggccttggcgagcagcttccccatcgcctcaggcgagcacacctggtactgcacctccccggtgccgggctgcaagaacacctcggcgagctccagcttctcggcggtcaagctggtcgaatccatggtcttgctaagcaccttgagggcgagggcgacggcctcctcccgtgtcatcccgtcgcggtagtcctgcttgagcatggactgcgccgcctggctgttggccccgacggcggcggccttccagccgctgtagttgccggaggggtcgctcatgtagagctggaagccatggtgcttgtcccagccggcgaagaggaaggagacgccgaaggggcggaggccgccgaactgggtgtacccctgcttggtgtcgcagagggattggacgagctgctcgacggggatgggctcctggtaggagagggcgtagcgctgggcgtggaggcgcgccgtgttgaggaggatgttggcgtccgacatgatcccggcgacggcgcaggcgaggtgggagtcgatcttgtacatcttctcggcggagcgcgaggtctggaggagcttggaggtgaccttcttctcgccgacgaggaccacgccgtcggccgccaggacgcccagggccgaccctgcgttcccgatcgcctccatcgcgtactccacctggtagagccgcccctccggcgagaagatcgtcgtgcggctgtcgtaccggcgagacatcgcggcggcgggttgttgctggggattccggcggcggaggcggaggcggcgacggcgagagatctactattactaattcagttgagatgtgaggaggttgtaggttgcaaaggttaaaaaatgatttcttcaggggtccaagtagaaaaacgacagcccagatgggccgtctgactctgaaaatgggccaggcccagagattgtaccatgccagcagggcctgccaaatcggcccattatcgtgagggccaagagaaggaataagttcatctaaggtctcttaacttgtcaacgaatccgattttcgtccttcaaccgcaaaactagatacaacaggtccctcaactatcaaaaccggtgcagattaggtccctcggcggttttaaaggctgttttggctgacgtggcacctacgtggctagtttgacttggtctcgatctgacgtggcattgacgtggcgcttacgtggcaattcgatccgaaaaaatataaagctcgtgggacccacatgtcagttt

SEQ ID NO: 5628 - DNA, 17006 bp, Oryza sativa
ggtctgaaaggagaacggtattaggactatggacatatgatggtgtcgatgtcgtctccagaaactccttgtccatgagagggcaacaatatttgaggaagccgggttcacagtttcgaagattgtctctcaggcggatagcatggcaaataggctaaagaaccctaagaaaataaacaagaagaaggataacaaagccaattcatctccctccacagatccagaatcttcaaatccagttgaggctgtagatgcttaaatgatttctattcctttctaggacaggagttcccgaaggtgaattaagttctatgatgttggcatttggtcagttgaggattgatatacagagccataggttgcacaatttatacttgttcagacttagatagcatgctgctctccgcacaagtctttttttttttccctgggatcatggattttatgtagtcttgttgtgggcttgtaacattaacctatggcttttatgtactcaatgaacttctaccactatggctttggagtttggaccataagtacaattttgatagtcaacttgatgaggagtcagtactgaagaatactcgttgtaatgctgttatggctgaacttctgaaaccggcatctcacagctttgttatgcctgctttgaacacaggaattttacattgattttataggaataccacaggaatcaattgaatcctcatggtaaattcctgcacttcaaaggaggccatatctgaccatctcctaagttatttctgcttgaaatgaacatgagcctccagaccgaaactttaaccttaccctgtttggatgtatgaagtaatcaatcactctgctctgcatgctgaagctaatattagactttatgatgtattgcacaaaagtaagtaaagatgatctcaaatgccagatttgtttggcacataaagatggtgtactcttttcaacccaaatcatgggatgccatctttgacataaagtacaacctttatggattaatttaacgaaagcatctatatgaccacttcatattaataaggtcggttgttaatggtgtgcttaaccagaattgggaaagaggaagcattttggtctaaatgtgttttgtttgctcatgcattttggtctatcagtgccaaaccatgtattactccatataactacctctatctacttcaatcgaaggccaaatccgactacctacaataaaatgtttactaacccctgaactttgataatggtacaaataattccatgatggttttaaagcaatttcgccaagctaactgcacgtgtgacttcacaatcaggcaagttaaagtggcacccaataagacatggttagaagagaaatgtagatgagctaaatatataacttattacaagagaagaaaaaatatatatttccattgatatatgctaactctaaatcaagagtagtacaatcatcattagacaatattgctgttgccccactacacgctgcatgcattgcactatatataccaaagtaccaaacaaaaccaattaccaagaaaatcaaaatcagaattgaacaagttgtgcataccgaatctagtttaagttattcaggttgtcaggaacattcaattacacataaaacaattcaattcatgttaaaaaaaaagcactactccctccatcctaaaatatgtgctccttctaacattcaaaagctaaattatgaggtgagaaaaatgaccctggatgtcacttattaaatccctagattattggaagtggaagggtcgttgggataagacggggagaaatttgaatagtgattgatgtgataaataatacaaagagcattctttccgaacaaattttgaatccgaaaggagcaattattttgggatggagaataattgaattaatagtaaatttcactttgaactatctttaataacaaagtttctccatgaattaaggttgctatttgttactgtttggacctgtctgtgtccaaaatgtcaccagactaccacaatagtaatgatttagcccaacaaatttgagacaattagtggccgtccattattgcgctaaaagtttgcttgccaataaatggaagttgtcacttccagtaaaaatatactccaatagaagttgcatcgactgtgtcattaagccgacaaagcagcctctgggtggaggtggatgctactcctacaaagatggatatgtggcacccccttttgttggtctttggaaggaggaacaagttcatgtctcactagctaactagctagaatgagttccaattattgatcatgcatattgtaatgtggtcacaacctatagcttagactctaccaactaaatgcaccatgcttgagcgtggccaaatatatttctcaccagtcaccccagagggccagagacccaaacgtgtgatcggaatgtctttaagttaaacttttaaaacttttaagtaccaatatatttttaagtacaaatttgtattaatttatctcaaaagatagatttcataatgtttattaggttttgcaaatgaattgcaatagaagctagccgcaaacgctaattagcgactagtcccactctctttccaatttttttctctttttattgaatttttcttttcttttgggctccccctaaatttatggctcaatccgagatagctgatttcttgtgtatgatttttttctatacaaagtttcaacaccagtagaaagtttctatatgctagtacaaagtttccatattgtattgaacacggcctgtttgcctttttcatgtgctgttcaattttttctagatgcttatgtatatatacaaactctgtatattatgcgtacaaactttttatgtctaaaatgtatacgtgtacacaaactttgtatattatgcgtgcaaactttttaggtttaaaatgtgtatgtacacgtataattttatttgatattatataaaaataccccccccccaaaaaaaaaaaccaagcacggggagaccataatggggtgcacatgaaaatctttttttacgtccatgagtaacatgcatggcgtggagaacaattaattccattgaagaagtgtatcgatttttcacttttgctataaagtagtatatgataaaatccttatttatcatgaaagttgacttcttattcttaacatgaatcatgttttggaaaataaaaaattgcgtgaaaaattctacaatgacaaataaggaacaaaatatattgagaagcgcagcatgatggtaccctgcaattaattaatgatgcaaaatttcatctcatagtcgtagtacgttctagtattaaaagataataaagatgaattttacatgattgtatataccttgccctattgaacaaatatttttcccacaataaaaaagagagataatttaaatatactttttttgtgtatttgaagcacgggagtaccaatctttttggaacttaattgtatatactccatccgttccattttaagtgcaaccataaattttcgtgcctaactttgatcgtccgtcttatttaaaatttttttataattagtatttttattgttatgagatgataaaacatgaatagtactttactcgtgacttatgtttttaaatttttcaaaaacttttgaaataagacggatagtaacgcgaaaaaatcatagttgcacttgaaatgggacggagggagtatattagaagtgctctcccatgccgtggtgctagctagaggtagatctctctttatcacacctacctagcttagctgccttttatgtcttctctgccctgtcattttactgtcaataatcgaaatcgaaaccaatcacactcgcgaccgaccgacgccctagcctagccactgcacgctgtttccaaaaagaacggatgaactttttgatagatcatatcgatcgatcattaattggtccatcttttacgatctcgattgattgattgattattgatgatctggttcgttgccagatgatcattcatgcattatgcacgtacgtacattggcggagccagaaattttctaagcctagggcttgagtaaggctcaactaataagatattggctttctcaaaaacaatacaaggtgatttaaaaggatttaggcatgtttatggaggcaagcctagggcacacctctgcgtacgtatgttctgaagttgaagacaacttatgtatgcaaatatttaatttatgtattcttaattcttgcgatgtttcatttgtcacttcttaaaaatacattttcacatgcgcatggctataaagccattatttctaccggcgtttaattaccaacccgctgatggctccgctattttctttgagggaaccgtctatggaaataaaattttcccatttcaaaatatcatatttcacgtaaaaaaaaaaaactcctaacaccccatatgggttattatatgcccacgcagttgcaagccacgagtcatgcttcctgtagtcttcaacaattgaacccacgacctcaagtctagcatgattctatattaccatcgctctcatactcacaaatgaatatcaaaacgaatatttggacccaaaataatttgaaataaaaaaaattcaacttcaaagttgtagtcttatccagggctataatttttatataaagtttgtccagccttacatttttagatgcggtttcttaagataactgtatgcaaaaaaaacattttttcatgtgattttagaccacaagactacttgtcattatcacaagagaatttttctattattcacttttagaaatgaaaccagcttctttggaaaaatcgttttctaatagtgtttgcaaataccaatgcaaacacatgtatacatcatgctctttattaaagcagcagatcgacttggacatccattaattaattatctatatatctattatgcatgctctattaattccttattgactaagttttcgatcgcagcacacgtagatgaaccagttgacaagcaataggaagggaagggagattcgattttaggcgtgtgaagcttcggaatgagggaatctagctcgagcaattgtttatatgcacgcataagtgtataaatgtaacttaaatatatacttttttgtgccaaaagtaattgttggttttgtcttcggattaccaagatttgatcaacaattttgttataaataaatttaccatcgaagttgtttcacaattagatttatataatcaaaagtaatttacaaatatctaacaatcaaactaattccctttgatgttagcacttatataaaaatatgaagtttatcttctttcagtcaaactgagagggagtatcaactagctgaggaccaattactgatgtttgatgccaaactcatgactaagtgatgccgagatgtcaatgtcccttgatttgatctgcctgcatacacactactggtacagcttttgagagtgccaaagctccccaaaaatgatttttgaagctgactggtagtagcaactactcgcgccgtgcatgaatatgctctagggattagaagaaatagaattttgtggtgctaggcttattctattttactactttataattaattgtaacctcaattttttgtgtggctggcatgatcttcgaaattcacaagcatcacactaatatgtttttcttttcttaaataatttctgattgtcgaaacatgatttcggcaataataaaagggggtagcgcaaccaatgataatgacaaagacgctcatcagcatttgcatagtaggtcaaccgtcaaggtgaaataataagtcggcgaaaacataatcatccattagcaacagcggagatgtcagggccgatgaagcagaggtgctggtgacgatgtcagtgacaataatccatcaaattaatgttatggctattgtagatgcttcacttggaggagagttgatgttgttgtctaactcgtccaaaccgaaatatttgaagttgttgaagtagaatgtctgctccgaatcaaagatgaagataatgactcctggagttgactcgttggttgatgaattgatttcttcagcttgacataaaatttgtcaaattttgagccttgtatttgtgtagcccccgactctttgattagttgggaaacaactgaacatagagtcgagaactgtagcttcttgtcgtcgaatagtcattgcttgattgaagatatgtgttgaagatgtccaagtagaaatccggtggtgaagacgcgcagttgtgaagataaaagcaccagtcggcggcggcataaccagtcggcgacggaagacgatgatgtccatcagtagtggtagctgtataaccagacgtagaggtaagggcactagtcagcagcagacgagacgaccggcgatgaagatgtaggtgcccaacaacagcggcataataggccagccgtgtaggcggtgacaccagtcggcggcggatgaggcggccggtcggtgaagacgcagacgcccatcaacggtggcataataggccagccgtgcaggcggaagcaccagtcggcggcggacgaggcggccggtcggtgaagacgtagacgcccaacaacggcggcataaaggccagccgtgcaggcggaaacaccagtcggcagcggcgaaggcaagccggtcggtgaagacgtagacgcccaacaacggcggcataaaggccagccgtgcaggcggaaacaccagtcggcggcggcgaaggcaagccggtcggtgaagacgtagacgcccaataacggcggcataaaggccagccgtgcaggcggaagcaccagtcggtggcggacgaggcggccggtcggtgaagacgtagatgcccaacaacagcggcataaaggccagccgtgcaggcgaaaacaccagtcggcggcggatgaggcaagccggtcggtgatgttctgactgatccattcctggagcgtaagagataagcttaaagccatgaatcccttttatgcatatctggatctggatcctgcagaacaaacatataggatgagtagtatctgatataaatataatactcgagaaaaaatcaagtattttaaaatatttataaatatgtatttctcctcttgtcaattttgatttccccgagcagatgactctgtacgtttaaacactctgcccgactagtcataaccaccaagcatcgggagtcggcctaggcacttcccaaacatgcatatgagtgacatgagttcgtcattaatggaacaaagtttcacggatcagaatttactactcaggtacttttgcaattattaagagcagaaaataaatttatctcatctctatgcttttgatttattccgaataatacttagcaccttgcgttactcggtccatccaacgagcccccgggtgctaggaatcggcccaaaggcaaccatccattggcaaaccaaacggaaagcataggaagatagaactccataactcgataggtacttttgtactcagattatgtcgcaagcaatcaagataaatattataaaaaatatgatataacatctgtagcccccgactcactactcaatggaagaccaattggtgtagtgaggcagaggaaaaggaaaaatatcatataaagaataaaataaatgatgacttagctttgtaatattccccttggtgatggcagaagtggccaatgtgggaacaaagtcgtccatcaataacaatgaagacaccagtcggcggcgacgaaggcggtcgacggtgaaagcgaagatgcccactaatggcggcataataggtcagccgtgtaagcggaaacaccagtcgacgggaacgaacgtgagccaacggtgaggacgtagacgcccaacagcggcggcataataggccagccatgtagacggaggcaccaatcggcggcgacggaggcaggccggcggtgaagacgtagacgcccaacaacggtggtgtgaccaaccaaccatataggcgaagacaccagtcggcggcgacggaggcaagccggcggtgaagtcgtagacgcccaacagcggcggcataataggccagccgtgtagacggaggcaccaatcggcggcgacggaggcaggccggcggtgaagacgtagacgcccaacaacggtggtgtgaccaaccaaccatataggcgaagacaccagtcggtggcgacggaggcaggccggtcggtgaagacgtagacgcccaacaacggtggtgtgaccaaccaaccatataggcgaagacaccagtcggcggcggcggaggcaggccggcggtgaagtcgtagacgcccacagcggcggcataataggccagccgtgtagacggaggcaccaatcggcggcgacggaggcaggccggcggtgaagacgtagacgcccaacaacggtggtgtgaccaaccaaccatacaggcgaagacaccagtcggcggcgacggaggcaggccggcggtgaagtcgtagacgcccaacagcggcggcataataggccagccgtgtagacggaggcaccaatcggcggcgacggaggcaggccggcggtgaagtcgttgttgttatcagcaatggcggtggcgaagacaagccggcagagtggactcgcggccgatcgaccggaaagctgagacgcctcgagtccatgaccagcatcaatcgcctcaatagtgccgcgtaattatatgcgaacaacaacaaaaaatagcaagagattaatctgagattaaaaatcaatatgataaataatgataaaaatcagattgagtttccccctgactgatttggatcaagtcagagaagaggagcttgaagaagtggtcgacgggaaggaagtgaaaactcccaaagcgaaaacgaagtcggcgactcatgaaattgattccatcgcgctcgttgataggaaactcgacgcaacccctacctggcgcgccaactatcgaaacatgatttcggcaataataaaagggggtagcgcacgagacctaaaagtggatggatgcagagacaaaggatttagacaggttcaggccctctcaatgagaggtaataccctactcctgtttggggatttgaatccgccgagtgtgtattgatctgacgatcaggttgtgtcatgcccctagagggggctccctgccctccttatataggttggggggcagggttacaagatagaaaccttaaccaatacggtatcggtttcctaaatctactttacaatcttatcaaaccaggactttaggccgttccataatatacagggaaacgtaatacccaagtcatgatctgttacatattccatagatataagttatcccctatgactagtcggataaccatgccgtattttttccaatgttacaattctctattttatatttgtattattgtctaaatcttatatttttcttatttctctgttttctcaatctaatatttaggaaatcacaagtggatgtcttaagaaaagaaactagcggccactagttagcaatatcagcaggctatatacatgccatgtcagatctttggatgagttggaagataaagaagaggagagagaatcagagtgggcgactaaattagcgtcgacagcaggcccacagtacgatgcagggtggaccccacctgcattctctcccaatcaatacatgaaagaaggagatggtgggcccaatatggtaaataaaataaagttcatctctagtacatggctgtggattagagctaatctattgtacacgccgcgagcgaatctcgtgcaaccccatgctaagcctacgtaactagcaataatcctacttcttactgtttttactgattcttaatagtaaaataataataataatatacaaattgatttgaaaattctaaaatataggttgaaagtttttagtttggatttgaaagttttaaatttcaactgaaagatttacatgagttgaaagtttttaaaatggttgaaagtttttagtttggaataggatgtttcaaaatttgagttgagagttttcacatataagttgaaagttttaaatttgaaatagaaagttttaaaatttataagttgaatgttttaataaactagaaaaatgcccgtgcgctgcaatgggtgaatgctattttaatattattattgttattgggtttagttagggtaaaattcactgtgggaattcgcttggattttgtttttagaaaatcatgaggtggaattaggagtccgtcatctcaagttagcatgagagttttttaaaagtaatttcttatacgactcctttgtattttcaaaagcaaacgtgtttaaaatccaacttttatacgactcctgtatttccaaaagcaaaagagcttaaaatctaacttttatacgacttttttttatttccaaaagcaaacaagcttaaaatataactcaaacacggatatgtacttccaaaagcaatcaatcttaaaacctacttaaacacggacgacgtaccaaaataccggcaaaaacatatttaatatttataatagtagagaagagatgagttaaaagtttccaaaattatgataaagtgtaaaatttgaggggaaagttttaaattttgtgttaaaattttttaaatttgagttataaattttaaattaaaaatagaaacgtacacgtgcgccagcaacaagctagcgcatgcgcgaggtagcgatctcgaagaaacttgccgatgacatcatttcgtttgctgtgggcccaaggcgattgtgagccgaaagccaaaagcccaaaaacaaccgtgggcacaaaagccgagcccatataaatatggaaaaagtacaccggaggtccctcatcttgtcactgaattacaaaatcatccctcaacccaaaatccagatatataacatctcttaacttacaaaaccgagtcactttaggtctttaggtgattttgaacccggttttatcttacgtggcaactgagtcagcgtgggacccacatgggttccacatgtcaatgactactttctttcccctctctctacctctttcctctctctcttcttctctacctctcttcctctctctcttcttggcaaccggccatgcgggaggactgaggagcgcggctgacgacgggcggggagaggagcggaggtggagacggatgcggcggggcgccaccggcgatggcctcgccgtcgcctcgctctccgctctgcttgacgagaagcaactccagcgctcgcccaaacccaccctcccgagtacgctgtccggcttgaagttcctcgtcgccgccctgagctctgcgaacatgaagattcagaggttggggacctccaggatcctcccctccggctccgggtagagcgccccggcgacgccgatgactgcgccgcctgctgctcccagggcatattgttgctgctactgctgctgcttggtgatgcggctcatggacgagctcgaccttccgacggtgatgcccggtggcgctgcttatggaagcaaacacgttgtgtagtgccatgatgggactacgcctatttgctggagcggctgcttctgctgcgaggtttgaaatttgattaaaatatgttgtcaaagaaccaagggagaagaaatgccacaagcatttgaataccttgccagcgtccatggtggccttatgttggtgccctcacggtcgcagcagcttcagcctcctcggagccgaaacagtcccccatgggatcagctgggagcgaagctcgatcaaatcgagttgattattgttcgttacctcgctgcgtactgaaacttggcaagtaacacgcgagacgctagttgattctttcttgtcaatcagtagcagctctcgactcagcatcccgccaatgagagccgccgccgccgggttgggagcggtggagggcgcagcacccagggggacgcgtggccgagcgctggagtcgcctcccgtcaagcagagggagagcgaggcgacggcgagggcgaggccgtcgcctcgcccttgccggtggcaccgccgccgcgtccatctccccctccgctcctctccccgcccgtcgtcagccgcgctcctcagtccttccgcgcggccggttgccaagaagagagaggaagagaggtagagagagaaaaggaagtagtcattgacacgtgggtcccacgtgggccccacgctgactcatctgccacgtatgacaaaaccggggcaaaaaccgcctagggacctagagtgaccaggttttataagttaagggatgttatatatctggtttttaggttgagggatgattttataatttggtgataagatgagggacctctggtgtactttttcctataaatattgtgggtgcagacccaaacattaaagcccaaaactaaaagattgacggcccaagaactagcccagagaaaaattatggcccaaggcccacttctcatggccgctcatatctcctcgaccatcatctcccacctctctcatcggagctcctctcctcgcctccaatggcgctgctcttcccaccaccaccccacgcgctctcccccaaaccccccttcccctccactctccgctccacgaggtcactgcgtctccgccgcgccaccgccgccgccgccgccgccggggccggagtctcctcctcttccccctcgacctcctcgccggagaaggccccggcgctggacgtcgccagcgggaagaggggtggtaagaagaggaggtccctgaagccgagcttcgagaagcaggccatccgccgctggtccgcgagggcgccgtcccagcgcgcctccttcccctggcagcagcagcagcagcagcagcagccgggcggaggtgagggtgaggccgcgggcgatcaggaatccggttggagtgggagctccacgctgcagtccatcgtggattacttcgacttcgactacgattcctcggatggtgatggcgatggcgatggcgatggcgtcgtggtcggcggcgaagcggccgaggcccaggaggatgggccgcgtcccgagccgagcttccttctcgggagccggccggtgtcagcgccgtggatgcacggggaagaagagcccatgacgaaccaattggtttctgacgaggaagggttggatggggatggtgcttccgaggataagatgggtttagttgatggagacggagacgaagacgaagatttggggagtgaggaggagacgctaagtgagagctcagacggggaattctccgaggattatgcagcaccggccgcaaattcttcttctatgatggattcggtactggaccatgtttcttcaggtggtgggttttatagaggtactaggcggagtagcgtaaattcaattgttaacacaatgaggaattcgatggaggaaagtagtagaaatgctgcgattgagtgtcccgagaccgaggattttgtccagaagctcggtcctgtgctcctcccatgggagagggagggggatgtcgataggccgagaaagcgcagcaacacggagctggctgagaggactatcccagagcacgagctgcggaggcttagagatgtggcattgaggatgaaggagaggatgagggttggtccaggaggggtcactcagctcattgtggagagcattcatcagaaatggagggtggaagaggtggtcaagctgagatttgaaggacctccaagcctgaacatgaagagaactcatgatatactagaggtgcggttaccttttgctgtctcatgttttgttcattcacaattttttcgtggcgtgaaatctgatagttactttgttatcttgctcttatctatcaggagaggactggaggaattgtaatatggaggtcagggagatcagttgttttatataggggaatgaactacaaccttcgatgtgtgcagtcgtatacacaaactacagaggttaattttgataaaagagttagtagtaatagtgttgaacctatccatgttgaacataaatttcagaagtcaggtgcagatggactgaatcgctcagcatatattgtcaattcctctgaaaaacctacagagacatttgatatcgatagcttcttggatcagttgggaccgcggtataaagattggtctggtcgtggccctattcctgtggatgctgacttgcttcctggtgttgttcctggttacaagacaccatttagactacttccttacatggttaaaagtacccttcggaataaggaaatgacggctctgcgtagacttgcaaggcaaactgctcctcattttgctctaggtatttcagtgaacttatctgagtagcttttcatctaccgcatagtattcaatttgtcaattaatttccttcttttcacacttcatgcgtaccgtgtggtttagggagaaacagggaacaccaaggattagctactgctatcgttaaattgtgggagaaaagttctattgcaaagattgccatcaagaggggggttccaaatacatgcaatgacagaatggcagaagaaatcagggtaaaagatcatgataactattatcagtagtttgcctgtttgcattcctgtctccacagtgttatgtatgtgttgaatcaaataaacatggcattgcttgataagtagctattttgctgccttaattagttcttttgcttaattcacactttttgaatccttgaaatgtcaaatttctgagaaagctgagagtaacaatctgacaaagaacgcttaagaaatccactaatggactttgctttcttctcctctgcacttccatactaatttacctcttcgcctgcttgttcttgtgacgtattgaatgccttcttttcttgattcgatgcatgactgatggttaaccttgaaatatgatcattgtattagtttctcttgcacactgcagcctatgcatgttttgaatctgtgtaacggaacacttgcagaaattaacaggaggagtgcttctatcgaggaacaaggagtacattgtcttctacaggggcaatgatttcataacacctaaagtaaggcaagtcttggtggagaagcaagagcaagcaatcacttggcaggatgaggaagaattggctcggcttaaagcatcagcctcgatcagtgtcaaacccaaagtatttaaaaatcccccagttgctggcactctcgcggaaactagagaggcaaaatctcgatggggagattccattaatgctgagctcaggaaaaaggagaagaatcacatgattcttacaaaacatacctctcttttgaggaacttgaagagaaaattgattttggtatgctcttcaaaatgcatctctagaaacaaaagtttagtattttaatttcattactcatttgtaagtagcattttagctactttttcctccattgcacaaagatatctttgtgattatttgtgtaatatctactcctgtgcaggcaaaaacaaaggtcataaaagcagaaaaggccttggctaaagttcaagaatttctctctccagcagagcttccaactgatttggaaactgttacagatgaggaacgcttcttacttcgcagaattggcctgaaaatgaaggcctttctaatgcttggtacaactggcacttctcacttaacagttgtgatataaaatgcatgtggtgttttatgacttgtctatatgcattaaaattttctcaggaagacgagaagtttttgatggaacagtacagaacatgcacttgcattggaagcatcgagaattagtcaaggttcttgtaaaggggaagagctttccacaagtaaaacatattgcaatatctctggaagctgaaagtggaggagtgctcatttcagttgataagacgacaaaaggatatgcaatcattttgtaccggggtaagaactacaagacgccccaaattttgaagcctcgaaacctattgtcaaggagaaaagcattggcacggtctatagagctccaaaggcgggaggtaattcaagtgcaaaatctgattttctttttccattattttattttttgaactctatgtaagttgtatatgtatttaatcaattacatggtctaaaataatctagggattaaatcatcatatctcaaatctgcgagacaagatctggaagctgaagtctcaacttgtaagtcatttatacacgagttctctatgacagtatgacttatattttcttatagtagtaaacatttcttgatgatgttctcttcctatgtcatgaccatcaggtacgaatgcaagttgctggggaaaaaccagatgcggagttacttcaaacagttgaggctgatttgtctaaagatgacgataaaatagaggtaatcatgcatgaaaaatgctgagttcaaaagcactgctgcaaattacattttgttaatacacacttatagctcgcggtgtttggtggtgttgtgatcaccttcaaatgccggcacatcgctagtggttgacaggtagcttctgttgttgcaggatgaaggagaggaggcctacctgcaaacttacatcagtgaggatgaagaggaacctgaggatgatcagaatgaatatctctgaatcttaactggcgaaacttcggtgagtccgggagaaaagtcagtagtaaagcattgcatgttcatattgtgaaatttctgcagtgttactcaagaggcaggcagttttaagattcatctatggattattgccaacacaaattgacctgcaacagcattagtggcctttgtccattgcgagatcaacgacaaaggatgtagcttgagtgtgtgtggattgtggtgcatggtctgcagttgctgccattcctttttttttttttttttaccttggctacttccatagctccatccatgcctgatgccctgatggccttctacatcctgcagatttgaaaaggtttctgtcaacacacgatcaagttgtctgctgtgcagaagtttgcaaagtggcagtgtataaat

SEQ ID NO: 5629 - DNA, 5909 bp, Oryza sativa
ttggtttatttcaactcctagattcacctcaaatcaagctagagcccaccaaatagtctagctccaaaaaagaaaaatggaacggagcagactagatcgctccacaaaattgtactagcggcgtggagcagcattcccgtagctccacaactccaacttcaactcaatttcagaagtaacccgaaactggaaccaaaattacccgcaaatgcatgtaccgcttcccccacgaagaggagcgcacggtgcgggcgaaaaaagcggtacatcgcactactacaaaattgattttttatggcatcaccttattattttctctagcggttatatgtggaaaccgccagcgaaaatataacaagggatggggggttacaaaccgccagtgaaaataaatcttcactggtggcgagttaaaagagccgctagcaaaaacatagctattttcgctagcggactacttaaatagccgccagcaatttttgctagcaaatgtttaggaacgccgcctgagaaaataaattcaacatataaatacacccacctcagcctccctcctctctctctctctccgcctttctctggaaaacaagaattttcagaatataccaccgattacgcaccgttttcaggataggccactcaattcgcactacttttagaatatgccatttggatgcgaattttcttcgttccgtgacactcccgtccttccaccgtcacttcttaccggcgccagcaattccgtgacggagaaggaggagatgtcacctccggctcaccggccacctcctccgtagacacgcccgttcgccccaccggccattgccggtgagccccaccgtcgacggcggcggcttgtagccgagaggatctggtcgccgaggtcctacacgcgccgttccccgcacgcgcatctggagctcgctggcatgggggaggaggagcttgccgttgcatgaagaagctcgctggtgtgggggagggggagcttgccggtgtgtgggaggaggagctcgccggtgtgtgggagggggagctcgccggtgtgggggaggaggagctcgccggcgtgggtgggggagttcaccgctgtgggggaggaggagcttgcccgcgtggggaacaggagctcgccgatgtgggggaggaggagctcgccagcacgggtacaagagctcgccggcggtgcccagatgagcgcttgaaaatggcgcaagaggaggaactgacgccacgcggcttcgggagacggagtgtcacgaactgaagaaaatttgcgtccaaatgacatgttctgaaagtagtgcgaattgagtggcctatcctgaaaactatgcgtattcggtggcatattctgaaaattctcctctctccctactgctctctctgcggccttcctctaccactgccggctgccgtggcttccatcgccgccgccgcatccgtcctagggaaagcaagggcgagggggatggatccgctgccggcggcacgcggggagcgcggggcagccactgcccgccgcagggtctcgtcgtcacggtcgtcgccgcgggccgctgggaggacggatccgccgccgtcgagccgcggggagcgcggatccagcgctgccgggccgcggggtggatggatccgccaccgttgacgccgggcaacggggtggatggatccgccgccgtcgagccacggagagcgcgggatccaccgccgccagcacacggggagagcggagccaccaccggccgtggggcctcgtcgttggctgcgtcgcggatctcgttgtcaccgtcgggctgtggggagcgcggatccgccgcccgggctgcgagcggtggtgctcggtcgacgacggcgacaacaggtggtagcggcttaaaatttatgtggatttgtgtttggatttctgtgaatttctatggactcgtgcaacgatccgatccggttagtgtgtttggagatgggaacggaaatttgtgtgattgtgaatggaaatttgtgactgtaaattggtgatgtaaatttatgtggatttgtggatcgatgagtggatttgggattaatttgaactggcgttgacggaggcggacggagcggtgttgctccgtcattttttttagcctcggcaagtattaacattggcagctggtatagtctaccgcctgtgaaaattcattttcactggtggctagcttacaaaaacagctagagaaaatggattggtgctggcggttggctaccgccagcgaaaacactgtattatcactggcctttactcactggcggtggcgttggccgtcagcaaaaactcattttggccgccagcaaaaatagtttttctagtagtgtcggcagcacagcggctgtagtgcaggttccttcccctctctttccctcttctttctcttctcccctcatgtctcttccctctcctgtccatgagattttgaccaccggtggctcttgctacagacaagggtgacggtggaggcgtgaggaagcaagcccccatccctccccccctcccccaagccccaaacggtgtcccctcctcaaacacctagaaatcccccaattttttctttcaaaggtgcatgatttctgtgggatggatttatttttcggggtacattgaatcacagcaggtgttttgttctctatttctctttcaaggtgagatgataatgtctgtaggtgggttgggttgtatgcttgatttattacaagttgtttccacggttctatgacattatttcagattgatgcatatacttgtatttaaggaaaacatgatgtatccaaggatgtattttgtgatgacctagtcgttcgtattacaggataatgtattttgtggtcctgctacccgttattatttctaaacatttttattattacatatatgtcatgcaacaactaaaattttatcaattttactttaatagaaaaaatacccatgtgttgcaacgggtaaaaatattttttcagtgatacaacaactattaagaattgagcaataaattgcatgcctctctttgacttagcccacaagtgaagccacaggcccagctcgcacatacggtgcgtagctcgcacatatggcatcttcaacctacgagagacaatcacgtgcccgtatgccagagccgatcctccctatcaaattgggctgaatctttctcgatattccaaaattggctgagggtgtttgatccgctcgatccctttttatattttttttctcaaaatcggagtaaatccataacactcgggataaaaatggttaggggaagtcaccggtcggccatcattggcgaattgagattaaatctgaataatttaaagtccaattgaaagggaaaacgcgaggaaaataatgaaagataagtgtggaatcgattttttaattaattgaaggagaaaacatacggtgatacaaaccgacgggacagcgggacggaaaaaataatacggcggtaaaaaaacaacgaaaaaatggcgatgagaaaaaccggaggaaggctgatcgggaaaccagcgacaaaaaaataatacgagacagaaaaaaaaacaaaagttttatgtattttttaattagttatatatagatatgaattataaaaaaccaactaaaaatcgactcagaaacggatgacgtacgaagatcctgataaaaatattttcaatttttataatagtagagattaaattttaaccttccatacttatagcgttcaaatcattaataacaataacaactattaatcctacatcaaataaatagaaaaataacaagggtagcattttccatcaccctgggctagccaaacacttttagggctcctttggcagcccgggatcccaccgggatcccagcccattccctgggagaaaggcccgcgggggaaattgtcacgggttttattccatgtccatttggaagcccacgaggcagggatttcccggcccaatccgctaggaaaccctagggaaaggtccccgacctccggaggtcaggaatttttcctctctcgatccgccgctgcttctcgctcgcgcaaccggagtcgcttctctctcgcgcgaacaacagcgggcgccgccgcgcctccttctccggcgagacggccaccgccgggactcctcctccggcgagaagggtaagcccttctccttattcccctcctctcctcctcctgggtttccattctcctcctcctctagggtttccgcctcctctagttagctcccaatctcgctctccggtctcagcgcttgcatcgcaggcaccgacgcgtgggcgcggcgggtggcaccacggcagccggtgcaacgacgacgaagcggcgagccgacagcgcgggcacacggctccaagcaggcggggacaggggggatccaaggcagcgcgactcaccagcagaggaggcgctgaggcgcagatccgcctcctcctcctcgctgcgcgacgcccgccggtggttgcccggctaggtttgtgcgtgcccttgtagctgctgcttgattcttgggggttcgttcagtacttcagttttcttggtgtatgtatggcatgtttcttgatttggtttgggagagttataatctgttctcctattctttctaatacattgtagtattgtaccctgcagtagcatttcattttgttatggaagcgattcagaaggggatatgggtgggcgtgtggtgctcttgttttagatcatgaatgagttttggtaagatgatgttctaatttgatggagtaggttgtgctctggttttttctgcagtgtaattatcatgcttagtgcagtctaaatatgtgagatcaatgtgccagtcccaagaaatgaggaattatcacacatgcagtgaggatcattcaactagtgaggtatatgagaaattttagtctgcaaaccagtaacagtttttttctagttaattagagatgcagttcttttagttagatgctgtcagctctgttaacctagaggtagatctcagtactggttgagctgctagcatcaagttttttgttttttctggaggtattttttagtctgatccattcttgtagtctctgtcagggaactgtagaattagtggtcaatttagcatgcatgttgggactaaataaatggtaacaatcatatttttgataggaactcatacttactacaaaataaagtcttttatgctctatacttatacattagtccaaactttagtttcatgtcatgtatcaccagcagaaaatgagcaaggtggcattgtgcattcaaaaaacacaagctttggcagcaacctatatacaaagacacgcacacacagatgtttcaatctcctctctctcactcgctgcacaatacactggccaaacaaagtgacctagtagtactgattaattaaaacaacaactactactactactttttttccttatcatgtccataatgataattcataattgtgctcttgcattcttcctcttgccaggattcaatttgaattgcatgctcaacttactttcaaatatggacttgaaatagagtattgttggaaaactatcaatacaaaaacatggacttcaaatgcgtttgatttaaaaataatggtgtgtatctgcatgtagggtgtttgataccaagagtttgtttacgctgatgtagctgacaattgcaatatgttggttgatgtgcatgcatttttttacctaagctagtatcaatggccgtccttcaaatttgattgctgaagtatcactattttatatttattacttaaatttcagattatctttttcatcctggcagatttattagaatatatgaagatttgttgaagagatgatgaagaagatagaagagataaagatttaaatggacccatgtctcattcttgat

SEQ ID NO: 5630 - DNA, 2217 bp, Oryza sativa
gtgggccccacccccgcggaggagaggggagaggggaggaaaaggagcacgtgggggtggggtttggcgcacgttgggtttgatttgtagggggtgggggtcgctgacgggtggggtccggtggtggcatgtgggggagggggtgtcctttctggcagtggcaggtattccgtgctggtagttgtgacttgtgaccagtagagtgaggtcgtactcgagttgaccgactgggaacctcctcttgccgacctcaatggtttttacagcaacagaaattttagaaaatcttacttccttcccctcataatataaataattttgtatttttttctttttgttttattaaaaaaaattgtgcaaatataaaaaacgaaaaattatgcttaaagtattttggataacaaagtaagtcacaaataaaataaataataattctaaaatttttttgaataagacgaatggttaaacagtgtaagaaaaagtcaatatcccttatgttatggggcggagggagtattatttgaagtcaaagttatacacaaccacgagtattacaacgcgtgacatataaacacggtttttcatggtctatgcgattcataaaattatgcatttattaaaatcttgaaagtagtgaagaggtaaactatcaacattagccaataacataataaattaaaaattttaaatacactcttatgttttagattttaaagtacaaacaaaggtgggattctgtgaaactttacaatcatggtattactatctaggattatatcctacaagccataacacttgtggttttctacagttttgacataaaacattaggttttctaaagcttactatatgattttttagagatgtatcggtgaaaagttggtttcaatctatcaaaaattagaatcctcttgctcttcttcttggtttctactggtggggttgagcactgccaactctcagtcgagagagatcccgcacgaaaggaggggataacgatggggtggtctacccttttttattttagggagtattatctcctgtataaaaagtacatcttttaatacttaaatcctcgataggggtttccaaaacaagatttacaatagagtttttggttggtgtgttttaaaggcattctcaatgtatgatgcttatatcacctttaagttgggcctctcgtaggtagttgctctgtccataaaaacaagttctaatgtttattaccagttgtcgacggggataaccgtagaccggatatagagggtattggggtacgctggtacgaggatctacgtaatacgacatcaagcaggcagaaaacaaagattatactggttcaggccccttgataggtaatagccctaatccagttgatatgggattatatgatgtaagccacagattacaaagggaaaagcggaactcgatgatatcgacgagatcgtagtcgagttgattcgactagatcacccggcgacttggctcctgtaggctccggcttcgtaggctgtggtggttgtcttggctatgagattcaatgccttaggtcctcccggggggtcccttttatatcgcaagtcgactggtctccaagtaggactcggagacatcggacccggcacggtacaatgatgacccagttctgtctaagtatgactccttccatccgtgaactccatgatgaattcctttaacgtatgccaaaaacgtccgtatacgcgtgtcacgcccggaatttctatccaaaattccaaacgcttacatgtgtgtgaaccctcgtccaggaatcagccgaggcacacaataacaaattgataatagagtacaaatattactctaattaataagcgaataaaatgtcattacagaggtagatagttcctctcaatcaataaagatctaagcagcggaaaataaataaacggcgcagacggctccactccacaggcagcttgaccaaggctacacctattcctccactccatcagcctcattgtagaactcttcctctgatgaatgattgcaaggtgagtatatgacatactcagcaagccacgcagcaaatatgcaagtgcacaagataacaaaggatggcataatagggtttcatttgcaaaagcagcatttagcaaacatttgagaatttaataaaacagttaagtaattaaacaatattaatccaacgctatacaacataccctgttgtataggccc

SEQ ID NO: 5631 - DNA, 3626 bp, Oryza sativa
aggcggttatttggttctaagggtcatgtccgtctgcgaaaaaaagacccctatatttagaaaaatgctttttctagtagtgacttttcctctcgttgaaatcatcataggcgggagaggttcattagatcgatggatatattgtagctcaaaacgttattagcctcgatatatatctcgcatatcttagcattgacactactagaaaaaagaattttccaggcagcccaaaaccattttcgcagtcgggggagaggaccgccgctaccatatcgactgtgaaaatggaccattttcgcaagcgggcgcatggcccgcctgcgaaaatcatctcaggaaaataaaaaaaaaacacggggcgccgccggccagggctcccctccgtccgctgccgtcggcgccatcatcgtcgtcgtcgcggcggcggagggggcgaggagatgaagcggccagcggaggcggcgaggagagaagccggcggcgcgcgtcgtcgctcgtcgtggccagcagcagagggatgcggcagcgcgcggacgtcgtcgtggagggagccggcggcgcggacgtggcagatgagggagccggcggcgtgcggatctggagcggagggagccgttggcggcatcgcggtcatcgtcgtcgtcgaggagggaggtcgccggcggcgaggagggatgaggcggctcgcggacgtcatcgtggagggcgccggcggcgcggacgtgggagaggagggagctggcggcgcgcggatctagagtggagggagccatcggcggcgtcgcgggcgtcgtcgtcgtcgaggaggggggccgccggcggcgaggagggatgcggcggctcgcggacgtcgtcgtggagggcgccggcggcgcggacgtgggagacgagggagccgacggcgcgcggatctagagcggagggagccgtcagcggcgtcgaggaggggggccgccgacgccgccggcggcgaggagggatgcggcggcgcgtggacgtcgtcgtggagggcgctggcggcgcggacgtgggagaggagggagccggcggcgcgtggatctggagcggagggagccgtcggcggtgttgcggtcgtcgtcgtcgaggagggaggccgccggcggcgaggagggatgcggcggctcgcgggagtgggagaggagggagcagggcaacttttccaagtgtggggggagagagagaggagggggagggaaatgagtggtggagaggagaggataaagatggtggtggagaggataaggatgaggatgactagatttttttttggtaggtactatttttgcagacggaccacgtaaggtgcgcctacgaaaatctattttcgcaggcgtcgcttaagtggtccgcctgcgaaaacaggcggacagcgaacttcatgccgatttatattttttttaggcggtcatttggttcccagaatcatgtccgactacgaaaataaaacccccacgtcggggaaaatgccttttcttgtagtgtgatacccgttcaacacaaaacatatcaacattgtttcacaacaggtgtatatttgcgacatctctacctccacctctataactcctcatctctagagccattagcaaattaaacattgtatacacacgttctccaattatgggctcatggcagcatgccaccaatcaaagataaatgttgacaaatagctacgtggtttagaccggtacttagtatcaatactaatatatttaatacatctctacctactgaaatattggtaccaaaatatgccaaaaaattggtactactatagattatttggtaggataaagaaccaaacaaccccataatatttatatcttagaatggaggaaatataaaatattcttggtgaggttatatatttcatgattatctataaagttaaagactatatagatacactccctcgaaacacatgattaaaaaaagagaggaataaaaaagaatacataatgttaacaggaatgtaagtacaaaataaaagattataaaatatagaaataatcttttaaatatatagaccatagaaaaaacatggaaattggatgagagatatatagagtcaaaattttccaatcggttcaagctcttcctaacatgtctccgtaatctttataagtgtgtccatttcataagaattttaaagtaaagaatatgattcaaccctttatttcaaatactatagtaggatttttttttataagattaaaattatttttcttacaaatgaaagtgggcaaggatctcatactagctagtagttaagaagaacggagggcgcacatgttttttctgataataagggaaacacacgtccggcctctaaatcaaatatgcatgtattttttaccacaatttattacaagattacatcatcagttggtagattcctgtttttaagaataaacaactcattactcaataaaatccatagtaaatcaaccacgaggtcatgttactgaatctcaatccatagtaaatttttacgaggacggaggaccatttcaatggtgcgcaactaaaacgctggccgctgatataaaataatcgaatcctggccactggctgcacgtctttcgtggcgattggcgaacatatatatgtacagttctacttctacactccatctaattgaaaccaccggcagggagaagtcacttgatcaggtcaattaactgaatattagtactactagctggaattaatgttgactgcaaagtgattcgtccgaggatgagccagagcgacagccatccaccatccatgcatccatgatccatccatcgcttggtagtagttggtagtactttttttagaactagtagtagttgcctagttggtactccctccattctaaaatgaataaatgtagttttgcatgattcacatttaacgtttaagcgttcgtcttatttaaatttttttttatgattagtatttttattgctattagatgataaaacatgaatagtactttatgtgcgactaaatatttttatttttttcacaaatttttcaaataagatagacggtcaaacgttggacacggatatccacggctgcacttattttaggacggaggaagtacatggtagtactatcttcttcttcattgactctttttagtgagcatactcaccttttgtgatgtagatatttttttagtaataaactttattctaatatttgcttaaaatgcaattattacatatagaggttgcagtgtaaacaacaatgaaatataaaatcatggcttgattaaaaataagaagtctactttaaaataccacctaaagacagagatacacatggctaaactttcaaacaccggtggagaaacgatttttactcccggtttgcaacccccttagtcccggttttccaaccgggactacgaatccgggactaaagatcgctatctttagtcccggaaatcgatctttggtcccggttagtaacaccaaccgggattaaagatggagccatttttaaccccggttggtattactaaccggagtaaaaatgaagccagatccggttagtattttcttttttcttttattgttttttactttgaatattgatttccccacatcccc

SEQ ID NO: 5632 - DNA, 9173 bp, Oryza sativa
cttacattgtgaaacggatggagtatcttgtttgtcactttatcatgctataaacagaaaacaagaaaccattacaagcagtcttaattcttaaaccctcaatctccaaaatggaactgaaaacctcctgtttaaataatgaaaccgagcagaaagatgaatattccttgctcattagtcattattaaaagggcacctactcctcaatttctattctttgttatccatataaaacttatctgtaacaaacccgagaacgacaagggctgatgcatcgtcacgtacacaaattgggctctacaaatttcttggctccgtcaccgtgtccgtatcattagaaatcttacataaatactcgctccattttaaaaatatattacatcattgatttttttataacatatgattgttcatcttactaaaagaattatataaatattatttattttgttgtgacttgttttatcataaaataaaatataatcttaacttatacttgtacatatttataataaatttttgaataacacgaatgatacgaaaagtcaacgatgtacgagggaggtcctagtatgtgtgtgtatcattcttttaaaaaaaaactcactcatgtctgagagacgctcaatgattatgatcatccggatatatgatcgaaccttccgattactgcttgtttaggatatcatcatggactcgtcggatcaaacctcccctgaacaaattcggccggccggcggctaatgccggtcaaaaaattattatttcttcttaccactattcgactcgccgccggcaatcaccgtcatttttttttggttcttgcgacgtcagccattagctacttgggccttcgcaagttcataccgatccagatatatggctgcgtttagttcccttcgaacttccaaaaattccaccacatcaaatattttgacatatatatgaagcattaactgtggacgaaaaaaaattaattactcagtttgcatgtaaattgcgagacgaatcttttgagcctaattacgtcatgatttgacaatatggtgctacagtaaacatttgctaatgacagattaattaggcttaatagattcatctcacagtttattttgttattagtctacgtttaatatttcaaatgtgtgtacgtatatttaatttttatttttgaaaagtaactaaacaaggctataaataaacccacccctcgcggcttcgcttttaatttgctcgggttcttttcgcggctaaataatttgttcaaaccttttcgatcacgcgcgcgcgaatctcaaagcggcggaggcggaggcggtgatggcggcggcggcggcggagttccgcgggcaggcgcggctgccgcggttcgcggcgccgcggcggtacgagctccggctccggccggacctcgccgcctgcgtgttctccggcgaggcgtccgtggccgtcgacgtctccgcgcccacccgcttcctcgtcctcaacgccgccgacctcgccgtcgaccgcgcctccatccgcttccaggtaagtagaccgacctgaccttctcctcctcctcctcgctcgccgtcgatcgatcgatctcgccgtggttggttgcagggcttggcgccggcggaggtgtcggtgttcgaggaggacgagatcctggtgctggagttcgccggggagctgccgctcggcgagggcgtgctcgccatgaggttcaacggcacgctcaacgatcagatgaggggattctacagaaggtaaactttgcatttgaaaaaaaattcgtggtgatcgtagcctcgcagaggctaaatttgcgctttaatctcttgggaattctatattttcaaagataaattggtctaaacccctcaaggagatgtgccctcgtttgttcaaacttcatccaaatagttgttataaattctaaatttgttttgacaatgttcataccttatatatgaactaatcaagtcaaaactaagttcacatagtactagccaaatacctgtgctttgccacgaatcaaaacaaaccaatagtgaggtttttgggacaattttgtacctatagatgatatattgtacagatgaattatgatagaatcatatatttagagggattatcttataacattaaaatacatggttggtacaaaacatgatgacgtaggtagtaaataaaaaaaatactatacttggtaaggtggttgccttttttgagtataaattgctactattcgtatgtgacttgtttttttcgtttctcaacgtgtagatcgaatttgaatatgatttttggcggagtattagatgttactctatatttgctaatttgttttgcaaattttcacaaccacttgcattgaatttgagagaaaaaagttatgttaggggacatcccctcgagaactcatgatcatcgttacaaatttgaactgatcatcagttgattgatgtggttgggaagttcttatgaacctgtggactaggatttaccctctccagcaatgaatagttgtcgctggatattattcgcatccaaagtttgaccgctcacattttagcaacaaatttataaatattttcgaaatatactatattatgaaagctcgatgcatgctaaataagttcatacccttttttcatcaaaacattgaaatttaaaaattaaattattatggtcaaagttgaaacagcagcggtcaacagtgacacttaaatggaaacggagagagtattttgatgatttctgggtacgactcatgtgaccttttcatatgagaaactgccattttattgcagtaaatatgaatacaagggggagacaaaaaacatggcagtgacacagtttgagtccgtggatgctcgacggtgcttcccttgctgggatgagccttctttcaaggttaattaattattacggtagcaaaacctgttcaccaatcagaattttctcatccagaggtttgatgcactatgtgttagaacatcgccggatctatctctctaatgtttcccctcttcatatttaaaatttcaggcgaagttcaagttaacacttgaagttccatctgagctggtagctttgtcgaacatgcctatagttaatgagaaaattgctggtcctatcaagactgtcgagtatgaggaatcacccgttatgtcaacttatttagtggcaatagttgttggtttgtttgattatatagaaggtgtaacatcggaaggtacgtaccagtaatccagcatacttcatagtttctcacattgaagtagttctgtaggtgccattcttttccttttactttccattgttttttttattgtttttaattgtattcaggcaacaaagttcgtgtgtacactcaagttggtaagagtaatcaagggaagtttgcattagatgttggagtgaagtcattgaatctctataaagagtatgcgcgcgacctatcatttcttctaaattggtttctaaagaaaaaaaatgattcatgttaatatatatcctatttacccaaggttgttgcttgaaagagtcattgaccaaaatttcattctttgaatgctgtagattctttgataccccttatccactacctaagttggatatggttgctatccccgattttacaaatggagccatggagaactatggattggtcacttaccgggaaatatatttgctttttgatgagcagtcttcatcagcatccaccaaacagaatgtatatatcataacactgagaatattcagctacatgtttttttttcattatttacagttcagttcttaaacagtgatgcattacttatagttcagttcttaaacagttctcaaacataatgtatatatcataacactgagaatatattgtcactatgatccaccaattctataaagaaatttacattacagtttttaagaatgatttcatattgagatattttccttgggtgatcaagtagtttatatgtaaatctctgtccacatctgttctgtttaggtagcaattactgtcgcgcatgaattggctcatcaatggttcggcaatcttgtaaccatggaatggtggactcacttgtggctaaacgagggttttgctacatgggtaatcaattatacaacactgatttttagaaatttgatatcaaaatactaccaactgagtgcttggaccttttgtttgaacagatgagctatttggcagtagattcctttttccctgagtggaatatctggacccaatttcttgacagtaccacctctgctctaaaattggactctctagctgagtctcatcctattgaggtaataactgtttgatacatgccatggtctagtgcagtcgttcaaaaaattgatgcatttcatacggtgttcaccattttttttttctaaaaccataaatactacgcactttatcctgtataaaacagagagcgtattttgaactgcaaatttgacgatggtaagtaacggtgatgcataattttggttacattcttatcacatccgttggttgattcctcactgaatctggacaatgaatacgcgatatttaaattgatgatttaatctttttagtctcaaatgttaatttggatgtcaaattcacacgatgcaccacaccagcacaattacaaagcatcagctggtggcatcaaacattttcacttgtctaaatgctggttagcgattttcctcactatgtgttactgttttctacaggtcgaaatacaccatgccagtgagatagactcgatttttgattccataagctatgacaagggtgcttctgttattcgtatgctgcaaagttaccttggtgcagagcgttttcaggttttatacttgtcattcttttattcactctgggtatcatttgcataactttacggcttattcgaagttagaagtgtgtgaaattacctcgaaccatttccttccttccttgctgttggagggagaaatgacacttcattttattcccctatttagttattttatgaacaaacagttgtgtctcttgacttgctactcttccactctatcgcaatctcccatggcttcactagcgcaatcaaccagctcctttacccgtacatccccatctcatccttgactaaaactacactacacgttgtcatgtccctaatctccttggtatgcgctgttaccatgatcctgggcccatgactgccctatgtggagataagatgggaatttcctgaaaaactgagtagaagtgcattgggagaagcaaagaagggggaaaagttgggaatgataacaataagagaggtagtttcatgagggtaaataaaggacacactcaacttctatgagcaaatacattattatccctttgagtgtaaggtgtcaatatccttgggccctattaattggtagagtacttttacaatgttctctaatggttgtagtctactacaagtgttatcatcttagaaataatcttaactgttgacatttatgagttctactaccagtagaaaaaaatattctactaccattagttgatgtggtagtataaatggatatgatccattgaattagaaaaaaaaataaatggtccagattagttctattactagtagagagcattgttaaaacacctcaatttgtatccaattttcagcataatgatcttttttagtagtcatgatcaaacatcacaacataaaccaccacgtacaagtgagagagaatggagggataaatttttaccacatcgtaaacctagcaaatcgcacactcaataattaaaggttcaattagctagttacatacttatttaaggccaactcttgcctcttttgtccactactctacttttcttcaactaatgtatggctccgtcatcttgtactaaacttgtggaactgttgctctttcagaaagcattagcttcatatataaaaaaatatgcctactcgaatgctaaaaccgaggacctgtgggctgttcttgaagaggtatctggtgaacctgttaagaatttgatgactacatggacgaagaaacaaggttatcctgttattggtgtgaagcttaaagggcatgacgtggaacttgaacaggtaatgaattatcgaaaagaatatgatcattcaatggattacattcatttacatgcaaaccacccaatacgtaaattcattatgcacatatagtttgctctgcctttatatttttgttagtgtggttaggtagtcagaattccatacttaaaatcctctgcttattatttatgacaaaaccccatgttgaaaatttttgacaactttatctgggtttaatatttgttacctgctagttaagaagatataataagctggttggaaaattttcctagtcctcaaagagggcatgctgcacaagatccgcaatgtagcagttcttataatcttatctgaagttttgggaatttttctctagaagcttcactacttttttcatttctctaactctgctatatacatgtacatatgagtagtatatgggcctcatgggccaacacatacataactcaacactccccctcaagatgggcgatagatatctatcatgcccatcttgttacacgatgaagtacactccccaacacttaaagcttttgttaaacagtcagctacttgttcccccgacataacaaaacctagcttcaaaatcccttcatctagtttttccttgataaaaaaacgatctatctccacatgttttgttcgatcatgctgaactggattgttagcgatgctaatagccgacttattgtcacaccacaacttcatgggaatattcattagcaactttaactcagaaagaagatttctcaaccataacagctcacttaaactcactgacattgccctgtattctgcctcagcagttgagcgagacactaccggttgtttcttgctcctccaagagaccaaattgccaccaacaaatacgcagtaaccagaggttgacctcctatcatcaaggctgctagcccagtccgcatcacagtagccctccacacctagatgtccatttttcttgaaccataagccttttcctgggctcccttttaaatatctcaggattctatatactgcgtccatgtgaccacttcgagggtcatgcatgtatcgactaacaacagtcacagcataagttatgtcaggtctggtatgacacaaatatatcagtcgtcccacaagtctttgatatctttctttattcactggatctcctaattcagcacataacttatgattttgctcaattggtgtagaggcaggtcggcaaccgagcatacctgtgtcacaaagtagatccaatacatactttcgttgtgaaagaactatccctctaggagatcttgcaatctcaatgcccaaaaaatatttgagctgaccaagatctttgacttcaaattctttgcttatattctcttttaactgagctatttcttgagtgtcatctcctgtaataattatgtcatccacatatacagccaggatggcaatcttctttccacggtgacgataaaacaatgtatggtctccattgcactgtttgtagcccatgccacacattgcacgtctaaatctatcaaaccaagcccttggtgactgcttaaggccatacaaggatttcttcaatctcaatacctttcctttagtttgagaggtggaaaaacccggtggaatctccatataaacttcctcttgaagatctccatgcaaaaatgcattcttaacatctagttggtatagtggccaatcaaagttagctgcacatgatatcaaggttctcactgtgctcatctttgcaacaggtgcaaaggtttcatcataatcgattccatatgtttgactgtacccttttgccacaagccttgccttgtacctttctactttcccaagtggatcttgttttacagcatacacccacttgcaactaaccaccttcttacctgttggaaaaggtacaagctcccaggtcttgttcttctcaagtgctgacatctcctccatcattgcctcatgccactttggatcattcttcgcttctctccaatcctttgggatcactatggattgtaatgatgcaataaaagccctataggcaggagataaagatgaatatgacacataattagctatgtcattcccattttcctcctcaacctcctcaaagccatatcttatagggggctttcctgccgtgcttcttatccctttcctattagcaataggcaagttagattcctctcctgatatttcactctcctctccccctgtctcggtattctcttgtataggatctgactgataagaagattgatcatttatttcatcaatgactagaggttgttgatgttgttccaccatctcattcctatcaattgttagaggttgttgttctacctgttgtgtctccaaggaccttggctttctccttgtgtaaacctgtagattttcttcttcatgtggtttcctccaattctgctcatgtgggagtttgcccatagggcatgggattgacccaataacaaccttcgtcctctttgattcatccccttcttccattcctagtgattcattcaccccttcatacctaacttcactcatgattggattgtcaagatcagaaaacaaataactcaaatctgtcatttctccatagaaaggaatagactctctaaaggtgacatccatacttacaaatgtttgcctctcagatggactccaacatttgtatcctttctgaccagatgagtaacctataaatatgcacttgatagctctgggatccaattttcccacagaaggtctatgatctcgaacaaagcatacgcatccaaacacctttggtggaacaataaattcattacatccaaataccatctcatatggagccttcatcccaagtattcttgatggtgtacgattgataagatatgtagctgtcatgaccgcctcactccagaggaactttggtacattcatagtatacatgagtgaacgtgccacctccaagatatggcgattctttctctcagccaccccattctgcggtggtgtgtcaggacaagaagtttgatgtagtatcccttctatcgaaagaaaactaccaaattcgttgttcacatactctttccc

SEQ ID NO: 5633 - DNA, 2160 bp, Oryza sativa
tccgtggccgcgcccgacacgccacccgcgcagcggccggagacgaaggaggaggaggaggaggacgcgaactacatgagcatggatgaggcgtacgcgctggtgatggcggcgcggcagcggccgccgccgacggaggaggaggtgaggaggtcggaggtggacgccaaggcggaggagctcgtcgccgagttccaggacgacgagcagaggcggcagcgtctcgactccatcttcaactacacgcagatgctcaagcggccatcgccgacggaggagggggcgaggaggtcggaggtggacgcggaggcggaggagctcgtcgccgagctcccggacgagcagaggcggcgccgcctcgactccatcttcaactacacgcagatgctcaagcagcgcgcggcggccggccgccggccgcaaccagcaccggcggcggctcagctttgactcacgtggttcatatggtttaacttcatttgattctttgatcaaatcaggaattcaggattcatttgcaggagaagaattcggatcagatttgagtttgctcttgtgttttgtatatagtatttggtttacatgtgtgcttggcttgtcaagttttgtgcagattacttgcagtgttgttgctgcaggaaaatttccctttttcagttttgggcttgtgtgtatatacggtactgttctgttgtataattttgtacacacattttacatgtgattttggacatatataaattctttgatttatttatgaattcattcatgttttacgtaaattgatcaatattgtgtagcatcatatatgtattattttacggatggggattctctgttacatcctctggtcactaagactgtgttctctctccggcacacaaaacgatgttcgtattaatacgtaattaattaagaattagctatttttttaaaaaatagatcaatatgattttttaagcaactttcgtatataattttttttaaaaaaatacaccgtttagtagtttgaaaaacgtgcacgcagaaaatgagagtagggagttcggaactcccagcaaagaacgcagcctaagtgaagattgtggtatataggacaccaacgcagtgtccctaatgtaatttttttttgccaattgttgaatatttacagaacaaaacaaaaattcgagaaaaatctacatgttctgtattttctatgtatccaatctaattagttaagaagacattggtattcaaagtttaaaggtttgaccacatgtttacaaactacttcaaacgcattgcctttggtcggcaactaaaaaacaacacggcaaattctcaatacatattatagcatactctacaatttttttttgaatctctatattagtctattggtcaaaccaaaagctagtatttcattgttgcaccaaagcatgtgactaaatgaaattcatatgttcttttttatttgatggcttttaaattcgtactaggcattacggacagggcctcctctaattcaaagcccaacacttgtaatccgctcaagcccaaagggcccccagaagatttgccccctctagttgtctgctctatcgcgggctcggcctttcgtcgaacagctggtgcgcgtcctctcatgtcgagcacctgaccgccggtcacgtagcggcggcggcggcggcggcgcggcaagatgctctcccgcgcccggcgcctccaccccacccttcagcgaatcctccggccagtccccccttccgcccatcctcctcctccttcttccccacctcaccgccccgtcttctcccaaacccctaaacccttcttccccttcctccgccgccacctctcgaccaaaccgccgccgccgcaggcgccgccagagaagtcgctggctccggcgaaggtgagctccgatccacctgccgtcagcgcgaatggcctctgcccgggatgcggcatcgcgatgcagtcctcggacccgtcccttccgggcttcttctccctcccttcgccaaaatcccccgactaccgcgcgcgcctcgcccccgtcaccgccgacgacacccgcatctcggcctccctgaagtccggccacctccgggagggcgaggcggcggcggcggcgtcgtcgtcgtcggcggcggtgggggtgggggtggaggtgga

SEQ ID NO: 5634 - DNA, 9797 bp, Oryza sativa
ctgcgcctctccggggtgcacctagtcagcgcggcgcgcgggtggggcgtgctcgacttgctcgaccacgttcgccagctcgctgggtcgcgtggcaatgtgtgggcagtgggtgcgaggaatgttggcaagtatacactgctcaatgccattgcccggtgctccgggattgaaggcggaccgaccttgacggaggcgccggtgccaggaacgacccttgatgtgatccaggttgatggcgttcttggatcgcaggcgaagctgttcgacacaccgggcttgcttcatggtcaccagctgacatcgaggctgactcgcgaggagcagaagctggttcgagtgagcaaggagatgcggcccaggacatacagattaaaggtgatatatatttgcacatcacccactcaaccccagtcgtgtttgtgataatgcgcaattgacatagttgctgctcattttctaaatttcagcacaaatttcttgttaacgagtctagattttctgtagttctctgcaacagaattgaagatactttgcttaagctaaacttttgttcccgcattgaaagtagttcggtaaatcaattattgaggaaatgctgtggaattgaaacaagcgaacagacattgcatttacaatgttcttgtgacatactagtcacatagggaaaactattatcaactccatcaagttccacaaattgttgtgaacaattctagcttgttctagtcctttataacaaaattgaatctgcttttggttaaaagctattatcgattcgaccaagttccacaaattgttgctttccccctaaagacagtgcagtaattttgtaactgaacctgacaagcacatgatactggattggacagaaaatttgcaccttttgcacttatgaaattctaagtcttaaacttgtgacagtttcagttcttagacttatgactgggaatcatggctgactcaatctagatgtgatcctttggtttccaaacactcttctattgccacaggattcttcactcttattatgtgtcatatgagatgatgcatgcttatctaaaacttgttggtaacctatgcagccagggcagtctgtacatattggagggctggtgcgcctggacatcgaagagttaactgtaggatcagtttatgtaacggtatgggcatcaccacttgtcccacttcacatggggaagacggaaaatgctgccgctatggtaaaagaccactttggtttgcaactacaggtatatttattacctgaatgaactttattttctcctaattcatgtagtattgcttaagattataacacaaagttctacatggtgtctttcctgcagcctcctattggccaacaacgggtaaacgaactaggtaaatgggtgaggaagcagttcaaagtttctgggaacagttgggatgtgaattccaaggatattgcaattgctggtcttggctggtttggaataggtctgaaaggagaagcggtattaggactatggacatatgatggtgtcgatgtcgtctccagaaactcccttgtccatgagagggcaacaatatttgaggaagccgggttcacagtttcgaagattgtctctcaggcggatagcatggcaaataggctaaagaaccctaagaaaataaacaagaagaaggataacaaagccaattcatctccctccacagatccagaatcttcaaatccagttgaggctgtagatgcttaaatgatttctattcctttctaggacaggagttcccgaaggtgaattaagttctatgatgttggcatttggtcagttgaggattgatatacagagccataggttgcacaatttatacttgttcagacttagatagcatgctgctctccgcacaagtctttttttttttccctgggatcatggattttatgtagtcttgttgtgggcttgtaacattaacctatggcttttatgtactcaatgaacttctaccactatggctttggagtttggaccataagtacaattttgatagtcaacttgatgaggagtcagtactgaagaatactcgttgtaatgctgttatggctgaacttctgaaaccggcatctcacagctttgttatgcctgctttgaacacaggaattttacattgattttataggaataccacaggaatcaattgaatcctcatggtaaattcctgcacttcaaaggaggccatatctgaccatctcctaagttatttctgcttgaaatgaacatgagcctccagaccgaaactttaaccttaccctgtttggatgtatgaagtaatcaatcactctgctctgcatgctgaagctaatattagactttatgatgtattgcacaaaagtaagtaaagatgatctcaaatgccagatttgtttggcacataaagatggtgtactcttttcaacccaaatcatgggatgccatctttgacataaagtacaacctttatggattaatttaacgaaagcatctatatgaccacttcatattaataaggtcggttgttaatggtgtgcttaaccagaattgggaaagaggaagcattttggtctaaatgtgttttgtttgctcatgcattttggtctatcagtgccaaaccatgtattactccatataactacctctatctacttcaatcgaaggccaaatccgactacctacaataaaatgtttactaacccctgaactttgataatggtacaaataattccatgatggttttaaagcaatttcgccaagctaactgcacgtgtgacttcacaatcaggcaagttaaagtggcacccaataagacatggttagaagagaaatgtagatgagctaaatatataacttattacaagagaagaaaaaatatatatttccattgatatatgctaactctaaatcaagagtagtacaatcatcattagacaatattgctgttgccccactacacgctgcatgcattgcactatatataccaaagtaccaaacaaaaccaattaccaagaaaatcaaaatcagaattgaacaagttgtgcataccgaatctagtttaagttattcaggttgtcaggaacattcaattacacataaaacaattcaattcatgttaaaaaaaaagcactactccctccatcctaaaatatgtgctccttctaacattcaaaagctaaattatgaggtgagaaaaatgaccctggatgtcacttattaaatccctagattattggaagtggaagggtcgttgggataagacggggagaaatttgaatagtgattgatgtgataaataatacaaagagcattctttccgaacaaattttgaatccgaaaggagcaattattttgggatggagaataattgaattaatagtaaatttcactttgaactatctttaataacaaagtttctccatgaattaaggttgctatttgttactgtttggacctgtctgtgtccaaaatgtcaccagactaccacaatagtaatgatttagcccaacaaatttgagacaattagtggccgtccattattgcgctaaaagtttgcttgccaataaatggaagttgtcacttccagtaaaaatatactccaatagaagttgcatcgactgtgtcattaagccgacaaagcagcctctgggtggaggtggatgctactcctacaaagatggatatgtggcacccccttttgttggtctttggaaggaggaacaagttcatgtctcactagctaactagctagaatgagttccaattattgatcatgcatattgtaatgtggtcacaacctatagcttagactctaccaactaaatgcaccatgcttgagcgtggccaaatatatttctcaccagtcaccccagagggccagagacccaaacgtgtgatcggaatgtctttaagttaaacttttaaaacttttaagtaccaatatatttttaagtacaaatttgtattaatttatctcaaaagatagatttcataatgtttattaggttttgcaaatgaattgcaatagaagctagccgcaaacgctaattagcgactagtcccactctctttccaatttttttctctttttattgaatttttcttttcttttgggctccccctaaatttatggctcaatccgagatagctgatttcttgtgtatgattttttttctatacaaagtttcaacaccagtagaaagtttctatatgctagtacaaagtttccatattgtattgaacacggcctgtttgcctttttcatgtgctgttcaattttttctagatgcttatgtatatatacaaactctgtatattatgcgtacaaactttttatgtctaaaatgtatacgtgtacacaaactttgtatattatgcgtgcaaactttttaggtttaaaatgtgtatgtacacgtataattttatttgatattatataaaaataccccccccccaaaaaaaaaaaccaagcacggggagaccataatggggtgcacatgaaaatctttttttacgtccatgagtaacatgcatggcgtggagaacaattaattccattgaagaagtgtatcgatttttcacttttgctataaagtagtatatgataaaatccttatttatcatgaaagttgacttcttattcttaacatgaatcatgttttggaaaataaaaaattgcgtgaaaaattctacaatgacaaataaggaacaaaatatattgagaagcgcagcatgatggtaccctgcaattaattaatgatgcaaaatttcatctcatagtcgtagtacgttctagtattaaaagataataaagatgaattttacatgattgtatataccttgccctattgaacaaatatttttcccacaataaaaaagagagataatttaaatatactttttttgtgtatttgaagcacgggagtaccaatctttttggaacttaattgtatatactccatccgttccattttaagtgcaaccataaattttcgtgcctaactttgatcgtccgtcttatttaaaatttttttataattagtatttttattgttatgagatgataaaacatgaatagtactttactcgtgacttatgtttttaaatttttcaaaaacttttgaaataagacggatagtaacgcgaaaaaatcatagttgcacttgaaatgggacggagggagtatattagaagtgctctcccatgccgtggtgctagctagaggtagatctctctttatcacacctacctagcttagctgccttttatgtcttctctgccctgtcattttactgtcaataatcgaaatcgaaaccaatcacactcgcgaccgaccgacgccctagcctagccactgcacgctgtttccaaaaagaacggatgaactttttgatagatcatatcgatcgatcattaattggtccatcttttacgatctcgattgattgattgattattgatgatctggttcgttgccagatgatcattcatgcattatgcacgtacgtacattggcggagccagaaattttctaagcctagggcttgagtaaggctcaactaataagatattggctttctcaaaaacaatacaaggtgatttaaaaggatttaggcatgtttatggaggcaagcctagggcacacctctgcgtacgtatgttctgaagttgaagacaacttatgtatgcaaatatttaatttatgtattcttaattcttgcgatgtttcatttgtcacttcttaaaaatacattttcacatgcgcatggctataaagccattatttctaccggcgtttaattaccaacccgctgatggctccgctattttctttgagggaaccgtctatggaaataaaattttcccatttcaaaatatcatatttcacgtaaaaaaaaaaaactcctaacaccccatatgggttattatatgcccacgcagttgcaagccacgagtcatgcttcctgtagtcttcaacaattgaacccacgacctcaagtctagcatgattctatattaccatcgctctcatactcacaaatgaatatcaaaacgaatatttggacccaaaataatttgaaataaaaaaaattcaacttcaaagttgtagtcttatccagggctataatttttatataaagtttgtccagccttacatttttagatgcggtttcttaagataactgtatgcaaaaaaaacattttttcatgtgattttagaccacaagactacttgtcattatcacaagagaatttttctattattcacttttagaaatgaaaccagcttctttggaaaaatcgttttctaatagtgtttgcaaataccaatgcaaacacatgtatacatcatgctctttattaaagcagcagatcgacttggacatccattaattaattatctatatatctattatgcatgctctattaattccttattgactaagttttcgatcgcagcacacgtagatgaaccagttgacaagcaataggaagggaagggagattcgattttaggcgtgtgaagcttcggaatgagggaatctagctcgagcaattgtttatatgcacgcataagtgtataaatgtaacttaaatatatacttttttgtgccaaaagtaattgttggttttgtcttcggattaccaagatttgatcaacaattttgttataaataaatttaccatcgaagttgtttcacaattagatttatataatcaaaagtaatttacaaatatctaacaatcaaactaattccctttgatgttagcacttatataaaaatatgaagtttatcttctttcagtcaaactgagagggagtatcaactagctgaggaccaattactgatgtttgatgccaaactcatgactaagtgatgccgagatgtcaatgtcccttgatttgatctgcctgcatacacactactggtacagcttttgagagtgccaaagctccccaaaaatgatttttgaagctgactggtagtagcaactactcgcgccgtgcatgaatatgctctagggattagaagaaatagaattttgtggtgctaggcttattctattttactactttataattaattgtaacctcaattttttgtgtggctggcatgatcttcgaaattcacaagcatcacactaatatgtttttcttttcttaaataatttctgattgtcgaaacatgatttcggcaataataaaagggggtagcgcaaccaatgataatgacaaagacgctcatcagcatttgcatagtaggtcaaccgtcaaggtgaaataataagtcggcgaaaacataatcatccattagcaacagcggagatgtcagggccgatgaagcagaggtgctggtgacgatgtcagtgacaataatccatcaaattaatgttatggctattgtagatgcttcacttggaggagagttgatgttgttgtctaactcgtccaaaccgaaatatttgaagttgttgaagtagaatgtctgctccgaatcaaagatgaagataatgactcctggagttgactcgttggttgatgaattgatttcttcagcttgacataaaatttgtcaaattttgagccttgtatttgtgtagcccccgactctttgattagttgggaaacaactgaacatagagtcgagaactgtagcttcttgtcgtcgaatagtcattgcttgattgaagatatgtgttgaagatgtccaagtagaaatccggtggtgaagacgcgcagttgtgaagataaaagcaccagtcggcggcggcataaccagtcggcgacggaagacgatgatgtccatcagtagtggtagctgtataaccagacgtagaggtaagggcactagtcagcagcagacgagacgaccggcgatgaagatgtaggtgcccaacaacagcggcataataggccagccgtgtaggcggtgacaccagtcggcggcggatgaggcggccggtcggtgaagacgcagacgcccatcaacggtggcataataggccagccgtgcaggcggaagcaccagtcggcggcggacgaggcggccggtcggtgaagacgtagacgcccaacaacggcggcataaaggccagccgtgcaggcggaaacaccagtcggcagcggcgaaggcaagccggtcggtgaagacgtagacgcccaacaacggcggcataaaggccagccgtgcaggcggaaacaccagtcggcggcggcgaaggcaagccggtcggtgaagacgtagacgcccaacaacggcggcataaaggccagccgtgcaggcggaagcaccagtcggcggcggacgaggcggccggtcggtgaagacgtagatgcccaacaacagcggcataaaggccagccgtgcaggcgaaaacaccagtcggcggcggatgaggcaagccggtcggtgatgttctgactgatccattcctggagcgtaagagataagcttaaagccatgaatcccttttatgcatatctggatctggatcctgcagaacaaacatataggatgagtagtatctgatataaatataatactcgagaaaaaatcaagtattttaaaatatttataaatatgtatttctcctcttgtcaattttgatttccccgagcagatgactctgtacgtttaaacactctgcccgactagtcataaccaccaagcatcgggagtcggcctaggcacttcccaaacatgcatatgagtgacatgagttcgtcattaatggaacaaagtttcacggatcagaatttactactcaggtacttttgcaattattaagagcagaaaataaatttatctcatctctatgcttttgatttattccgaataatacttagcaccttgcgttactcggtccatccaacgagcccccgggtgctaggaatcggcccaaaggcaaccatccattggcaaaccaaacggaaagcataggaagatagaactccataactcgataggtacttttgtactcagattatgtcgcaagcaatcaagataaatattataaaaaatatgatataacatctgtagcccccgactcactactcaatggaagaccaattggtgtagtgaggcagaggaaaaggaaaaatatcatataaagaataaaataaatgatgacttagctttgtaatattccccttggtgatggcagaagtggccaatgtgggaacaaagtcgtccatcaataacaatgaagacaccagtcggcggcgacgaaggcggtcgacggtgaaagcgaagatgcccactaatggcggcataataggtcagccgtgtaagcggaaacaccagtcgacggcaacgaaggtgagccaacggtgaggacgtagacatccaacaacggcggcataataggccagccgtgtaggcggaggcaccactcggcggcgacggaggcaggccggcggtgaagtcgtagacgcccaacagcggcggcataataggctagccgtgtaggcagaaacaccagtcggcggcggcgaaggccagccggtcggcgaagacgtggacgcccatgaacggtggtgtgaccaaccaaccgtataggcgaggacaccagtcggcggcgacggaggcaggccggcggtgaagtcgtagacgcccaacagcggcggcataataggccagccgtgtaggcggaggcaccactcggcggcgacggaggcaggccggcggtgaagtcgtagacgcccaacagcggcggcataatagaccagccgtgtaggcggaggcaccactcggcggcgacggaggcaggccggcggtgaagtcg

SEQ ID NO: 5635 - DNA, 7405 bp, Oryza sativa
gaagaagcggaaggcggaggcggcgcggctggaggagacggacagggcgctgtacggggcgttccggggcgcggccaactcgctgtcccagctctacacgctcgccatgggcggccagaagctctccttccaggccggcgagcgccacgccatggtacggccctccccgaccctcccgtcttcccttcttcctgtgatgggttgtgggtgtttgggggttcggtctgatgtgatgtgatgtggtgtgggcgtgttgttctggggatgtttggggatttctcggttttgcagcgggaggattcggtttccccggtgaatttggcctttctgtggtgtttgtgttgtggggaaaggcttgtttttcggctcgatttgatgagggatttttgttccgatgcgccttcttgttagtgaaattcagattccctaagaaatttgtgtgttcgattgacccctctagtgatgtggaaattttctgaaattttggtgaaattttgattatgctttctgaaatttaggtgaaattttgattcctgtatgttttctgcctgaatctggtacctaccatgcacatataaatttcgaatagtgggtaaagaccaactaattctgtatgcaattttagttcgtagtgcgtcccttgacctcaccgaatattatattcttcgtgatgcgatgcgccaatacaattgatagcttcacaagtgctctcgcactagtagtgcgattctcgtagttgttatatcatcagttgccttttaacggcgatgcagccaaactcatttgcttcaattgtcggtgatctttttctccaataggttctgtgccaatatggctttttccacctctgggttgaaatggttgtagacatcccacccttgtgctttacaagactcaggattaggttgctctcagagggggaggggaatggaaagcagatgagaggaggcttagcttgtggaacaggttacttctgcactagtactatggatgcatccttttcagctttgcttcaacttgtgtactgttaaatgtaaagtatcgccagttggtgtgggatgcttctttcagacttggatggcattgttagcttatgcagttgcggtttacgaggatgttgatacttagttatgtttgctgattttggttttgctgtggctctgtggatccagtcctggcctattctggtgctgtttgacttcgtcaagcatcaaaactgtctgttttcgtttcctcttaaagacttaatgtgatgtgcaagacttttgcatgttcttgcaaaagctttggacggcatatcttggtattaatgcttggaaacatcctgaagctatggtttgatcagaactcaagatgtggctcagctgtgttcctggtctttgttttcacaggacagggaaacactctagctaactaccattgagcattgtctgctttactcatcagatgacaatattactagactctcatcaaacaatacactagccaatgcattggatattggcattgtttgtacatcacagagtaatgctttgtgttggcatttagagaggtttatgttttctagtagcccaatgcaatgtcaactaggatcaaagaagttcctgctcatttgacatatgccttacaaacagagttagcatatagaacagttacttcaatggattcttgaattttgtactttgaagacagatggtcgttgcagggtgtacacatttagttctttgcaaagctttctgtttcattgttaagtatcccaaataaaagatgggttccatccctacttctagagaaactccaaccttcttaatggctggagaactgttcatgccaaactgtcttgttttcctccacaaaatgagttttttgttcttccatgtggacaattcttgctgtttaaagccaggagcctattttctgggttctatacaaacattcattaatcacatagttttctgactctgttgcttgtggtgaagtactggacgattccctccggtcatggaaacatgttgttttggacatggacatgatctacaagatacagttttggtcactaatttctattgtgaaatatttggaaaccccaaaaaagattactatgcttgttttttgagacaagacaatccacagatatgattttcatgcggccaatctaaaaatttaaaaatataccttgtgcaaagtttataaagtttgagttgaaagttgaagcacttcacatgttatcgtgactggagggagtattggctgccatcgagagtaatgacggttgggtcacgcatacctaaaacctagacatattttgtacagaaaaacacatttctcttctttttcaacatttttttctttgactactcgacatctgtttcattgttttgtatttccccctttcactagtgtttctcaatctttttctaactgatgcaggaaaagctctatgaatggatcttgaggcagcatgaaaatggcttgaggctgacagttgctgatatagcctcgcacatccaggtttgcagttatcatcctccaagaactatttaattatcctctaaatttataacatggccttgaagaacttgtttagattttcctttcatgctcattgtttttttttgtgaatacacctgactgcaaaaccctaatgaactagataaaactccttatttgccatttaatgctaactcaatggaaacgcggcattcccttactgccactagttcactattgcctttcattatttgccacgtccgtcaactctgttaggatgaaacaccattaaccgtggatccaccttttttttttttggaaatattccatttgtaccctcacaaaatgggtgccatctttttcttctggccatacccacagcacctaagtccatccgttgccatctagaattctagatggacctgaactggtgccactgtttgttggcagaagctttggctagtcagcctctgtggctccaccaaatgctcagcaccatgatctggcttgagaatccggtgagcttgcatttgtacgctgctgttcttttggggaatggatgcagggatagatatggcttggaaatccggtgagcttggatcggtgtcgtatgattgaccatgtttttcaggttatatgggaatagcaattttatgctacaagacatggtttgattgggcattaggtgagtataatacttctagtgccactccccagcaagcttgaatcctctagacctagtgccatgctagacacaagtattaagtgtctggtcttattgttttggaatgggactataggattgtgcagattgttattttttttgttgcatagcatgacttcattttcttataagtttgtaaaatttgcgaaagtacttcctggatttggtggataccaccaatgtggcggcacatctcttacatgccaccaaggatgaccatgctagatgcccatgaatctgcctcattggaatggatgcaggcattaggcacacaacccatattcactagccattgctggtaaggatgcctacctttggtagagggtgagtgctctgtcatgtgttcaggaagaacgaagccgctgggttggatgagtttactgttctgttgctggcattttttttaaatttaccatggataaggaagagaaggagaaacgaggaattaggaagaatgaggaagggcaaattatcttttcttgtttagtttaacagcaagatgacagaaggggcaaatgggaagacaaaatgaactagttgcaaataagggaacatcatttttttatcctgtaagggataaggtttatatttgatggcaaataaggaaatgaataagatgaatcctatgctttgattgttttctttgccaattcatgcctccaggctccagctacaacttttcaaaatatagtttgtacttatgccgtatcttctccttaagcaccatcctagacctagcacaactacatgtgcctaataatcatctgtgtttgtagcacgagatccagtatggaggtgacaatgcatcagcctctccaagatcacagcatgcaagccaaagcactcaagctacagtgcctattcccaacacaatgagccagcagccatcaccaaacttatttgcgctaggaaatacaggattggtgcagtccaagaactcagcggtcttttcaaatgcactatctagccccgttcgccggagcctgcaaccattccacctggagcagggtggcgatgcggggtacttcgcaaacggcgttaaccgcgatcaaaactcgacggcttcgaacgattcatccatggacatgcattcagacagcccagctcatgactcttactgagttgtttgccccctctgtggagctggaagagcaacacttccagtggaacagaatgtgtgcctttgctaccacagctcatgtaggactattcaatttaacccccctcccctagcctccaatgatgctaagcttgtattctgttgctgccaatcaccagttactagtaccgattacattgctaagatattgtaacttgcatgtatttatgtccagagtaaaactgtactcggtttacctgtgcatactactacagttggtatgtggtgaaaatgtaggtggcaaagcaaaattgagaagaataaacagtattgtactgttgttccctctcctagactcctacgctaaccatttctgaagttgttatcaagctgtcgttttgttctgtcattcttatagatatactaacgttgactatttgttttatttgaaaaaatagtgtaaatataaaaaagataaatcacacttaaagtacttttgaagtgtacttttgttgataaagaaagtcacgaacaaaataaataataattttaatttttttaataagacgaatgatcaaatattataaataaaaaattaaagtgacaagtaatatgttataaataaaaacttaaagtgacaagtaatataggatggaggcagtatattttaaatttattcccaagaccaaaaacagtgcgagtgtgatcacatcatcacatgtctgctgtgtatgctgctgctccacagtaatttttggtgcgtatacggtcataaaagcgttggcataaaagcgttgaattgagctatagtattctcttttggcttgatgtgaagtgtttttttttgtttacgtgattagcgggattgtgtactgatgtttgaattttttttttcctgtaaaattttaaaactttgataaacaatatgtttcaacacaccttgagctagcatttttatatttgatatctatcttaaagagtattttcatgaacatactatttaattatttattctaagaaataattagtcaagccttacttcaaaaacacagaaagttatgtcagtaattctttttgactgttgggagtggctcatggctcctgcttgcgtactttgggcagtttaggggcactgtatcagtgcattactgaatcagactggttcaactgttctcttctttattttttggattggctagttcaactgttcttgataggccttggggtaggcagggcagtttatactccttcagaaatgagtcaggactctggatgttaaatcccacttcaccagtacagtacatttcagctgaaataggccctcaaaaaatcaaaatgcagagaaacagaggattcagactttcagattcacagccgccattacttctgactgctgattcttcagtccatatcaccaacagtgtgcatctgtataccgtgggtaggtggtgtgaaattaagcactagtagacaacaagtccataccctggatagacaaggatatttggaatgcaggattttcacataaaaatcaacagtaaactttattttatccaagtagtatactaaaccgaagaaaatcctcacatcataatggcaagtcttaggagggttgtagagggcacacatcactataaacaactattaaagggattatcacactcatattcagtgttctttgaagtagaaattttacaggatttcacaggttttagtatgttcccctaaaatctttaaaattttccattccaagaattgagtcaagaatactttagactatgacatgattaatttatagcaacaactcctacccctacattctagtgcatcttgtgtgcactattatataggagatatttaaccatttgccacatttagatgtgacaattaactttttgtcattggacccatatgtcatagacatatgtggacccacatgtcattgagataggggtggcaaatagttatttgccaaaactaaccgtggcaaatagttaaaagccccattatatagggtatctttaaatcatttcggaatgaagcgacataggaagcatgtttatacattcataccaactcctaccacttctaccgcatccaaagcaggtttcccttaccttctgatgagcggccgtaagttgattcccatggtaaaatgtaaaggattgaacaaaaatttaccaaaaaaatttttttttggtagtagggacgtagggttaccatttagaaagccttattgttctcgtatccctgtgataaacctatttaccatggtagctgaaatcgtgacccgaaactcaacctttcgaatatagaatatgcctatcgattacagccacgctaatgatttattttgggacggcgctaataatttattttgggatgaatagaataacacgtaacatggcctaacgcatatgggtattgccctggaaaaaaccctgcgcgtctacagcgacttgctacttgaaaattttcagttgctaggctatctggcagggcctcattgaagacagggagtgtttgaggagaaggggattgaggagattgggaagatacgcaaaacgaggtgagccattagctcatgattaattgagtattaactattttaaattttaaaaatggattaatatgattttttaaagcaactttcctatagaaattttttgcaaaaaaacgcaccgtttagtagtttgaaaagcgtgcgcgcggaaaacgagagccaatctcccctatcacccctaaacgaacgatgcctaagtgtcttggcatgtatagtagtaactgtgttggctgttgtagaacactgaagataacgctggaaggcgtcaatgaatgctggccggccattgctgcgtttgccatgatcatcatcaatggtgatatggcatcgacatgcatggtcagaattgagtgttcatgccgacagcgatgcactgctccctctgtcgctgagagttgcactttgctctggtagatattttttgaccgattgtcgacggctttttataacttatcgtaaaaacggcttaaaaactacttcatatatattggccatattcgacagctattgctactgcagctgtggctgc

SEQ ID NO: 5636 - DNA, 21413 bp, Oryza sativa
cactaatcttatagctatctggtaagttttttttttccaaatgttagctagtcagtccttataaaaatttcgctcaatttgaacgaaattgtgaagtctatagctctggagcctagatagaattcaaagtaaatttcaataaccttacttcctgacattaggactgcaatacgtcaatatatagatttgaaaacttttccatacaccactaaatctaagtcatctctaacataaacccaccactactcactactagaaaaccaattttcccaggcggccaaaactaattttcgcaggcgggagggaggtccgcctgcaccacagcgactgcgaaaatcatcgattttcacagtcggggcaacggcccgcctgcgaaaatgcaaaaaaaaaaacgaacaaaaaaaatcgccgcacgcggctcaccgccgccaccctcccccggccggatctgagaggggaggggaggggagccgccgccgccgtcgtcaccgccaccgccgccgtcgtcgtcgccgccgccgctccacgccatcgttgctgccggcggcctcccccctctctccttcggccagatctgcgagggagggagggaggggagacgccgccggccgccccgcgcgcatcgtagccgccgtcgcccccaccggctttcccccttcctcctccggccagatgtaggagggagggggcgaggggagccgccgccgtcgcccccgctggcctccccctccctcctccggccagatctgtgaggaagggagggaggggagacgccgccggccgcgctgccacgccgccacagtagccgtccatgccgcgccgccgtccccgccgcgccgccgcccccgcagcgctgccatccccgccgcgcctccgttcccgccacgccgctggagaggagaggagaggagagtcagtgagggagaggagactgagtcagtgagggagagggagagagagagagagttgagtggtgggaggggtgggaggagaagataagggtgggttttttttttggtaggcacgatttttacaggcaggacccctaaggttcgcctggaaaaatagattttcgcaggcgccgctttagtggtctgcctgcgattaggcgtacagcatacttcactccgatttatatttttgtaggcggttatttggttctaagggtcatgtccgtctgcgaaaaaaagacccctatatttagaaaaatgctttttctagtagtgacttttcctctcgttgaaatcatcataggcgggagaggttcattagatcgatggatatattgtagctcaaaacgttattagcctcgatatatatctcgcatatcttagcattgacactactagaaaaaagaattttccaggcagcccaaaaccattttcgcagtcgggggagaggaccgccgctaccatatcgactgtgaaaatggaccattttcgcaagcgggcgcatggcccgcctgcgaaaatcatctcaggaaaataaaaaaaaaacacggggcgccgccggccagggctcccctccgtccgctgccgtcggcgccatcatcgtcgtcgtcgcggcggcggagggggcgaggagatgaagcggccagcggaggcggcgaggagagaagccggcggcgcgcgtcgtcgctcgtcgtggccagcagcagagggatgcggcagcgcgcggacgtcgtcgtggagggagccggcggcgcggacgtggcagatgagggagccggcggcgtgcggatctggagcggagggagccgttggcggcatcgcggtcatcgtcgtcgtcgaggagggaggccgccggcggcgaggagggatgcggcggctcgcgggagtgagagaggagggagcagggcaacttttccaagtgtggggggagagagagaggagggggagggaaatgagtggtggagaggagaggataaagatggtggtggagaggataaggatgaggatgactagatttttttttggtaggtactatttttgcagacggaccacgtaaggtgcgcctacgaaaatctattttcgcaggcgtcgcttaagtggtccgcctgcgaaaacaggcggacagcgaacttcatgccgatttatattttttttaggcggtcatttggttcccagaatcatgtccgactacgaaaataaaacccccacgtcggggaaaatgccttttcttgtagtgtgatacccgttcaacacaaaacatatcaacattgtttcacaacaggtgtatatttgcgacatctctacctccacctctataactcctcatctctagagccattagcaaattaaacattgtatacacacgttctccaattatgggctcatggcagcatgccaccaatcaaagataaatgttgacaaatagctacgtggtttagaccggtacttagtatcaatactaatatatttaatacatctctacctactgaaatattggtaccaaaatatgccaaaaaattggtactactatagattatttggtaggataaagaaccaaacaaccccataatatttatatcttagaatggaggaaatataaaatattcttggtgaggttatatatttcatgattatctataaagttaaagactatatagatacactccctcgaaacacatgattaaaaaaagagaggaataaaaaagaatacataatgttaacaggaatgtaagtacaaaataaaagattataaaatatagaaataatcttttaaatatatagaccatagaaaaaacatggaaattggatgagagatatatagagtcaaaattttccaatcggttcaagctcttcctaacatgtctccgtaatctttataagtgtgtccatttcataagaattttaaagtaaagaatatgattcaaccctttatttcaaatactatagtaggatttttttttataagattaaaattatttttcttacaaatgaaagtgggcaaggatctcatactagctagtagttaagaagaacggagggcgcacatgttttttctgataataagggaaacacacgtccggcctctaaatcaaatatgcatgtattttttaccacaatttattacaagattacatcatcagttggtagattcctgtttttaagaataaacaactcattactcaataaaatccatagtaaatcaaccacgaggtcatgttactgaatctcaatccatagtaaatttttacgaggacggaggaccatttcaatggtgcgcaactaaaacgctggccgctgatataaaataatcgaatcctggccactggctgcacgtctttcgtggcgattggcgaacatatatatgtacagttctacttctacactccatctaattgaaaccaccggcagggagaagtcacttgatcaggtcaattaactgaatattagtactactagctggaattaatgttgactgcaaagtgattcgtccgaggatgagccagagcgacagccatccaccatccatgcatccatgatccatccatcgcttggtagtagttggtagtactttttttagaactagtagtagttgcctagttggtactccctccattctaaaatgaataaatgtagttttgcatgattcacatttaacgtttaagcgttcgtcttatttaaatttttttttatgattagtatttttattgctattagatgataaaacatgaatagtactttatgtgcgactaaatatttttatttttttcacaaatttttcaaataagatagacggtcaaacgttggacacggatatccacggctgcacttattttaggacggaggaagtacatggtagtactatcttcttcttcattgactctttttagtgagcatactcaccttttgtgatgtagatatttttttagtaataaactttattctaatatttgcttaaaatgcaattattacatatagaggttgcagtgtaaacaacaatgaaatataaaatcatggcttgattaaaaataagaagtctactttaaaataccacctaaagacagagatacacatggctaaactttcaaacaccggtggagaaacgatttttactcccggtttgcaacccccttagtcccggttttccaaccgggactacgaatccgggactaaagatcgctatctttagtcccggaaatcgatctttggtcccggttagtaacaccaaccgggattaaagatggagccatttttaaccccggttggtattactaaccggagtaaaaatgaagccagatccggttagtattttcttttttcttttattgttttttactttgaatattgatttcaccacatccccaaatcatccccaaaatcacggaacaaaatatcatctccaaatcccaaatcgatcatctacaaatccaccatatccaaatacatcacaaatattcaaaacaaatacattacaaattctaaaaagaaacatcacaaatacatcacatatttacatcgcacagatcaaatacatcacaaattctcaaaagcaaattcatcacaactccatgggaaaaaaacaaatccactggtcgcttcaccgctgtcacctggccgccaccctccgccaggccgcacggccgcagcgcacgcgccgcagcccagccgctgccgcggctgcatccgccgctcgccacgcgcgaccgccgcctgcgccgccgcagctgcatccgccgcccgccgccgccgcggcgcttctgccgcccgccgttgcctgcgccgccacaactgcatctgccgcgcgcgaccgcgcctatgtcggggagggatctgccgtggccgcaggggagggggaggagaggggaaggggaggaagggggaagaagagaagaaggagatgagaagatgagaagggagaagaagattggagaagataagggagaggaggagagatgagaggatgagaggataaggctgttggtcctctcgaggaggcgcggtgcgatttttttttcgtttttcttttgtctcggttgttataagcaaccgggattaaaaatagatctttagtcccggttggtcatagaggggtctgacacagcctgccttctttcgaaccgggactaccaaccgggactaaagatcaaaaagtgacgtcagctttttcaaccgggactaaagatcatcggttcttattcaaaccgagattattgtagattttggacaaccgaccaaagctggtttctctaccattgaaatgtgattggtaagagtataaccgtttgtttctccccagcggcttataagatgcatttagtttttgtctaccttaaaatagaatacataatctctgtaatcaacggttgatcattgtgctgattggatttcactcacattcgataaccaacgttgaaccaaaaataaaaaaaaaacgtcggaaagtaaatgagttgtaaattaatcattcagccaaatctcgccaccatcatagccatcaaatccagtttgacgagagcattgctaccaaggacaccacgtcatcagagaacccccaatgcgactcctccaagaaggtcacaacatataagatgtcgttgtcactatttccaacttccaaaactaggttttaacccagagattctaaaactagattcctagactaggataaacggtctacattcgctgtcaggtaaatttagacagtgtatcctaattatacaaatctagacagtttatcttactataaatttagtcagtctatctaaatttgtagtagtctaatctaaggccctatttgattcagcttaggattattataatctggattattagtagtaagctaaaacaaacaagtagattattataatctataagctagattagtataatccaataaactcctctataggagctttttctagattattgagtggctaaagacccactacccttatatgcctctaataatccagagaaacaaacaactcgcagcttattctgtcagcttattataatccagcttatagtaatctgatttaataatctagttacaataatcttaactgaaacaaacagggcctaagactagttatatttccagacacagcagtaggtggttagaagatttgttggagggattgtatcacctaaaagtctctaattttggacttgagaggatgttacgggaaccttggtgatgctaatcggtactcctatccttaaaaaaacaatttttgactatgtatctagatatagccaacgtctagatacttaattacataggtaaaagttgtcttttttttagacggaggatatagacttgtagattgtagactagtctggtttaatgttggtcgatcacattacatttcaatccaaataacacaataaccatccattaaatacatatagttaaaattttaacttgcaattaatagctaaaattcgattgttttggacgggaagtagtagacagtacaagctgagtggttggttaatttgttttccttgttggcgtctttcgccgtcgttatcgatcgatatcgacggatcgatccgggagaagtgacatcgatttttttcaggtttgaatcatatcgatcgcatcgcttgactggctgctactagcagagagagacgagacgagatagagctaagcttacaacttccccggtcaacgtagccggcgcaaccgcgcgcgctccagtccaagcctagccctacttatgcgcgccaccgcccgcgcacgcacgcactcgccgaggagaattggaggaggagaccacctcgccggagagagggggaaaccaccgtgtgcttaggtcgccggcggcgtgcgtgcgtgcgtgagtgagtgagtgagaagtgagagagaagaagaaggggccgggcttttgatttcgttctccatggctcgagccgccactgcggcggcgctgctgctcctgccgctcgtcgtcgtcgtcgtcgctgccgcggcggcggcggcggcggaggagatgaggtacggcggcggggaacgcgggcggaggctggggcggcactgcggcggcggcggcggtggcggcgggggcgcttccacgcaggtaagtgactgggtttataactctactattgtaggcgtatatacgtggaaatgtcaatggcgaatagatttaagtggtgttgcgttgccaacttatctcgtaagtatctttacggcatggtcacaggaacatatatttccttgtgcataaatatttttaaaatcttgattcaaatccggactctatatttaaactggatgtacacgtgcataaatatttttaaaattttgattaatatccagactctatgtttaaactggatgtacaccgtccatacttactatacatatatactctctcctttcatattataagtcgtttaatttgatttttttttctacttcaaacttatttaatgtgactaaatttatagaaaaattatagtaataacattttcaatacaaacaaatatattatcaaaatatatttaatgctatatttaattaaactaatttggtgttgtaaatggtgctattttttctataaatttagttaaacccaaaaaattataactaagaaaaaatcaaataacttataatattaaagagagaggaagtatatccgatgatcaaattggataaaggataatataatactaacaagtatatatattctcaaaaatactacaatactaatccttaatttaccagcaggttctgtaaatatctccgaatagaaaattacgtttaccaaagtgacattcaaaaccttttttagaaattaagttcaattctatatatgctatatcactgcatattatcgaaagagggcgtcctagaaattgagtaatatagtataaggacattcgtaatagttaggatccctttgaatcgcagaaataaaaaaacgaagaaatagaaaaaacacaggattctaacaggaattaaaatgtaaaacaaatgattgcaaaatatagaaaaacacacataaataaccgtttaaaccgtaggaaaaactcaaaaatcggatgagggagatagacccaaagcaaaatttccaagagctttgagctcttgctaaatttcctccaaaatctctataggattgtctattccataggagtttcaaatgattggataggattcatttctttgattcaaaagtatttatagaaattttttatatagtagaattgaaatcctctaaaatactgctatgttttttctctaaatcaaagcatgttagaatacgttctggattgtctactgtaggttgggagtactaacatatttggcattgactaattaatgctcgtggaatcacgggctaggttagttgtgtcgtattcacggtcatacccagatctgtgtagactggtggttgtagcgtgcgcatgcaagggtggatcactgcatgttactgtatgttagctgcgccatgaatgctatccgcagtgaccagtagtagggcaccagctgttgaggttcaggtctcctgcttctgctgctttcatgcagcctttggaccgtcaacatgctgggctgtacgttcagtaaagtagggccattaatctttgaggcccacttccattcaccctgggccgggccgggccgggtgatacctattccatgagagttttttttttcctcttgtgcttctcatcgtcttcttgttaacttattatcagccacaaccaaattttgaagtcctttcatcgtggtatatttttatgttagatttacatattatttatttatttatttattttatttgttgttgtatggtttatgcgctataaggaaaatgattagagcagcatgattctttccccgcatggaagcttctttgggatcagcttaaagaacaagcatattgcaacctttttaagttgtgtttactagggcttaaatttagacctctagctacgaattgaacgtatatcaactagttaaatttcttgtggtgaaaataatccacccgggttcaagtcctaaacttgacataggtgctcgcatttacgactaattattattatggtcagtggcagatatgccatgcagctatggggtcttgaatccccactcactactaaatttttttgacatatatctattagaagagtggactatagttttgtatagtttgttcagccctcctgttagttctttctagatccgtctctgattctatttaattattcttttaatggtaggtgacgtacccatcgatacgttgcttaaatcggtaagagaggacagacaatttaatcatagtctcgtcaacagaattattatacacgcgtgaccaacttaagtatgatggaaaatgcctaagagcaagttaaaaggagtgcacggggagggaagatcgctaattcactagggcaggatgggcttgttaggacaagagcaatgcgtcacattatttgttctgcctggggatgtcacattggatggaacttgtaccaagcaacttaacccacagtgcaagctaattgaaatggctccaccaacatcactttttcatctttcacctatctctctctctcctctttacctttcccatccatcccctcccaacagattcctctccatcttcgggcaaccccatcggcgcctgcctccctcccctacccgcctcagtgttcaatggcggtggcggtggcgaacggcatcccacgggctcggcgcccgacggcggcggcagacttggccacgtctcctcttgcgtgcccccgccacctcgtccgcgtcttcctcggcgcgagcagcgatgtcgcccgcggcggatcgagggcggcgcgaggcgcgagcgccgggacggcccgagcggcggcgacggcggtggcggatcgagggcggcccggcggagcggcggggtggcgagatccaacccccctctcctcttcctaagcggcagcggcggggcggctaggtgccttctcgttcacctcctcctcgtcgcctctcgtccggtcctctctctctcccctcatctcgccgtcttcggtggagctcggcacggcggatgacggcggcggcgtcgagcggccgcggcacctttgagtggcgtggcagaagacgaaaacggcgtcaagcggcgcagcggatctcacggccgcggcactgtggatgacggcggggcgcaggcacagagccacggacaacggcggcggcagcggcgctcctactcctctccctctccggcgagcttcttcggcgtggaagtggcttctccggcgagcttcttccctctctctcctgctctgtgtgtggcatgctttttctctgacaaatttagttgaggttctcggagccaaaacaagccacacgaacctagtttttacatgggtcccacctccttctctcctccacacggacattgtgcatagttggatagactttgccacatgtcatgtgtgtgcattgtgaacacccttacggctgcacaaaacacatgtttttttttcttttttttaaaaaagatcagcaccgactgcacgtctgttacggagtgcgatagattgtgctatcaactgacgatgagtcgcccactttattttcctttagttctttctccacatatatagaaattagaatgacatagcatattttatagtccactaagttagtctactgcacccactctgctctaattccaatttcgtctgctgttcaaagtgcagtggattcgtaatgtgacaaccgacaacaaagcttcttcatcctgattaatcccctgaatcaactctaattaacaagcttattcgcccatagtagaatagtgcgtgacgcttatcgataggaatttgtcatatatgttggagctgcatataattgctcgatcaaggcatctttaaaaaaactcattaatgataataggatacgataataactgaaacgcccttttgcattattgcgcttgtcggtgccgttgccattcccatttttcataaagtggcaccattcattatgaagctgatttgaattaataaaaattatgctttcaatcgaattatcattacttcatcatgtgatcctttttcgattatatttctctcaaacatcagcgacaataattggatatgctcccatgtgttaaaatagaaaaaaaaaatgaaccaacgcagtgcacatgctcatttgtttatgatccattcacagacatgcgcatgagagcagctcaagaacaaacaaaatatgcgctacagaatttggatatcattttataatatcctgatcaccctgggccccgtgtttaagctgttcaaggcacgtgctgcgtttcagtatgaaaatcgaaaatattgggtgattaatgtagagtgacagtgtgacacaccttcactttgagggagcaattatgttccacgtggcccataaaagatgacatcgatcttatattaagaacagcaaataaaaatatctcggcaaaatatttcaaaaagaaacaacggcaaaatagaaaagcactagctccctctcatcataaatatttgacgcgactgatgtagtttgatcgctcgttttatttaaaaattatatgcaaatatgaaaaatatataagtcacacttaaaatatcattgataacaaaacaaatgatgacaaaataaatagcatttacacgattattttaataagatgactggtccaactttattggtaaagttaattgtgtcaaaataattatgagatggagggagtattatgcatcaaaatttatttaaattcgtggagcatcaagtattggtgaccaaactatataagattcgatatgtatggttaacaatttaatattgtactcgcttcgttttaagttacaggatgtattttgttttttaaagtcttgaccaacagttacttcattaaatgtatccttttgaaaaaaaatgataccactcgattcgtattcaaaaatacttttttataattatatttttcgtgttatataaatattacttgttggccaaagtcctacatcctatattttaaaaccaagggagcagtaaacatcgttggtgaaatctagaataatgatccatagttacaacgccagcaacaaacacggtataaaacagtaatcatcgatcctgcaggttttgtttgatcctttgcacgttataaatttcacataaccatggtttgaacttggaaatgttttagaatttcgagtgtaacatttggagctaaaaatgagttcacaattaatagacgtatattaagggtttaaatgagttcacaataaaggagggtaactcatctgggtttaaaattcgttgtccacgtatattaagtacacaataaggacgttttcagtgggatttattgatggtattgggagttgctgctggtctctactccctccttccaaaaatataaggcctattcctttttcatcaaaacatcaaaaccaaaaagcaattaactcactcaccatatagcaaaaccaatgaacatgtaaccaataagtattagaatggcttcttggttttcaatcaacaatttaatttagcacacaggactcatattttttgagaaatcgaagaatgaaatatgtctcatatttttttttgaaggagggagtatttattttcttctttttttttttgagaaactgcgtacttcatccatcccataaaaaaccaatctaatactagatatgacacatcctaatacaatgaatctggacatacatctgtccagattcgttgtactaggatatgtcacatccagtcccagatttatttatttttggacggagggagtaagtagtaactctatttaagtcacatttgtacaatcgtcctcttgagaagatagaataaaacccttaggaacaaataccctgtaaaacagctagagaaacaacttcttttacgagcctatgtgctaccatattcgtcgagcaatgaactctgaaagacgtttaatctggacttaaactaacttcatgattctataaatagaacggtttagttctgactaaaataccgtcctagtcatttccatagcatcattattcaattagaacggtctccatttcttttaatgtgggttagaaacgtattagtgtgcgtatgttcacaaatgcttcattcattataaaaacttctgctagtagaagcaccagtgatgcgtggtagagttgtgggtgtataattttacccaccataatttaaattctggtgcccacgaatattacgtatatgcaaatgaactttcgaacatgattttagtgagatcagtgatgtgtcgctagtttccgtctcttagagcatgtgttaggggacatattagtggggtgttacgtgtgtagtggtgtgtgcgtgtgtgtaaaaagaaaacttccgctatataagtaggagtatgaaacatgtggagtagattcggatgaaactgacttttttttttttttgctgtgatgataatttgactgtcactgtcagtcgttggctagacgttaatactcctacttccgatagattataaaaccaaaccccgcacgcttcgcctttgctcgccgcgtcttcccttcttctctctctctcggccttaactaaacccgaatcttttctcttaatcccgcgcgcagtgcacgaatctcaaagcggccccggctccttccccttcaccggcggcgatggcgccggctccggctccggcgggctcggccgaccagttccgcgggcaggcgaggctgccgcggttcgcggcgccgcggcggtacgagctccgcctccggcccgacctcgacgcatgcgtcttcaccggcgacgcgtccgtggtcgtcgacgtctccgcgcccacccgcttcctcgtcctcaacgccgccgacctcgccgtcgaccgcgcctccatccgcttccaggtagtagatatatagacctctctgcaccttctcctcctcctcctcctcctcgccgcgccgcagtctcactcgccgtggttggggttggttgcaggggttggcgccgacggaggtgtcgctgttcgaggacgacgagatcctggtgctggagttcgacggggagctgccgctcggcgagggcgtgctcgccatggacttcaacggcacgctcaacgatcagatgaggggattttaccgaaggtaatttttaatgcatttaaatcaccaatggcagtggcaagttcacagcctgaaagctggcactttcgtttgttgaaatttctgctttattccgtgaacctctgttgaaatgctcggaatcgtcagtgcaaaatcgtggagttgtaggcaaaggagataactgataaatatatagtctgatggtctgcctactttgcacttatattgattgtgattcacaaatcagttgcaagaatacttttctatagatgctgagggctttttatgcaagcatgtggttggaaagtagttatgaatctgtgctttgggtctatttcgacaagttgtgtgtatcatctacattttcatatgagaaaatgccattcgttgcagtaaatatgagtataaaggggagacaaaaaacatggcggtgacacagtttgaggctgtggatgctcgacggtgcttcccctgctgggatgagcctgcattcaaggttaattcttatgatagcacgacttgttcaataatcataattttcttgtccagatgtttgatgcaatatgtgttgacatatcatatctattttttctgttgtttcccctcttcatatttaatattttcaggcaaagttcaagttaacacttgaagttccatctgagctagtagcattgtccaacatgccagtagcttgtgagacaattgctggtcctatcaagaccatccactacgaagaatcgccgcttatgtcaacttatttggtggccatagttgttggtttgtttgattatgtagaaggtgtaacatcggaaggtaaccatctttattctcgtcccagtaattcaacattgttgatggttcatagtttctcacattgaaggtgctttaggagccattttttcccttttacattccatttcattagtgtgtttaattgtgttcaggcaacaaagtccgtgtgtacactcaagttggtaagagtagtcaagggaagtttgcactagatattggagtgaagtcattgaatttctacaaagagtatgatcacaacctgtacctgtattgctttctaattagtttctaaacaactataataattcagctaatgcatattctatgtgcccaaggttgttgcttgaattaaatcattaaccaatagttcattccttctgtgctctagctactttgatactccatatccactccctaagttggacatggttgctattcctgatttcgctgctggggccatggagaactatggattggtcacttaccgggaagtttctttgctttttgatgagcagtcttcatcagcatctttcaaacagaatgtatatatcataactcagattctttttagttacatatttcatcatttatggttcactttgtaaatagtgatgcattattatttattagacattttctttgggacgtccaaattccttcagtgtaagcaactgttctttttaggttgcaattaccgtggcacatgaactggctcatcaatggtttggtaatcttgtaaccatggaatggtggactcacttgtggctaaacgagggttttgctacatgggtaatcaattatacaacactgaattttagaaatttaatatcaggatactactgtatactgaatggttggaccttttatttcgacagatgagccatttgtcagtagattcttttttccctcaatggaatatctggacacagtttcttgatagtacaacctctgctctcaaattggattcacaagctgagtcccatcctattgaggtaatagctgtttgatacatgccatggtctggtactctggttcaatggttcaaaacattgatgcatttcttatggtgtacaccaaatttgtctaaaaccgtaaatgctatgcattatatcgctgtagaaagtagagaatatattgttgtgcaaattttgaccatgataagtgacgctgatgcataatatgctggttacattcttaaatatccactagctaattcactgttgaatcttgacttttctatgtggtaataagatggaaatgttaattttgaggtcaaattaataagtgcaccaatacaattacacttcagctggtggcactttaacattttgtttcaatgctgactagtgatttgtttcaatatttgttgctgtttactcaggttgaaatacaccatgccagtgaggtagatgagattttcgatgccattagctatgacaagggtgcttctgttattcgtatgctacaaagttacctaggtgcagagcgttttcaggtttcatactggctctccttgaaattcttcagaatcgtgttattcttatctgtagtgagcaccttttgctcaactgtattgcttagaagcgtatgaaaattaccccaaaccattttctttctttgctctcggaggaagcattgaccctttagtctgtccactattcatttagttgaaaaacgtcaagtggacctttggatattccaagtttccaatattttaaatgcgtgaatgatccttaggcgatacaattggtgttaatgttcttttgttagtgattttgtaagtgaaattctttttttaaaagcttcctatattttttagggcaaatattaccatttcccccctaatcatcttgcttttgtttaacgagtaccctgttatcgatgacgagtcaaccattaatacttcattgcacgtacttgcatggtacttttggacatatactcaaatgatataaagaagcaagattcaacagatgaaaatattaatcctgtagagagaggcacaacttcaataagggtttgatggccatcttgtgtacttctctagggtgggtaacaatttacaacctgtaacaccatgtacaagttacaggagttggagctatctttgccctttttttgttgatcatatcataaatatgaacaaattgtaaacccactaatatgataaagctccatttttgttaattacatatttatcgaaggtcaattcttgcttacttctttatcttgtttcttcattattgctgtgtgactccacaaattctcctaatgcatcctcttgtactaaacttgtggaactgttactctttcagaaagcattaacttcatatataaaaaagtatgcctactcaaatgctaaaaccgaggacttgtgggctgttcttgaagaggtatctggtgaacctgtcaaggatttgatgactacgtggacgaagcaacaaggttatcctgttatcagcgtgaagcttaaagggcacgacttggaacttgaacaggtaataaattatcgaaaagagtagcgtcattccaatgtactgcacattcatctacttctgaaccacctatatgtaaattcattatgcatatggtttgcttttcctttctattttgccgaggtatgattagtgaggtacaattcctaaattaaaatcctgtatgaaatgtttatgacaaatattacataaaaaaattatgacagaacttcatcttagtttaatttttgtgcctgctatttatgaagatgtaattggctgactagaatttacgttgccctttcagtgcaagacaagttccacaagtagttcccataatatcaaaatttcaacggcacacgggtcaaattctgttttgacgcatttctgacgctctctctctctctcttttttgtcacaggaccaatttttgttaaatggaacctctggtgctggcatctggattgtccctataactttaggatgctgttcacatgataaacagaaaagattattgttgaaacataaacatgataacataaaggccattgtttcgcaatgtgatagccgacagaagggtggaaacttttggattaagttgaacattgatgaaacaggattttatagggttaaatatgatgatgagcttacagctgcacttcgaaatgcattgcaggccaagaagctctctctaatggacgaaattggtaaacacaacctgtggcactattaaatttctattgcaatgttttttttcctgggcgctattgcagcgattaaaggtgttataacactatattacaggcattgtggacgatgcacatgccctttctattgcctgcaagcaaacattgtcatcgttgctccacttgctgtatgcgttccgtgacgaggctgattacagtgttctttcacacataaattctgtatgtgtattttatgttgaattaaattccaggatattcagttattcgttggcaatgatttgtatatatcttttactttggcttgtcaggtaacttcaagtgttgcgaaaatatcaattgatgctactcctgacctggctggtgacatcaagcaactttttatcaagcttcttctcccgcctgctaagtatgtttaccatgtttgctgctttttagttctcaatatattatttcccattgtatgttcatactatgtgtatgtttgttaaacatgccttcctttgtggccatgcatacacgatgacataaattttatttgcagaaaattaggttgggaccctaaagatggtgaaagccacctgaatgcaatgctcagaccaatgcttttggttgcccttgttcagcttgggcatgataagactataaatgagggattcaggcgtttccaaatcttctttgatgatcgcaacacttcccttcttactccagatactagaaaggtccttcttttacccctactttacatggtcctctttcttttttgactcatctgtatctttttttacaaaaatgaattgatatctgtatatcttctatttgaagacgaattcatctctgtatattttgcatttttttttcaggctgcatacctctctgtgatgcataatgttagtagcacaaacagatctggttatgatgctcttctaaaggtctacaggaaatcagctgaaggggaggaaaagttacgtgtcttaggttgatatcttctcagccatcttgtgttaacaatgcttgctgatattttgggttatccagacttcctgagggctctgtctccttatctgtaggcacactttcttcttgccaggataaggatattgttcttgaatcattgaatttaattttcacagatgaggtaaattgctaaatggtttttttcttccatgactccattggaaggacctgattgaacttatacttttacattagctacctgtaagttatatacaggtctcatttgtttctcttgcttataggttcgcaatcaagatgcatatcgtgtgcttggaggtgtcataatagaggcacgtgaaactgcatggtcctggttgaaggtacaaaaagtccagttacctctatgcgttaccgcaacataaaatttgtgatatctggacctttgaagcatgtgattctcctaggatctttaaatataatgaaatatccacttattggatgttttttctgccctagaaagcatcaaaattatgcaaattttctacattcaaaattataagtaaatagctaaatttcgtgctttcttcaagtagcatttccttcaagtaatcgaattgtgtagatacgtcaaatgggggttatatttgtaagagaaaaggacaattatagtttccttagctactttgctggactattttacactatattattttcatgttaccttacccattgaatccttcttttaaagtcacttcactccctgatgatattgtctttttttgcctccttgtacaagtcatgttttacaaagaaattttgtaggatggtagattaccgcatatgctatattactaattattctcgaaaatttccatgacttttgaaaatcagtctttattgctatgaacctatgcaagtagcctctccgaagaacactttgaatgataaatcaaatgggttacccttgtttgagaattagtaacttccactcttgtttatcttgcttctatccatttccttacaaaatacccccttcgtccccaaatataagagattcacacattcaaaatttgtcctcgcaaacaaggtgtcatagagtcctgctaatccctccaaccacccgtgattcaaatttctccccatattgccccaaccaccctcccactccctacacacccctcattatttaatgatgggctcatagtatttttcctctatccttaatttctccgaaacaacctagactcccttatatttggggacggagggagtattaaacatgcaatgaagtaatagaaaatgttgagcttacaaatgttgtttcgttcggatgcaggaaaactgggatcgtatctcggaggcattttcaggaagttccctcatatcggatttcataagatctattgttacactggtattactcatctgcattctctgttcaattccgcacgagttatctctcatcatgccatttgctgaaacatgctgcttctttgtttgccggtagttcacctcgaaagagaaggaagcagagatctcccagttcttcgcgacccgcactaagcccgggtacgagaggacactgaagcagagcctcgagagggtgctgatcaacgccaggtggatcgaaggcatcaggggtgaagctaagcttgctcagactgtccatgagcttcttcacaaaccctgatctgtatccggtgtgatccctcccccccgggagctgcattccctgctatgaagtgccaactttaggcgaagcatttgtcgtagcagcagcatcccagcacattgttgctctctgtttataagtcatgaagcataggctgcatacgaggcaaagggatatatagtgcttaccgtttctcttcataggttgtgtacagcttgtgcccaggagccatgcatatgattcaagagttgtcgcacaattctactgtagctttgaagtgtccgagtgaataagattttacctttcagcattctgtatcagaccgagctcaactatttgtcgggcgattgttctccttggccatgataacttaggctgtgttcttctcccccattttcccaacccacctctcgttttccgcgcgcacgtttttcaaactgctaaacggtgtgatttatgtaaaaactttctatatgaaagttgtttaaaaaaaccatattaatctattttttttaaaaaaatacttaatacttaattaatcatgcaataaaacgaacttcgttttgcgtaccgaacacggcctaagtcagatttgcatgaactagcggactgatcacaaagcggttagtacctccaggaaaaaaaatcgtgataatttaagagagctctcccctttcccctgttttttttttcatttcattcttaaaataaccaagcacggtaaaaacgtactccatccgtttcacaatgtaag

SEQ ID NO: 5637 - DNA, 19321 bp, Oryza sativa
tcttacccctgaaacggaggaagtattagttttcagttatatttatcattttcagaaatgaaaatcttcactgatttattagtgtatttcagaaacctgcaacttatatggttacaatatctgtttcctacatctttaagtcaggttttcagttagcaacaacttcaacaatcagtttccaggccttctggcaaagtgggtccacttatcatgcgcatggtcaagttgaccattacaatttaccatgtgtacaaactggacatgcacatatggctccctattggggctagggagaggagataacaatatgggtcctaggatcaaggtttaactaaaatagagttagttatgcacttacttgatggtggctttaccctgcgtggcgcactctcttccaagaccacgtcataagagcaactccagtgtggggcttaaaatgattttaatgcaaaaagatcgaactgtgtacactgtggcagtcgacgcatgcatgtcagagcaaaaatcaaactccaaagtatattcaaactcaaccgagtaaatagttcgttgccctgggccattggcacatgcaggcagggcagaatgtagtgattggaggaacttttttcaacatgggtcccacgattcgattcaacactacagctatcgaaccaaacctttattcaacttcggtggattgtagcagtcgaatcagcagtggagctgctctaaggccactttgcattgtaaatgccctagcagtcctgagttggccgtttgagaaatacaactgaacctgccttgtcaaatggtttagatggtagcagaattgcagttctgtgaacaaaatttgtgcactgattttgtggtagcagaattgctgaaatcatcccctgaagttgtagataactgatagttatgttaaatttctgttatcacatttactcttgatttgttgctattattcttaattgtctactcattattgcatattctttttcagaaatttattcatgcaatttctcctactccagcatctaccatgtccagtgttgatattcacgcaaggcctccaaatactactttatccccatatatttctccagcaaagtcagttcctgttgaagaaactccaaagcgtcctgctgaggatgctgatttgcaatactggcgttacgatgtcaagaagcaaagacatggtgaagccggtgggaatcgtctatgtttcaaatttacatcatcaggatcctgtcctcgagggagtaaatgcaattataggcatgatgaggaggccagggagcattacaataggaatgtctgttttgatttcttaaacaaaggaaaatgtgagaagggtcctgagtgtaggtttgctcatagcctttctgatgagggtgctgttagggatacaaaaccacgtaggtgagaaaatattccaaatctctcactctgtctgaagcacacatgcacaatctgccaccccacctactcacattgcacttttacaaattaccccttaaacttcttagtattaaatatcaatcaaatcctaaatggatagacatataaagttaaattgagtagtagtattataatatattttatatttttttatctatagcaaagcacaagcattcggctagtatactaagaattctgattatctaattgtgggattcaccctgtatttttgtttactacagcgaacgaagacgtgttgagagcagttgctggttctgcttgtcaagtccagatgttgaatcacatcttgttatcagcattggagaaggttactactgtgcacttgcaaaagggccacttgttccaaaccatgttctagttataccagttgagcactgctctagtacactaaagatgcccgtggaagctgaggcagagcttgggagatataaggatgctctggccaagtattttgagaaacaaggaaagatagctatatacttcgagtgggtttctcagcagtcccgccatgcaaaccttcaggtgaggacatttttttcctgatatgttgctccatgcttccatttaaatgatgctgtcatttggaatttggatgcttgtatgcgatctcatttgttttttgttcatactggatggtaatccactaaatttctgcgcaggctgttccagtaccattgtctaaagcatcaagtgttaaaaagatattccatttagcagcacagagactgggatttgaattttctgtagtgaatccaggtgaagttgtacctaactttatctctcttagtcagctgaatagaaaggggatagacaaaaacaatcttaggctgcgatcgttcccctgggttcccctgggttgggaacgtaaccctccggcacggaaaacggaatggtccattagcacgtgattaattaagtatttactaaatcttttttcaaaaatgaatcaatatgatttttttaagcaacttttgtatagaaactttttgcaaaaatgcaccgtttagcagtttgaaaagcgtgcgcgcggaaaacgaaggagaggggttgggaaccttgagtatagaacacagcctaaatgggctattcacacatcaatgagcatactgtgatgccaatacatcttcatgatgttgcttctctaaggaagtcttcctaaaagtttcaacaattgtgtatcacgtggccaagttttatgttgcttataattcgatttgccctgagctctctctttgttttcagatggtgatgctaaccgcgccagggaattgttaagatcagagtgtgacagcaaatcaagcttgttttatgttgagctaccagaaggttcagtgcttttacatttggttgacagtaatgagaagttccctgctcagtttggccgtgaggtatatataccatatgataatcgttaaggcctttttttgtctgaaaaataacctacatggggatggaaagaaaataatgatatcgtcgaaacctaactgtcaatctacaggtgttggctgggttgctaagcatggcagatcgtgcagattggaggaactgtaaggtttctaaagaagaagaaatccagatggtggatgattttaaacaagggtttcgtgagtttgatccagctgaatgacaatgtgcttaagttgctaatttgtcaccggacaagaacgtgctgctaaacttgcattgtatttttgtagttgaaagtacttaggtaggccatatttgagaaatggaccgactttgaggtccattattgtaatttctattgattgattcgggaacaatttttttttcagttaagagttaaaatttggccgtagtgccacgtttgttcttcgagacttctcgtatacaatgtgatgatctgaggcgatgggcagtggtcgaaattcttatatatcttttttctttagacctgtgtcctaaagtaggaaataacacatttttcttgtgcttgtcgatgcagaacctgattgtttttttcgcacttaatgtgtagttggtttgaggaaaaaaaagggtccaattagaaaaaaaaaaagaaaacatgaattcccaaaaaaacgagaatggaacgtactagcgtttgtttgaacatatgacaaatttgaccgcgatatcttttatcgcttcctattttctaaaccttgacttttgaaggagaaaaattagaataaaataaaaaccatatttaaaatcatttctcgttgctcgagtaacaaaaaaatagaataaaaaaaatcatatttaaaattatttcttgttgctcgagtcacgttagcctacaagggataacaaaatcaaacatttgtcacgtgtcagcagccaaaaaaagctcgaccaaataactataaaatcgtgcataacctcattaaaatattgataaaatatattaatactatggatatcagttcacaaatgcatgttagaactattaggagcggccaaacatgcatcagcccatgcccaccctaccccatgtctaggcatcccacttctaccgttgtcggagtaaacgatttactcatatcacgcgcccctaccactcacctttattcgagtaaacgatctacttcaataataaaaacaacttccctgcttccgatcccaccctacatggcgcatcgtgctcccaccattaccagaataaatgatttacttcaataaaaacaacttctctgcttccggtatatattctatttttctcgtacccaaccaaccactctcgcccccatttctttttttttctttttttcggatctgaatcgatccaccatcccagcccacaaatcggcgacacaccatgaaggaggacaatgacaccttggcggttgatggcggtgatcggcggctgttgaggcgacgacactgcttggggcctcgctaccgaacgctgggcagcaccttaactagcaaggaggtgttcacctgggccaatagcaaaaaccagcggctgctccatgtcggcgacattgatagaacaaacaagtaaggaattgacactgattttcatctgcatactctccttcaacttcacgtatgaagccccaaattatttttttgcaaatcaaattaacttgcaatctgcaatattacctgatctcaattgatgggctacacaagtcctacatttgcacatcgtgctccatgtggctggctgcagaggatagggtggagtccgccggtgatggaggttgtttgctatttttcttttactcgtcatctctatcgacatgaacgagaatgtttttgtatttttttcgtgcttgctagatgatggatggctgctactgcgcaacgtcgagctcatctctagaccacaccgctacatccttccatgattccatcatcgactactgctcgccaactggttgccctctccactaccagtcacaagacacataccatcctcttcatccttatagcaagatccagcaaagccactagacggatttttgacagaatcatttttttcttttctagtttgattcacctgtgagtaattttatcgcttgtgtgtgattgagcctataattttttcattcgtatgactattttgtgatatagatcactagtttttactcttatactgtatattgaacacatcagtaaacatattactacacggtggctacgagatcatggctatatcgataggaaagtgtaattattttactcgcagaccatgaaatctcaatttttactcttatgtattgtgtattgaacacatcagtaaacatattactatacggtggctacgtgatcctgggctatatcgagagaaaggtagtaattgttttactcacagaccacgaactgtaaacaatatttataatattggtaaaataattactagcattgtaagctggtagtaattcttttataaccatctagatatgacgtcatacgatgttgagacattcatgtgagtaaatatgttacttttaaatgagtagttgtgagaggcattcgttacttccaaaatgcgcagagatactaggagaacaaactcagaaaaaaaaactagaagctaaatattttactaaaacgcgaaaacataataactacatagaagaaacgaaaaaacagaaaaaattactaaaacatgaaaacagaataactacaaagaaaaaacgcacggataaggtggaaaggagaaaaaaaacaaaaaaaaaagtaggatgcagagaaaaaggtggggtggtaaaaaaacaaaaaccggagagaatgttatacggcgctcgatctattattccgcactctagcgctaccgtaaacatttctcgagtttatctccgtttcttttctgtttttttccgttacaacgcacggaccgcaacttcgttcgtcgaacgattttcaaacgtgcaacggctactgcaaaattacgaaccgaattacgaaagaaatcgaaattctcccccgttaataatccacgttttccgatgcatccatgactcattcttcgtccgttcgaccgatcgacgcgtattgtttggatcaggtttgttcatcggccagctagctatacctgcaggtagctcgatccaaattaaccaaaaaaacaaaagaggttaccttaaatagcctaattgcgcaattagccaccactaatcacgcagcgaaacacggtcccctcctctcttctcctccactcaccaagtcaccatcgcaccgacctcgccggccgcggcggccgcggcggcggcggaggcggaggcggaggcggagccagcaatgacggcgtcttcctccaccaccaactcctcctcctccgtctccaccgccgacacctcctcctccaacccaccgccgcaacacgcgctccaccgccaacacatcgccagcagcagcgctagcagcggaggcggaggcgccgcggcgccgcttccgccgcgcgcgcccccgcgcgtaggcggcggcggcggcggcggcgtagggcagagccaggcgtgcgccgcgtgcaagtaccagcggcgcaagtgcaacgcggactgcccgctcgcgcgctacttccccgccgacgagcagcggcgattcctcaacgcgcaccacctgttcggcgtcagcaagatccagaagacgctgcgggacacgccgccggagctccacgccgacgccatgcaggcgctcacgttcgaggccaacgcgcgcgccagcgaccccgtcggcggcgcggcgcgcgtcgtcgtcgagctctgccgccagtacgagatgctgcacgccgagctcgccgccgtccagcaccacctcaagctctgccgccagcagcacgccgctgcggcggcggcggcagccaacgatccactcgtcgcgaacgtcgacccgctcgctgacccggcagcggaaatgctcttcgccggcgccgtcgtccctaaccagaacgacgacgccatggtcgacgcgttctacgccgaccaacaaaccgccggcgacggcgaccaagagcaatacctcgtcaaggacgaggcactagctgcgcaaccgccgccgcaacaaccctacgagtacttgaactacgggacggccggcgacgagggcagcagccacgcctggtacaccggcaacggcggcgacgccgacgcctcgccgccgatgggtttgagcgatcagctccagcagtgccagatcggggccgcgccgccgttcgatgtgaagcctgagctgccggcgacgatggaacacggcggtagcgtgttcgtcgaacagccggagcagaagattctgccggcggcagggtcgtcgtcgtcggcggcggcgcattgccagctggagcttgggtgctcttctaatgcttggaaagttggaacacacgttattaattaattaattaattagtttctcgatttgattgattcggatatgatgaaatgcttgttgcatttcaaattttggcttgttgagttaggagttaattacaaaaataatcactagactagcttataaatagtcaagttttaattaatagtagatgatgtatctatgaatgagagtgcaaataaaaggctctgtctattaatgaggttaatgaaattttctacctccaccaaggaacagaggaaatcaccttcactatcaccgtttgagtttcgccatctccctcaaatcattggcaagagatgaattctgatccagttatgtccatgcattattcgactgaaatttgaggaaatctgagaaacaaagtttttacatatagatcttttcaaggaaaaaaggagaataaataataatgttgtacaaatgtttttttaaatcaaatttactcctttgttcttgcgagagatatataagtatcaaattaatcataggtgatgacggaaaaaggctatgcgcctatgcgacgtggctcctctattggattgtgatgggctgcctattgggctgggaagccagggagacctgcggctgggccaaatgagtaaggctagactatgggggtttgaaaattctgaaaaatatataaatactagaccactatttttttttcactagtgctcagtcctaagctgcctcaggtccaattccacccatggtgagaagagcaccagaataatagtgagaatgattcatatttttgttcttttggtgaaaaaggaaagaaaacacatactatcttcatttttttaatatagacaaattttactacataacattttaatttcgtggttttaactgtagaacactgcacaaactcactttttttttgaaggggggacactctataatataccgtggtaatttttcagcagacaccgcaccgattaaaataatgtatccgtgttgacaacgtgttaggggggccgattttttatgtcgagtgaccgaaatgcccttgcaccttttggtgatattgaccaggtcggcggtgctatttgccgacaccgaaggcgaacagcggcgattcgcacgttgtggccaaaagaaaaaaaaatgtagaggaggtcaagacgaacacaacggtggtacatgcagacagaatggccacgggagtcaacgccggttgcgatgcaagcgggttggagtttcggcatgtgtgtgcatgttgtgctataggctcgatttggctaggggagtgcattcatgtggctctggggtctctaacggcagccccaacccttcatctagaattgtgtttatggcattaactatattgtcatatatgacttttagcttatgtggcactatattaattaagagagagagtgaaaaaaggaagaaactgggtctcatgcaagatacagcttcaacacaagaacctatgtactagacgctatcaagttttgcattgggagataatagtgtcttcataatagatgaagaataaatatgattggtagataagagagataatgtatttattaatggcccactttaagaaaccatgggttgtagagtgtagtttctattgtgatgtcttagggcagtcccaacccatagtgtctataagtagtgtctatgatgctatgtcaataagacccccgggggaaatagagatgtctcctacgttacccataatatgtagaagtatcgacgtaatttcatagagtcattcgatctgaatgttacatgaagaacataagccagatgacggaacgcggagacctaggatgtagaacatcataacatgagcgattcggcagatttggattcctttcctatatatccactcatgtggtacttcatcatgcgattcatataagatccatctgtctagagatcgtcatatacatctagaaagccgtatgctttggaagaagcttgtacagtttgggaagaggttttttgagagaaaagaagaatctacttcaaccgatatgcccttaggcacggccatacataacatagaaatcacacgtggaaggggtggctaattagctagagcagcaggtgttgtagcgaaactgattgcaaaagaaggtaaatcggccactttaagattaccatttggggaggtccgtttggtatcccaaaactgcttagcaacagttggacaagtgggtaatgttgaggtgaaccagaaaagtttgggtagagccgggtctaagtgttggctaggtaaacgccccgtagtaagaggggtagttatgaaccctgtggaccacctccatgggggcggtgaagggaaagcccccattggtagaaaaaacccacaaccccttggggttatcctgcgcttggaagaagaactaggaaaaggaaaaaatatagtgatagttttattcttcgtcgccgtaagtaaatacgtaactaggaatatggaaaattgcatttttggaatttgcaataatgggatgggcgaacgacgggaattgaacccgcgcatggtggattcacaatccactgccttgatccacttggctacatccgccccttatccagctaaaggattttctcttttttccattcatcattattctatttattctgacctccatacttcgatcaagatattggacatcgaatgccactctttaaaatggaaaaaaaaggagtaatcagctgtgacacgaaaaaaaatgaatccttttgtagctcatcatttattggcaaaaatagaaaaggtcaatatgaaggaggagaaagaaacaatagtaacgtggtcccgggcatctagcattctacccgcaatggttggccatacaatcgcgattcataatggaaaggaacatataccaatttacataacaaatcctatggtaggtcgcaaattgggggaattcgtaccaactcggcatttcacgagttatgaaagtgcaagaaaggatactaaatctcgtcgttaactgaattcagaatagaaagattcaaaataaaaaaaaagaaataggtaagcggggaataaccttatttataacaagtttcaaactggtaaagtatacccctgggataaagaagaagaagagtgggctaaggaaactcgcaagaaaagtaccaaccgatcatctacttaagttcgaacgggttttcaaagcacaaaaacgcatccacatgtccgttttcaaagtacaaagagttctggatgagattcgttggcgttactacgaagaaactgttatgatattgaacctcatgccttatcgagcatcttatcccatcttaaagttggtttattcggtagcagcaaatgctactcattatagggatttcgacaaagcaaatttattcatcactaaagccgaagtcagtagtactattatgaataaattcagacctcgggctcgaggacgtagttctcccataaaaaaaaaccatgtgtcatataacaattgtactaaatatagtaaagaaatcgaaataatctttagatccatctaagatttgattcccggtaaaaaaatagaatagaaaaatatgggacaaaaaataaatccacttggtttcagacttggtacaacccaaaatcaccattccttttggttcgcacaaccaaaaaattattctgaaggtctacaggaagataaaaaaatacggaattgtatcaagaactatatacaaaagaataggaaaaagggctcgaatagaaaaatagaagcagactcaagtttcgaagtaattacacataataaaaaaaatggactcaggctcaagttccgaagtaattacacatagaaattcaaaaagaaatcgatacaatccatgtcataatacatattggattccccaatttattaaagaaaaaaggagcaatcgaagaattagagaaagatctacaaaaagaagttaattctgtaaaccagagacttaatattgggatcgaaaaagtgaaagaaccttatagacaacctaacattcttgcagaatatatagctttccaattaaaaaatagagtttcattccaaaaggcaatgaaaaaagccattgaattaactaaaaaaaacagatataaagggagtaaaagtaaaaattgcaggccgtctcgcgggaaaagaaattgcgcgtgccgaatgcatcaaaaaagatagacttcccctccaaacaattcacgctaaaattgattattgctgctatccaattcgaactatctatggagtattaggagttaaaatttggatattcgtagacgaagaataaccaaccctgtcttcccattctgttcagtaatagaataaaaaatgacaagatacttattttccctaaaatccctgaaaaaaagaagaaattctacctctttctataagatttaatgaaaattgagaaatcttttaataaaattgctatgcttagtgtgtgactcgttagttttttttagggttcaaaaaggggattaaaaaaatagaatgaaccctactatgtaattatataaaatgaactaataaccaacctattgcttcgtattgttgagatcctaactaagaaacagtcactatatgaataaatacatctatcataaatgagtaaatctatcatatacgtgtagcaactgcaattttttgtttttaaaaaaataggattctaagttgtgaagcaaaactaaaggggatgtagataaaaggaaggatgatagaaagaaggaagagaaataagaaagatataggattccaatatgtatggtctatgaattacatcataaaaagcaatgtgataaagcatcaatataataaaaataacaaagaattcgaaatcgtaatttgattgaaacaagaaatacaaatttcaaggaataacaaagagtgtcccgagttaataaaactgagaaattgacttggaaagaaattttttggaagctccattgtgagattaaaacctaaccattaaaggagaagccgtgggaacgacagaacctatgactggataggattttcttgaaaagaatcccaatacttcattgggtgggatggcggaacaaaccaaaaaaattgtcttatttgataacaaataagacaggaaagagtaaatattcgcccgcgaaatttttattgaattagaatactttaccgcgattcaataagagtaaaatacaaaaaggagattaaaaaaaagaattacattaaatatagaatatagataaataaacatacacatctagatatattctagatcctctttcttgactatatattttagtattttaataaattcaatattaaaaaccctaacctttcctattaatgtgtatctatccgtaatattttagaatattgtggaattagagaaatttgcacactttctcatttgattcgcgaggagctggatgagaagaaactctcatgtccagttttgcagtagagatggaactaagagagaaccattgactataaccccaaaagaaccagatttcgtaaacaacatagaggaagaatgaagggaaaatcctaccgaggcaattgtatttgttttggtagatatgctcttcaagcacttgaacccacttggattacggcgaggcagatagaagcaggacgaagagcaatgacacgatatgcacgtcgtggtggaaaaatctgggtacgtatatttcccgacaaaccggttacaataagaccgaccgaaacacatatgggttcgggaaagggatcccccgaatattgggtagccgttgttaaaccaggtcgaatactttataaaatgggcggagtatccgaaactgtagctagagcagctatttccatagctgctagcaaaatgcccatacgaagtcaatttcttcggttagaaatataacccccgccaaaaaagtagtattgaaaataaaaaaccaggttcttctttctggaaagacaatatttctttcatccttttgcattgaaataataaattgaaatcaaaataatatgattcaacctcagacccttttaaatgtagcagataacactggagctcgaaaattaatgtgtattcgagtcataggagctgctagtagtcagcgatatgctcgtattggtgatgttattgttgctgtaatcaaagacgtagtgccccaaatgcctctagaaagatccgaagtaattcgagctgtaattgtacgtacatgtaaagagttcaaatgcgaagacggtataataatacgctatgacgacaatgcagcggttatcattgatcaaaaaggaaatccaaaaggaactcgcgtttttggcgcgatcgccgaggaattgagagaattgaattttactaaaatagtttcattagctcctgaagtattataaatactagtagacaagatatagatcaaataaaaaattagtagattgtgtttcacgtatatgctttagaatccaaaacgaaaagaaaaaagagaacgtgttgattatagaaaaattaggaggaacctagaattagagtcttatgggcaaggacactattgctgatttactaacctctataagaaactcggacatgaataaaaaaggaactgttcgggtagtatctacaaatattaccgaaaacattgttaaaatacttctacgagagggttttattgaaagtgttcggaaacatcaggaaagtaacagatatttcttggtttcaactttgcgacatcaaaagagaaagactagaaagggaatatatagaactagaacctttttaaagtgtatcagccgacctggcttacgaatttatgccaactatcaaggaattcctaaggttttgggcggaatgggaattgctattctttctacttctcgaggtataatgacagatcaagaagctcgactaaacagaattgggggagaagtcttatgttatatatggtaatcgcctcgcccatagcggtaatcgccccacctatagttatagtacccaaattctatcttgaacttcctatttttcaaacaaaaatacaatgtttttttatttgaaaataaaaaaagaaaaataggagaaaaaaaagtagtgtctatgatgctatgtcaataagacatcacaatagaaattacactctacaacccatgatttcttaaagtgggccattaataaatacattatctctcttctctaccaatcatatttattcttcatctattatgaagacactattctctcccaatgcaaaacttgatagcgtctagtgcatagattctcgtgttgaagctgcgtcttgcatgagacccagtttcttcatctcttcactctctctcttaattaatatagtgccacataagctaaaagttctacatggcaatatagttaatgccatagacaccatcctaggtggagggttgggactgcccttattgacatgacactatagacactacttatgggcactatgggttgggactgccctaaggtgcttaccaaggtccaacaaggttggtcgcagtctgaacaatagcaagggcatccggaacggcttggcgacattgtggacaccgagcgaatggcgacggcgtgcttcggcaaacgatctggaaagccaacatatctaggtgatcagtgaattcctggggattctatggttgcgtggaatcgagatgcaactcaccggagagcgggggatcgacgttggaagccagtggccggagttggagaagaaaaccccgatctcctcatcgctgcatccccaaccaaggaagataggggcgttgtagagggcggttttcaggatggtgatggcgcaagggttcagccggatctgcactgaggcgaccggaacacagggtcgacgtcggcggtagcgtctgaagcgcgcccgcaagctccttaggtgtggtcagggttcactcttatcgtttgaggactttgtattggggtcaccgaaatcccgaaatttccgaaattttgagcaaaatttagttgaatttgaacaaatattatccaaattcatgaaaatattgaaaaatttaaaaatttcggccgccgaagtaatatcgtatcggaggtgaccgaaatgaccaaaatttcaaaaatttcggaaatttcggtccgaaatttccaaccctgggtttggtcacgttcccgttgatccactattcaaaatggattaggaccaaaataaaagttgtcaggcatggcacgtaaaagacaaaatggaaagagatcgagaagaagctattcagtggaggattgtaccatcgtctccttcgcggccgccgacagatcggaaggaggagaccttggaagctttctgtcttggtttcaactgctgagacatgaacgtggaagacgagaaatggttcagggagcttaggggatgtaggcaagttctccatagaggcgtcggtgggggtgaagtggaggccgggctggagctttgccgacgtggcatgaaggagcttccacgacgtcttccgcgtcaatgaccaggtcaatatgaccaaaaggcgcaaggtcatttcggtcactccgcataaaaaatggggccccctagtgccttgttagcacggttacattattttaattgacgtggtgtccgctggcaaattatcatgattataaaatgtcttccccaaaagtgagttcatgaggttggatgcacaggaggaatggagaaagaggaaaagcaagtgattggtgccatgtaacttatgatctatttgaaattatctggtagtttggatttcaatgtcttttagagaaaaaaggaagctagatggaatagacgcatatagtcataaatgcggcccactcaaataattataaatacgcacgcacatagatcataaatgtggtttctaaggcctactcaaatagacagaggccaataacaaatcctcgatcttaataaatacctactaaaaatgtatctgcatatgcgcaatatttgtggtcactgatgtttaaaccttgttagatgaaatcatcccataacttcaacaccacatcacttgcgctttaaagcaaatttaatcaatctgtcatatatatactccttttcttgcctagagctccccctccccccccaacaaaaaaaaaggccaaaaaagtggcatgggagagttttaacacattcaagggagggcaatattgtggagtagccagtggtggacacacccattaggcagggtgattcgaccggcccaactatagcctgtgtcgccccacacctctaaccctcatttctaatattgtttctagcacattagtcattagttcactatcaaataatcatataaattaagtattttaagtaaggataaaaacatttatgaaaattcgtgaccaaatgagtattatttctgtataagtagtaacattttggccatacataaaatttgattttttttctatttcttcatcacatattatagtctacagtaaatagttaaattggtaaatatatataaaaaatccactttactcccatgaactattttgacgaagcacttaaccggttaaccccccaaatgctttttcatctcgttttatacccccgaactattaaaagtggttccccttagtgcctcaatatttctcttttgtttttatatctctctacgtataagtcatatatataagttgtatttgaacataaatttggtaggactcatatatccattataacagtgtaacctacctcttaacattttgttaataattttatatcactattatatatgtttcgatgtacttattttgaaaatattttgatactttgataacggtgtaatttatggcttaaaaaatttctgcttaaaatacgcatcgtataaagagaaacaacaaagggaaatactattaagaagcaaaacaaactattttcaatagtttaggggtataatgagcaaaaaaatatattttatgggtttattgatacaatggaacaatccacaagtgtgaaatggcatttttaaatatgaatatttccaaaggcctataattttttttaaaaaaaataaatgattttgtgttcattcattttcatccctaattcctggcatgaggcacccatcgtctctcatcttcgtgactacgtctactgccctgtctatctgactctgatgtttgttcaactgctaattttcgttgttaaccaatgtttgtgtggtgtgctagcgcaccggtgctgtgagccgacgactatgatttatatgcgttgtgccattatcaaattagtaatagctctttgcaagataatgctgcgttcgccgatgctaatcaaattaacacgccctaatgttgatcgccgtggcaaccaagtcatgaggtaacgtagatacccccttcacatcaacttgcacgtgcatatctacacggctgcacccagtcagcaactcagccacgaagaaaacaaaaaggagacaagaagaattttcttagccattaagttgctatcatcaacttaatgcatcatcctaacaagaataactttctcatgacagtgagcgagttaacatgacttggctcattaataagctggtgatgatgatacgcaagcaagcaggcatcatcctggaaatttaatgcatccaaaaatccaggtcctaacgcaaacaccattgaagtacacatttttaatttaagttgtagcgtagtaccaattgtaatattatatccatcctagaagcatccgaacacaataagaaacaaacaaattaagagttgtcacgcgctaggattttgagcggccaagttagagccgtcacttagtgagtaaccttggcctaatcaactttctcgacacctaattaattcaaagagccatcatcttttgttaggctgcttgcgtaatcgagctagtcagcccaggaaatgttactgagttactctaacaaatgtaataccccaacaattttactctttctattctcaaataattaattactctcccctttttaatggataatgtcacgttttactattctccctatttaaaaaaattatttaaataccatttatttcgttgtgatatattttagtattatagaaactttaagtatgacttatactttaacatatttatactattttttaataaaacaaatggtcaaacattattttaaaagtcaacggcgtcatctatttaaaaaagaagatacgattatcattttactcttacaaaggtaacttctaatagttagattgtgatgaaattacaattatatgatcatatttcagatgcaacacacgtcgataatataatattttttttaattatatggtagacgcatacgcacacacctctacgcatgcaacaccactctcactctgtaaatgcgccccctaacgcatgttgtaagagacggaaaccggtgataaattcccaatctcactaaaatttctgttcaaagcgtgttttgagtatatgtaaacttattgcctaaagagaaatggttaaagtgtggatagtattcactaacacatttgtataaaaaatggagacagacaaatctttgcgaactctgcatgtacatttttactttatttgatgaatatatgaatacctttgcctttacaatccttggtttttcaatatttatccctttgaattcattttgtaagcctaatttcctgcacaatttattacagcagtctcccagtctcctctgtcaagccaccgccatactaaaccaaaacgtccaagccaaaccaaaaatagtgaaaatacacacatgcatagtagtaaaaaagtggattaacaacggaccaatttgcaggggaacaaaccggcgtacgaagctacgagcatggcaagctggcaatctggcaggcccggtcaaagtttgactattttgcccacaactcagacgcgccgaaatgagccatcgatttcttcgttataatttaatcttacttttcaacttaaaaaaacatagctaattacgtgcacttataaatatctatcttccgatcctcgcaaccatagcattatccagcagcaaaaagattcccctctttttgtgcaagcgagaccaacaaagtgatcgaaggcgcaaacgcaaggcaaagcagagagaggcgcgcgatggcggcgccg

SEQ ID NO: 5638 - DNA, 23958 bp, Oryza sativa
tgtaggggttgggggtcgctgacgggtggggtccggtggtggcatgtggggaagggggtgtcctttctggcagtggcaggtattccgtgctggtagttgtgacttgtgaccagtagagtgaggtcgtactcgagttgaccgactgggaacctcctcttgccgacctcaatggtttttacagcaacagaaattttagaaaatcttacttccttcccctcataatataaataattttgtatttttttctttttgttttattaaaaaaaattgtgcaaatataaaaaacgaaaaattatgcttaaagtattttggataacaaagtaagtcacaaataaaataaataataattctaaaatttttttgaataagacgaatggttaaacagtgtaagaaaaagtcaatatcccttatgttatggggcggagggagtattatttgaagtcaaagttatacacaaccacgagtattacaacgcgtgacatataaacacggtttttcatggtctatgcgattcataaaattatgcatttattaaaatcttgaaagtagtgaagaggtaaactatcaacattagccaataacataataaattaaaaattttaaatacactcttatgttttagattttaaagtacaaacaaaggtgggattctgtgaaactttacaatcatggtattactatctaggattatatcctacaagccataacacttgtggttttctacagttttgacataaaacattaggttttctaaagcttactatatgattttttagagatgtatcggtgaaaagttggtttcaatctatcaaaaattagaatcctcttgctcttcttcttggtttctactggtggggttgagcactgccaactctcagtcgagagagatcccgcacgaaaggaggggataacgatggggtggtctacccttttttattttagggagtattatctcctgtataaaaagtacatcttttaatacttaaatcctcgataggggtttccaaaacaagatttacaatagagtttttggttggtgtgttttaaaggcattctcaatgtatgatgcttatatcacctttaagttgggcctctcgtaggtagttgctctgtccataaaaacaagttctaatgtttattaccagttgtcgacggggataaccgtagaccggatatagagggtattggggtacgctggtacgaggatctacgtaatacgacatcaagcaggcagaaaacaaagattatactggttcaggccccttgataggtaatagccctaatccagttgatatgggattatatgatgtaagccacagattacaaagggaaaagcggaactcgatgatatcgacgagatcgtagtcaagttgattcgactagatcacccggcgacttggctcctgtaggctccggcttcgtaggctgtggtggttgtcttggctatgagattcgatgccttaggtcctcccagggagtcccttttatatcgcaagtcagctagtctccaagtaggactcggagacatcggacccggcatgatacaatgacgacccagttctgtctaagtatgactccttccatccgtgaactccatgatgaattcccttaacgtatgccgaaaacgtccgtatgcgcgcaagtataccatatcgatatgtgacgtatgttgaagggtagagggtataccttacccgtaaccctgacaatggcccccgacttctgcttaaatgaactcatgtagccgatcatgacttctgatgtcgaggctgtcgttgttctcagtgtaaggaccgagagacaaggagtgatcgacagcgcccgatgaagctcaacggtcacgagtgaatttaaaccgaagtccaaaaaactgccgcgcgtaacggatccagaaatttccggcggcaatctctctcctttccttggaattcgcaccgtcggaagtacagctacttaaatgagttttggggatcccttttgaagtccgcctattgtgaaaaaactctccagcctccaagcgttcctcatcttctccgctcccgcaaaaaccctagctagcgcatctcggtcccttctccggtgatcttcggcggcaatggatctcgacaagtctacctccaccagcgcgtcgctgaagaaactgcaggaggatggcgcccttcccggtcgcgggaccatggagagagaagtaggaggtactgaaccccagcctgtcctgggtcgcatagttgcgatcgaggactttattctctgtggttttcttcctccgccttctgaatttcttctcttggtcttgaatttctacggcctttccttgctccatttgaactccaattctatcgccttcctaagtatcttttcgtatctttgtgaggcctatattggggtagagccgtttcttgacctcttccgcttttactatgagttgcgctggatggagcctaaaaagggtgtccggatgtgttggtttccgacttcgggatggtctgaagtcgcgatacatccccttccagtgcccctcatctcgcagcaaatggcgggggaggtggttctgtcttcagatagaagattcggatccggtcttcattattcctgaggagcaaccagacaagatttcatcttggaccgtcaaacccgccttgaccccatccctccaatctttcatcgatatcattgatgacctccgagtacgggggttgtcggggtatgaagtcgttgccgacttcattggtaggcggatcctgccgctccaagctcaagcccacccagcctttgattattctggaccgaaggacgcgacccgggtttctcctcggagtatttttctttgtagttaaattgactcccttatgtgtgtgttcctcccgacttatcgaattctggtctcgatttacaggcttggacagcgcaaccgtgaggcgccgcgttggccaaaatatgatcagtggctcgacaacggcgagcaacgtccctgtccccctttgcgagaaaggggtagccgaacgcgaaactgccatcaatgtaagtgtactcagtggcccttttgcatttttcttccgggatcgcattatgacatcatgaagcgtaggctctccctctaactgatatcatcgggccgctcgtggaccatcaggtggcagcgtcgctgaaggagaaagtcgctaaggaggcgtctgacgctgttgccgctgctgccacaatgagtggcggcaacgttccgaaaaaggggaggaaattctcctctgtggtcggacatcgtcggaagacgtccaccccttcggtaagttttcctggtccttcatcgcgtagtcgggaaacttccccctcatatcatgcccgttatactccaggcctcggatgcatctcccctgcctccacgacggcaatggcttgtgacgcttggcgagaagtgggtgaactttgaggttttatcacttcatcgagctcttgcagcatgtctcaattgcagcctttcacagggcggcgcaggcaaaagcggcgcaagatgggtccggagggacttccagcgtgtctcctgctgtggcctcgacacatgtcgtggtcgtacccaggagccgcgaggtgaagccaagcggcccagccagcgatctcgcggctggtcggggtccgccgactgccgtcctcacatgggaagagctccagatcgcgatggggcgcctcctcgaggctggtgctcgcggtgttagccgcgagatcgcggaggcgagagcggcgatggcgtcgtcggcgaatgaacgcgtcgaccggctgacgcgtgatctggcggagtcgcgaggacctccagaaaatgagggaactggtggccggcaacaagcgacaagggcaggggcttgagcaccgcatgtcggagctcgagaacaacttgtcggaaatccgttgctcgttgcgggtcacctacactggtctgcaccagctcgccggggagtgcggtatcaagtccaccatcccggcgaatcccgatgagttctcgctgacaacttcgcttgctgagctggcgacggcgatggaggcgatcccctccaagcacgcggccaggatcgaagaggagacgtccaacgggatctatactagggcgtgccatgtccttgcatatgtgaggctggcgcatcctaaactcgatctgcggaagattttggatcagggggcggctagcaacgcgcgcaaggatgtgatggaagaagtcgacgatctgggggagtctgtcctcccgctttttgaagagtaggattttggctttcttgtactctttagtcatgttttgtaaaactctctgaaagggtcaattaggcctagagagggggtgaataggataatttaaaactttatgcagaagctaaaactgagttaggatcggaaagtctgatccacagtcagactatccgaaaatatcagatagtctgatgttggatcagagtgtctgatccactaaaagaacactacaagaagatctagtgcacaaacaagagtatggcgcaaacagcgactagatctatagcggcacaaaagcaaagctaaataatgggagaagagatatcaccaacaatgaagttcaccaggttgttcccggagttcaaatccttgaggggattctactctccgttgaggagctcactaagagccgggtctttgctaaccctttcctcaagaggttgcactaagcacttctccttccactaaggggtatctctttccttgtggaggcgagatccggccttcacaaacttctcccggccaaccacacgtagatcggtggctcgggagtgacacctagccgtctaggagtcctcaacctccaagagtaacaaacaccacacaactcttggtcaaccctagtgctcaagatcaagtgaaacacacactaggcccacaaaccccaaatccacaaccaccaagatccaccacacaaagaacaaggagagatttgagagagggagaaagagctcaaagatccaaagcaccttagcaccaagcacaacccaaagtgaatgagaatgaaatgagttgggtaaccctagaaaagggttaggtggggggtatttatagaagcccccaaaatgtggccgttgggagagaatcttttcatcccacctcggaaagtccgaggtgacatcggatagtccgatgtttttgacccccaagcaggccagagacagagaacgaaattctggagaatttcggacaatccgatcgatcggatagtccgatgtcatatcggatattccgttatttttgaaccaagaatttcatcctctcacagagactcaagttccattgaatttcggagtctctggatcatcggatactccgatcacatcggatagtctgatttaaaactcactcaaaaggaataaaaagcaattcaaaacagagagtgaagttctgagaaatttcagatagtccgacgtatcggatagtccgaccttatatcggatagtccgatattttttagccaacactcagacccaagatagtgagcaaagttctgtgaaatttcagatagtctgagcatcggatagtctgatcaacatcggatagtccgacagacataaaacaggaacacttcaaataaatgattttgagcactagtgttctaccaattatatgcatgtggcatccctcttaatagtacggcatcctaatactcaagaacacaagatatacatggattagaagacaattaccacaaaagatgccgcaatacttattgtgttgacatccactcctttttcatccttgcatacatctcaacaaaaagcattagttaccctctaattgtgttgtcattaacaccaaaataaatgaggggtcctagatgcactttcactctatgcgaggtgtggttcaactcgtatttgaagagttgctgcacctctatgtgaagagtctgtagagagctctgagtaccccgtggggatcccgaggaatcggcggctggatacatctcatggatgaatggggcctgcgcctagctcgaaggcatcagccagcgtatcgacgaagccctgaagcagtagtgtcgtcgatcgagccgatatgctggggggcatatattggcttgcatacgagatcatcgtccgcagctgcacctcgagttcctccacgaagggttttctcgttctcggagaactcctacggagatagatggcctggcgaagtcgatggtgccgctggcggagaaggtcttccagtccatggactggcgttggccttcctggtagtctccgtgtcctgtgacaaatgtcttagggaaaaagtgtaatataattttggatttttatggaattgtaagaagtacttgtgaaatagaaaagagatctatctaactaagctttcttactctggttgtagcgtgtatgagtgtcttctcacttcgcgacttcgatcaatcgtttgagttatacactctccctagcccccagccttgtcatcggagaattcttcttggaagataaggctcttggacctttgacctgcctcggttgaacaagcactgatcctagcccccagccgtgaagttggaaagttaatttccgatttacacagcttggttaatacgcacggcgagaactcttacacgaccagatcttacatggtctttcgtctctacaggatccgacaaggccttatctgctctgggcgtccccagccgaagttcccttaggttcctcagaggccttgtcaagacggcgtaaagggacatgaggataggtttcaacgctaggtgtcatctgggtaagggatcatcgggaatgaacactttgattgtagtatgtacctgaaaataggctttactgaagctgtaagatgtcttacaagtatggatactattgacttatacatagaatttacgtaattgatcaatgttccaggaattagccaactcacgaccatcgccgtttgcaattttgaatgcgcctggccgcagaacttgtgtgatcgtgtacggtccttcctatttgggtgagagcttgttccgccctgcttgactttgaacccgtcggaggacgtagtcgccgatcgaaagtgtgcgtgctcagatgcgtttctcgtggtagcggcgaagggcctgttggtagctggctgctcgaacggcgactcgttcgcgatgttcctcgagtagattcacatcgtcgtttcgctgctcctcctgattctcattggagtacttctgtgctcgtgcgctttgatatcgtagctcggtggggagcatggcctctgagccgtacacgttgttggtgtggtacgcacggcccatagtactgatggaagttcttcgacccacttcttgtcatgtgacatgagcctgtcgtagacgcgggtcttgattccctgtagtactatgttgtttgccctcttgacttgtccgttgctctgagggtgagaaaccgaggcgaagcagatcttgactcccagcctgatgcagtaatcctggaaatcggcattgatgaactgggagccgttgtccgttataatatggtggggcaatccgaatctgcagaatatccctttgatgaatttgattgcgttgtcggccttgatttcccctgtaggtgtcgcttcaatccacttagtgaatttgtcaatcgccacgaataggaacctgtagccgctctgtcgaatcatgtcgacttcacaccgctgaaccatgtcgcaggcgtctttgagggcggttggctagaagaacccctgtcgaaaagcttttccaactaatgtccgaccggcggtatgtgacctacagatcccttcgtgtatgtcgaggaggagatgtctgccgttgtccgacgagacacattttaggagtaccccgtttggtgcgttcttgtacagatcgttacctattatacagtagacttttgctttacgggatattttctcggcttctgcatcgtcctcgggcaactcttcgctgtgtatgaatttgatgagtggggtgcgccagtcgtctgtggtctcgatatcggcaacggcgcgctctatctatgtagcccccgagctgttgttgagggagatcgggctatcttcgtcgcttgcgtctttcactaatggccttgtcaggacgtccagaaaggtgccaggttcgagtggctctcgtctggatgcacgccgtgctagatcatctggttcgatgttgtccttgcggtatacatgtcggacctcgatcccatcgaaccttttttccagcttcttgacttctgcgagatacttggataactcggggctagagcacttgtaatctttatgcaccttgttcacgactagttcagaatcccctttcatgatcagttgcctgactccgagtgcagctgcagctcttatcccggcgagtagtccttcgtactcggctgtgttattagtcgccctgaagttgaggtgaattgcatgcttgaattgatctcccaaaggtgatgtcaagatgaatgctgcccctactccttggctgttgtgtgcaccgtcgaacgccattgtccacgtttcgttgtcgatttggttgtctgacttattatcaggcatagtccaatcggctacgaagtcggcaagtacctgggacttgatggctgttcgtggcacaaagcggacatcaaattggcttagctcgactacccatttcgcaatgcggccgacaacgtctttgtttctcactacttcaccgagagggaaggaggatagaactatgaccctatgggcttaaaagtagtggcgtagctttcttgatgtcattattaccgcgtagagcagtttttggatctgtgaatatcttgtctttgcgtcgtggagagcttcgctgacatagtagactggtcgttgcaccttctctctcttgacaacaatgacagtgctaacggaatatggcgtggtggcaatatatagaaataattcttcattaggttagggggcaacaagtacaggtggatttgataggtagcgcttgagtgcaatgaatgcctcttcggcttcctgtgtccatacaaatttgtcttgcttcttcagcagggcaaagaaaggtggtcctcgctctctcatcctagcgacgaacctgcttagtgccaccatgcatccggttagcttctgtacttccttgagtcttgtaggcgacttcatgttctcgattgccttgatcttctcgagatttgcttctatttctctgccagagacgaggaaactgagcagcttgcccgatggtactccgaacgtgcacttctctggattgagcatgaggcggtatcgtcggaggttgtcgaacatttcccgcagattgtcaatcaatgagtcggttgtcttggtcttgacaacaatgtcgtcgacgtaggcctcgacattgtttccgagttggtcactgagtacgccctggaccgtgcgctggaaagtgtttcctgcggttattagtccgaacggcatcttaacgtagcagaataccccgaacggcgtgatgaatgctgtcttctcctcgtcctctttcgccatgctgatttggtggtagccggagtacgcgtcaagaaagctcaacaactcacaaccggctgttgagtccatcggttggtctattcgaggaagagggaagtgatccttgggacacgccttgttgaggtcggtgaaatcgacacacattctccatttcccgttggccttccgcaccatgactgggttggctagccactctagatggagtacctctctgatgaaaccagctttgagaagcttgtcgagctcttcttgtatggcttgttttcgatctggtgcaaatctccgcagtttttgctttactggcttggcatcaagtcgcaccatgagtttgtgctcaatcacctccctgggtacccccggcatgtcggatggctgccaagcgaacacgtcagcattgtcgcggaggaaggtgatgagcgcgagttcctatttctcacctagtgatgccccgatcttgacggtcttgtcggggttggcactggagagtggaacaatcttgattgcgccgtccgatttcggcgtcttgtttgttttgctcactttcttgggtggctcagctgtggcgggtgggctgggcgtgtgctcgaccatgtcgaggctccgcttgtcgcattgcactgccagcttagcattcccttgaatagtgattgttcccttcagtcccggcatcttaagcacttgatatgcgtagtgagatgcggccatgaacttcgggagtgcagttctcccaatgatagcattgtatgttgtatcgaattcagcgacatcaatggtgatctgctctgttcggaagttatttgcttggccgaaagtcacaggcaacataattttgcccaatggtttggacgatgactgaggagtgattccatgaaagggttgatcggtgggtgtcaactcgcttcttgggatccccaccgcgtccaaggtgctggcgaagagaaggttgattgagctgccgccgtcgatcagaacttgcgcaaccttgatattccgaatagtgggttcgaccacgatcggatatcgccctgggatgacagcagtcttggggtggtcctcttctgagaattctatcttctgctcagaccacttcattttgggcacagctccttgccacgtcgaacaaacttcccgttccactttcttgtattctcgctttgaggagtatgccgtggaacctccaaagatgtacgagacatggagatcagagtctgggtatgctgagtccgattcctgagcagttgcctcagcgtccttctcgaccacgcgtactcgcttgcctttttccaatgccatgtgttttgcgagcgactttttgaagacgaggcaatcttctagagagtgtatgtccgacttgtgtatagggcaccatgttttctttgtgtcgctgccttatgggtctgggcgcttgggagggtccgcgtattctgttgcgagaacttccgcttgagctttccttttcccactcttgcgatttttcttcttgcttgactcaggtgcgtccttggctggtttcttatctcctccggtcttcggtttgtcgttcttgtgcctcagtgcgtcgtccgcatgagcacattgtcgaaactagatttcggcaataataaaagggggtggctatcaagctaggaaagtgtatgggtttggagacaaaggatttatacaggttcaggccttcttataaaagaagtaataccctactcctgtccggggatgaatccgccgggtgtattattgattgtatgattcaggagaaatcagcatatgcccctagaggcgcccggaccccccttatatatggaaaggagtccgggttacaaaagataatctatatccctaacggaatatgaaaatataggtaagatacagtcgtaaccgactaagtttcagggtgtttccttgatacacaagttaagaaacaaacccaagatacaaataagatattctatctacattaggtatcctgtacctagttcgaataccatcgccgtgtagatatgggatacccatgatctccacagtagcccccgagtcctttgcagtcgaccatcgtagccttctcaaagatgataatccgagtacttcaaactcttcaagccaaaacctgccgagtggactgtaaagggcgaaaagataaagaatatggtgcatcgaatagatgcacctaattaggtgtagcccccaactatgtgattagttaacaaactaaacatatagttgaaagacaaaataataacacaattgtgcattatatgacaaaagcatacgcggcgcctaaataggcatgctagccgactgctttttagccacaataaaagaaatccgagtggtttacactctaaaaggttcacgaatgaacacactcgacaggcatccgaatataaaaactctaaagattacccatcaagtattataaagattatggtaataaataagtcgaatagcctaggccatgactatttaccatgaaaacaggcatataacacgccaaggaaatgactataataaaaacaagtcatccctagttaacccaaacagcttttgtagcctaaaaaagcttgcaaaaacagcataacgcctttctgtcgggcacctttttaatttgcattgcaataattccaaagaattatatgaccgcataaaaaggatttcatcagcattgggcaacactgttgtgcgcataatattgccaaagcaaaatatgcctaagtccctaaggaacacaatgggccacgctgttaaaagtattgggctgaagtactgttcaggcctaggcccattagcacctccgatacccttaactgaaaaaatccgatatccaagcgacgcttcgtcttccccgccggaactctcgccattttccccactccctgctacagtgtaaagctgcgccggcgaactagggttctcaactccggccaaatccacctccgaaaagtgcatcaaaatccttcccgtgatccaccgcctcaatccctcacctctcccaagccatccctcaaatcaaatcaacacatttgagtgaaaccaatggcggaagagagagaaagcttcgaaggtcaatgggcgccatccgacgtaacggaagagaacttgaaggagatggtggcgcacggcgttctcccagccaaggagatcatcgggtggcggccagcgagcggtgagacttttccgacccctgatacacatgagatcgtagtcttctcgcatttcttctatggcggcttcgctcttccgacctcgaaatttttccgcgggatcctgaatttctacggaatcagcttacatcacctaaacccgaattccatagtgcatatcgccaacttcgtccatgtttgtgaagcctttttggggatcaaacctcactttgccctattccgccggatcttcttcctcaaaccccaaccaaacaagaacaaaccgtgtgtagtcgggggggcaggattccaactaaggggaactctgagtcaaaaatatttctcgatgcccttcaagacttcgaacaaaggatggcatgcaaactggttctatgttcagaatcccgagcctgctcttcccgggtactcttgtcttcctccagtgtaccaagatacttggaattctcttccgatcggagatgaagcagtacaagccttggagttgttggatcgtatgttaaatcttaaagaacaaggcttacagggagagcagatcactcggcacttcattaaatgccgactggcgccaatcaaggaaagatcccgcacagcattcgagttcgacggcaaacatgatcccaaccgtgaagaaccagactccctggatttcaaaatcatgaaggagaggatgtataaaatcttctcaaatgcaattgtagtcagctactctcatcaactgccagtcgtgccatataatgcattcaatccgcctccacaggtatgcatcggaaatcctcaaaccgtgatcagaacatagttttatcttcacgctgagttgactaactatggaagcatcttgtccaggaatatgcattgatgaagtcagatccaccagtctctcagcgccggtctcctcgccaacacaccgctcagggaggcggagggccaacgatcagaccagatccgcaacctcagacctccaaattggctgatcaaacaggtcctcgtaaaagaaagctggtacttgatgatgatgaaggcgacgatgataaatctggggataagggctcgcctaataaacccccaaagcgtaccatgcccaggaaaaaactggctggccgtgcgataccaaagatcagaacatcctccaggtattagacctctcgatatgattccgcttcggcatgtttttctcatgaaaatgatactgaatactgaaagaacactctgcaggaaaccatctgatatagatccatctggaaaagaccctgatccggctatgacagagcaaaatatatccaaggaccccgagccgactaatgaaaaccagccgactgctgaaagccagccgactggcgcccatgcttcaggagatagggccaatccgagtgacctgccgccgactggaaaccagtcggcaacgactgaaacggcaacaactcaagagcccccgactggaaaccagtcggacgcaggccctgatccagagattcccgaagtagaagcgcagacgacgacttcgcaaggaccagaggttggtaacgactcgatagctgggtcttcaggtaaagaacaaagatctcctcacgctcagctaggtacatcttcaggttagttgtcttctcaaacaatggcgatttaaataacctcagtttatccgtctaatatcttggaaacacaccaggaccatcagatgatgacggggaagaaattcctcgcataaaggcgaccgacgactctcgtcctcctatcttgatcaaatggtgggatgagaactcacaagccgccggtatagtcataaaccgtcaaaaagaagatgaagaagtgtgccagctaaagaaagcgcttggagaagccactcgtattgtaaatgtaagtcttccgggtgacagccttcgataactttgttctctttttagcagaaactaaaccatgatccatcatgcagagaatccatcttcgcaatgaggccaagactacaactttggaaaagctggttcctcatttgggaactctagaagcagtcagggaccagctgcatgaggccaaggagtgcgccaaaaagacagaaaaagagttaagggaccgaatcgcccagctccaggatgcaaacttcgaactaagtggttcttcaaaaggtaatcatcccgatctgttccattgatttatgctgtcataattgcatcctcaaccatctggatttcaaacagcgcaagccgccaggatggaacagatggcgaggcaaattgaagccctggagagagacaagacagaactggctgcgcaaagggactcagccttgaaggaagtcgaaggtagcgccagctaacagtctgagcttctctccttataatgcaacagatgctcatcatgaatgtgttttgtagatcgcaagatcaaatctcaagctcagtttgacgtcctggttggtaagatcaagaggcttgaaggagcaagggatgacgtcgccaacgccgctgcaccaattatccaagccatgttcctcaataatggtggtccgagtgcactcgacgcaaccgaaatatttgacaagctgagtgttgctccggaagtatatttcaagaatatcaagaaagctggaagtatgggagctggcatggccttggcgatgacaaaatccttgtacccgagaattgaagtcgacaccattgatggatttgcagacgggacaagtgaagaagctgcccttgatcttatcagcagtgcgcaaaatgcggccgacaaaattgcgagcgatgttgtagagcaatttcgcaacaacgacctccagccgagtaatgaagactctgatgatgaaagaactgattctgactgatcatgaatgtaatgtatggaggctcaatttgtacaatactggtgtatttatgctgtgcttgatgattcttgcaaagtttttgatttcttaaaagtttttgctaagctttgttgagcctaaaacccaaagaagctattaaaaaccttcagtcctcgcaaactaagtagaaaaaccaaacaaggcaatgataaaccaagtaagcaaactgaattgataaaaaatcacactccattattatgatgatagcccccgactgacaacttcaaggagaaaacttgacgtttgacagtcaaaatagggaaatacaatgataaggttaagcgtagatggatccggggatgaatccgccgagtgtattattgattgtatgattcaggagaaatcagcatatgcccctagaggcgcccggaccccccttatatatggaaaggagtccgggttacaaaagataatctatatccctaacggaatatgaaaatataggtaagatacagtcgtaaccgactaagtttcagggtgtttccttgatacacaagttaagaaacaaacccaagatacaaataagatattctatctacattaggtatcctgtacctagttcgaataccatcgccgtgtagatatgggatacccatgatctccacacacatcgatcgacaatttcgaataatctccgagtagtcgtgatacgcctcgttgccaactcctgggtagtatagcaatctctcacaccggacttgaaggcgcggattacagaagcgtcggtgatttcggggattgtatttctgcactcattaaagcgccgaacataatccctcaaggattcattcgggttctgtgtcaacgcatgtaagttgtcttcgatcgcgtggcgcttgtaagttccttggaagttggcgacgaacttctaccacaggtctgcccacgaagaaatcgagtagggagagatgcatcagccatgaacgcgtggagcctttcaatgcggttggcaagtaattcgccaacacgttgtcgtcctctccggcagcgtagagtaccgtggagtaaacctgaaggaattcttgtgggtcagtactcccatcgtacttctctattgctcctggtcagaatctctcaggccatcggacatcacgtagcgaacggctgaaagctctacacccagcgctgggggtggtgggttgtcggtgatcgtacgtccttcgtggatgtctatctgatgatgaggatgaggaagatgacgacgatgatgatgggtcacttgattccggtgtacgattacgaggacatcggccgggttatcgagaatcctgttgtcgtctcccgttgttgtctcagcgccgatctccatcgtcgtcgtcattatggcgacgtcctcgaccagtatcgcccagcacccgcggttcgcgatcgtcgtgatcgtggcggttgtggcggttatcacgatctcggtcttcgctcgaacggcctcctcgttcttcgttatcgtgacgccgtgaagagacgcgatgtcgggaacggttcttgttgtctcatgcgcgtcgcgcctctcggcggccatttaggtgatcgcggagatcgccggtgccacgaggtggaggggtggctcgatgaggcgattcccgctgttcagggttttcaccattagcaccgccagttggtggctgttctaggtgcgctgcagcagcagcctcttcgaacgcgttgctgaggttggtcactgattcccgtaaccgttctgtccatcgtgcgagatcgtcgttcagaacgggatcgtaaggggtttccctcagtattgcgttgacggccctgatgtgctgggctggtgtagtcacttgattctccgcttccgcattagtgcgcgctgatgtgccggtctcatcgatagccaatacctcgcgcggcgtacttgttgatgatgagccatagtcttcgagcaggtgcaagactgatggttcgtggggatcgatgtcgattaccccaaggaatcgatctgaaatcaacgtcgctccttgttccttgtcctcatccttgagggggatctgtgactgctggaccttaggaggtgacgtcttcatggcgctgagaaagaccttgcaggttgagaggtcgtgattctttatcttgtgaataggacaatagacatcacgggttgaagaagtacgctgaattccacgctctttgtaggcacgaatttcagtgtggacgttgagaaaaacccagcaggcttgcaaggtgtgttttctggttttgtggataggacaccaggaccttgacctcggaagtcatcctcgtcggctcgtgattcttgtcggaaagacaaggtttggccgcactaggatccttctcgggctcggatgtcgtcgacgttccgttctccgcttcagcgggaggatccttcgacatggagtcatcctgggttgtagctattgtgttctcgcttccgatcattgatggaccagccgagatcggcaccgtggtgtaaaccgggaagacgatttcgttgacttgaatccacaccagcattgttgaagtaggaactccttggttgaggttggtgttgacgctgttgtcgacgaagctggttgtcatagtagtagaatcttgaacaccaagtccccctacctggcacgccactgtcgacgggggatacccgtagactggatatagagggtattggggtacgctagtacgaagatctacgtaatacgacatcaagcagacagaaaacaaagattatactggtttaggccccttaataggtaatagccctaatccagttgatatgggattatatgatgtaaaccacatattacgaagggaaaagcggaactcgatgataccgacgagatcgtagtcgagttgattcgactagatcacccggcgacttggctcctgtaggctccggcttcgtaggctgtggtggttgtcttggctatgagattcaatgccttaggtcctcccggggggtcccttttatatcgcaagtcgactggtctccaagtaggactcggagacatcggacccggcacggtacaatgatgacccagttctgtctaagtatgactccttccatccgtgaactccatgatgaattcctttaacgtatgccaaaaacgtccgtatacgcgtgtcacgcccggaatttctatccaaaattccaaacgcttacatgtgtgtgaaccctcgtccaggaatcagccgaggcacacaataacaaattgataatagagtacaaatattactctaattaataagcgaataaaatgtcattacagaggtagatagttcctctcaatcaataaagatctaagcagcggaaaataaataaacggcgcagacggctccactccacaggcagcttgaccaaggctacacctattcctccactccatcagcctcattgtagaactcttcctctgatgaatgattgcaaggtgagtatatgacatactcagcaagccacgcagcaaatatgcaagtgcacaagataacaaaggatggcataatagggtttcatttgcaaaagcagcatttagcaaacatttgagaatttaataaaacagttaagtaattaaacaatattaatccaacgctatacaacataccctgttgtataggcccaaccattctgaacaaccaccccgtctgcacagttctatctccaaaccaggaatattccattccaaaccaggagctaatcaaattattaccaatttaatcatcatttactatggtgagaagtgtgaaactaatcacgaaagacattgttagacccgcccataaccgctggcacggctattcgaatagttttactctgatcagaggtgtaccactgtacccacaagacacaaccccacatcatgtcaccatgtgcctcaataccaccacggtatctcggaaaggagttgtgacaatacccctcgcataacacaatccactgcagcgcaccttcctggatcataatcacccccttataaacaaggcatggactccccagcgacccccgtgggcttatctccgccacttctcagtctggtgccccgcaatgaaccatgctatacaaaagataaagccgttgcccatgctggcttgtggttggcacggttaatgtttcacaaccgaaactcgtgaaccggtccttaattgtcatgagcacgaccaacaaaaccatgtgctcacaacccaccattaccaggttttagttggcacattaattaattaactaatcacgattgaccatcgtgaactatcatgaaaccatcattaaataatagtgagtcattagttatcccgaatgtgtactaatgtttctaaacagggctaagcaattatatctaatatctagttgaaccaatataaataaagctcaactagtcaaattgtaataacccaaggtatcaaggaataaggtaatcaagtacaaaagggccataacaaagaataggtcaattccacccaatgacattcgaaaatagatgcaatagttgaatagaaacaatagctttaaataggatcaacatgctcaaagggttgtttgggatctgtgtgacttgccttgctggccttggaactcttcaaactcttcttctgcgaaaacggactctccggaaacgacggaatctaagcagaaaagagcaaaatcaccaaaacagcacataaacaagcatgaacagtacatgtggatatttttaaagtgtaaatctcaatcttagaaaaatttagagacttgaaccaactaaatcggagctaagatgaattagttatgaatttttaaagattaaatcggattaaaacacttatatcggttaaaattgaattatgacgcaataatgaattatttttgaaaaggaaaagagggtttattgcgtcagcgggctagggtttggtgaaccgggcgcacgggcggcggttcacacgaacggacggccgagatcgaaccaatccaaaacggacggccgagatcgatcgggtccacggcggctcacggcggacgaccccgatgacgtcagcggtgacgtcaccgacagcggcggctcggcggaggagacggctcgaacggcgcacgctcgccggcgaacggcggcgcgaggacgcaaacggagggcaccaagacgaagcgggcggcacggcgaactcaccggcgaccaaaacgacggcggaaggtcaacggacggcgacggcgacgaggaggaagcggcgaagctcttcggcttgacgacggcgacgaagctccgacgatctccggcgacggcgaaggggcagacgaggacggcgacgacttggcgagcacgacggtggtcttcccgagcgacggcgacggctgaaacgacggcggcgcacggctggagcggcggcggcgacggcaaagctagggcacacggcgctagggcttttccgacgacgagaggcgaaggcgaaggtggcgacgggtagaggagacaccggggatccttttaaaggggctaggaggcgacgacgaaggcccatggcggcggcaacggcgaaggaaagctcggcttggagagagggaaaccgatccgaaacgaactcgattccacgaacttccaaaacgatttagccaaagattccaaaggagaaaaggtagaggagatcccggagattgtttcccctctatcaattcggccggagaaggaaaggagcggccggattggaaagcggcggcggcgacgcgaaactagggtttcggccggaggaggacgacgaacccgacaggtgggccccacctgtcagcgggcggacgcgcgcgcgcgcggtggcggactgggccggctgggccgaagagagagaagagaggttttgggccgacgccaaaagaagacttttaaaacctttttcaatttaaattatttcttaaatgcaattccatttattaaaatacttccttagctcaaataaatcccagaaaaatctaggaattatagaattaagcaaagtatttaatgaaattttatctggccactttttatattggcatttattaattaaaactagatcttctcttcaagacttttaaaattatttctaaaaattccaattaaacaacaatttatatattttgaattttcagggtgtgacagcgcgcaagtataccatatcgatatgtgacgtatgtcgaagggtaaagggtataccttacccgtaaccttgacaccagctctgagtaaggtcagaatcatgacaaaattttgaggacagaggctgtgtttagttccttccaaagttggaagtttgggttaaaattggtacgatgtgactgaaaagttgtgtgtgtatgacaggttgatgtgatagaaaaagttggaagtttggatctaaacacagccagaggtgagcgtggtgcgaggagtgagaatttgaagattttttttatattccttattgttggtcataaagtaaaagatagccttaagcttaataaggtcgattcaaacgtacatgtctcacggtgtataatggggctacaaagtgatatttaataaatggtctaaaaaatcaatacttaatctaaaactggacacactttttattttaaaaaaggacttgtcacattggactaaaaaaccggttaaaatatcgcaaaacaatataagttggttttgataaattttcacatttaacaaataatatgttaagttactttttacatacgttctctatcctaaaacaaactaagattatggaatgtgaataaaccaatttagtatgggatataatattttgaaacgtaaaggtatatcgttgagacgaatgcgaagtcacattagcataggcttgagagcacaagatctaggtagagggctatgaaagaattgtacaggatatagccatataggtagtggtgacaatagtggatgggagactttgactggagtgaggaattgttacagaatataatctcttctcacctttgaaccttttgtcagttcctcgacggttagttgatctaagtgaaagtttaagaaaagtataggtgaaagaaattcaataaagagaggaaaaatggggatagacagagaaagtgtcaaatgtactagataccgcactcaaatatgtggcaaacttaccattacaatcaactactcctatatgacaaacacattgtattatataatagcaactttactataccaaattttgtagtttcccaaactttgtactaccaattttttttagaaacaaaacacaaacgctctagactggaagactagaccgacatactgagattaatgaattcaccatgaacaccttactgttgacgggtacatcgtttatcaataaaaaataattagccataaataaaagtaccagtgtgaaatctagaacttgaactcggttggattggttacaccataagaaaactaattagttaaactacactcacttcgcttcgcttgtactactaaaatttgatagagcatgaaaccaaatggctaaattccacatcatccatccgctgatttcacattttaagtttgtaatgatttgtcacgttttctatgtcacgatcagctcagctggataagcctgattaaacgcaaataatgggacttccactaacgtcaccaaacagatcaattcataatatatgagagggccttccctaggcccaagatctggaacacaaattatactacaatctctccgtgaatgaatgaaataatgatacgagtgtctcctagtgcctctccaacccaactagccaagtgacccagcagcgtcgcgcagatgttctgagctcaccgatgtacgatcggatcgagccagcagcagtgccggatcaatggccaggggaaaaaagatcagctgattattggttcgtacatattcacacttattcagtctttactgatggatttgattcaactaaatttatggtataaatctgatatttatttttaattctagccactgcattctttcttcctatattttctttttatttttgcatcagaggacagcaacaatcaaacattattgatcctgtatgtactcggcattaacttggactatactgaattatcacaaaaaaggaagatctgatcatggccaactatagcaaagtgcctaagatcagatcctgatcgatgggagaccaacacaaaagtatacaacaatagaacacacaactgaatctacagggtcaactaagtaattcaccggacacaaatcatcacatattgacacacaagaacatctcactaggagcagagatcaaacttggagaggcacagaaacaaagcttctcacttcctcagaagcccttcccatggtgaagatacctggccttgttaccagccagcaatggcctggagagcaccgggagcccccactgcgacgcgaagatgatggtcgggcagatgtcggtggcgccctccatcgtcgtcgccccggcacggcggatcttggaggagagctccgccaccaccttccttggcaggaggaccgaggtgatcctgctccatttcagctttttgacatggaaga

SEQ ID NO: 5639 - DNA, 20509 bp, Oryza sativa
cgtagacgcccaacagcggtggtgtgactaaaccagccgtgtaggcgaaggcaccactcgccggcgacggaggcaggccggcggcgaagtcgtagacgcccaacagcggcggcataatagaccagccgtgtaggcggaggacaccactcggcggcgacggaggcaggccggcggtgaagtcgtagacgcccaacagcggcggcataataggccagccgtgtaggcggaggcaccactcggcggcgacggaggcaggccggcggtgaagtcgtagacgcccaacagcggcggcataataggccagccgtgtaggcggaggcaccactcggcggcgacggaggcaggccggcggtgaagtcgtagacgcccaacagcggcggcataataggccagccgtgtaggcggaggcaccactcggcggcgacggaggcaggccggcggtgaagtcgtagacgcccaacagcggcggcataataggccagccgtgtaggcggaggcaccaatcggcggcgacggaggcaggccggcggtgaagtggtagacgcccaacagcggcggcataataggccagccgtgtaggcgaggacaccagtcggcggcaacggaggcaggccggcggtgaagtcgtagacgcccaacagcggcggcataataggccagccgtgtaggcggaggcaccaatcggcggcgacggaggcaggccggcggtgaagacgtagacgcccaacaacggtggtgtgaccaaccaaccatataggcgaagacaccagtcggcggcgacggaggcaagccggcggtgaagtcgtagacgcccaacagcggcggcataataggccagccgtgtaggcggaggcaccactcggcggcgacggaggcaagccggcggtgaagtcgtagacgcccaacagcggcggcataataggccagccatgtagacggaggcaccaatcggcggcgacggaggcaggccggcggtgaagacgtagacgcccaacaacggtggtgtgaccaaccaaccatacaggcgaagacaccagtcggcggcgacggaggcaggccggcggtgaagtcgtagacgcccaacagcggcggcataataggccagccgtgtagacggaggcaccaatcggcggcgacggaggcaggccggcggtgaagtcgttgttgttatcagcaatggcggtggcgaagacaagccggcagagtggactcgcggccgatcgaccggaaagctgagacgcctcgagtccatgaccagcatcaatcgcctcaatagtgccgcgtaattatatgcgaacaacaacaaaaaatagcaagagattaatctgagattaaaaatcaatatgataaataatgataaaaatcagattgagtttccccctgactgatttggatcaagtcagagaagaggagcttgaagaagtggtcgacgggaaggaagtgaaaactcccaaagcgaaaacgaagtcggcgactcatgaaattgattccatcgcgctcgttgataggaaactcgacgcaacccctacctggcgcgccaactatcgaaacatgatttcggcaataataaaagggggtagcgcacgagacctaaaagtggatggatgcagagacaaaggatttagacaggttcaggccctctcaatgagaggtaataccctactcctgtttggggatttgaatccgccgagtgtgtattgatctgacgatcaggttgtgtcatgcccctagagggggctccctgccctccttatataggttggggggcagggttacaagatagaaaccttaaccaatacggtatcggtttcctaaatctactttacaatcttatcaaaccaggactttaggccgttccataatatacagggaaacgtaatacccaagtcatgatctgttacatattccatagatataagttatcccctatgactagtcggataaccatgccgtatgggtatggggtacccataatatccacactgatattgtcgaggctcgcaattcatgttgattcggaattccattggtcgtcttgatcgtgaaagtatgaatatatatgttccatttttttaaaatgtctgccattgcggagactatccattgattctaaattcaattggccggattgattgttaaaataattttcccactcttcctgtctagtatgatctatcatctttcttcagaaaaaaaaggatcaattcttcataaagtttttatttacatcgaataggaattagtgctactttgatcatgtgtcaatcacatgacatgactttgtttcatttaagttatctgtggattttatagatatatagtaattcctctaaactaacaagaatacggtcaagcatgcatgttaatagccattttgaaacttttctctgtttgtcacatatatatggttcaaacttatttaattatgtaattttgcatttgtatattcatgaaatgaaagttacctactggactactagttcagatatggctttcattgttgttgtgtgataagcatggtttgcaatttcattaattctttttttaaaaaaaaatgaagaaattttgattaaattcacaaaaaaaggaaatttttgaaaatttcagccaaaattgtgtcgtgccactggaggggaggcattctgttgacggtccttaagtaccaaatccgaccgtcaattcatgcataaaaacaaatgaaagaatataaagtggaataccaaacttagaggtagtggttattactaactattttcacaaatcttggtgaatatttgtatgcaggtgaattatggacgaaaaccatccgccatacgacgaaatacacctccggatagtcggacacgaatacacaaattagaggacccacatgtcaatcaaaaccaccaacaattgaacccaaccaagatacaatatgcaaagggcccaccaggcagccccccagtagaagggaggtcaagaggtgggccaaaggagtcggttgaaccactaggtcggccgaactgcctttccttcctctcgccatctgctgatatgtggagcaagatcctaaagtcccaatggaagttatgtgtggttcccaaatgttggttttctgtctgggatgttctacagatgttggcctatcttcaagagagtcctggaggagcgccggagttgttggccctctctcctcgtttgtacctcggctgatgcttcttcaatataagtaagtatttgagattcccttctggtatttaattaacttacttaagtgagatgtattgtcatcgttgtgggttcgtcgcttaatatttatattgagtgctctaatactaagactctggataaagaagaaatttttttggccgaggctagagtagtaatcgataacgtagacgtggtgtttaggttagaggttgccttcgtttgttgtgtgctccatagaaagtgaggtaggcgacaggtggtgacagttcagtccgtccttcgtatccctccacgtatgggtacatcatagagctacaggtcgaactcagctggatagacatagctgggagagctggtatccgaagcaatcgatagagttttacctttaacttaagtatactccctccgccccaaaatttaagcatttttggattctgaaacggtctccgagatgctactttgaccaacaatatctataaaagtaagatattttaaataaaaagagttatatattatgatagtttttttaatgataaatctagtaacatcaattttgcacgattgatcttttttattttcttgttattactccctccattccataatacaaggcataactactttttaaagttgtttcataatataaggcgtgcatgcatgcatgtcattaactagcacatattttccattcaaatattattatttaaattctccaccatcaagatctctaattttattgggtgcatgtattatatttattagggtaatccaaactatgaggtgataataattatttcttggtctttgggttaagagtggttgtgccttatattttgaaatggaggaagtaatagtcaaagttgaaaatatttgacttctcactattctaaaaatgcttatattttgggacggagagagtagttaattaactcataggaatcctctagcctaagcctaccatttattgttgtccttagttgaatcctttttctagatgtacatacatatttcttgtgatttgatatccttaaaatactccaaagtgaagttctataatagtatccgtgcaattgcggacttatctgtgaccataacaaataccagcacgctccgacattgctagtgagtaatcccactacccacacaaaaccccgctgctagtttcatttcctatatggtagtataaattttcgaagagaaaatgaactagaagtgagataagcgggtaaaaaaatcatgcttgcccatcctacttgcatccctaaccccaagatactcgagctccatagattaatcactctcagcaaattgatcatgagttgataattagcagggttacaataatatgatataaatcttgcttagcacaacctttagtgaagcagatattgtatttaagttcaaatcatgtagattttagctctaggctagctgctctgtgcaattgcacaattgatgtgtgcatataccttcaataattccatatcttagtgctactttatcaaattgtgttgaattggtgtccattaatttctgatcaaacaaattggtatccacttaaaagaataaaggcacactatttctccaaataaaatggaaacaaatttattaaaagaagactggccggctggggtctaaagaggttaggcaacaccttcaaagtgaagaaattactaccatgtttcacataagtggctagtccttttcacataccattttactttgcaaagtagtgtaaaaagttcacttttcaatgtaaggtaaaacagagtagctttcactagcttaaaaagattaattttgtccttgctttcggttaagttccaatgattagcgtggaaaacacacgagttagagacatgcacaatttatataatatatatggtggtatagcttttttttagtgctctattgcttaaaaaaaatcaaagtataaatatgttttatgatcttacaatagtgaactgattttgaaaaatatgcacggatcttataaagtgatcaagattatagtggcgtgtttaggtgaaaagggagtcttacttgtgtggttctcccggattcttcacacagatttcttcgactgataaaatcataacccatgccaaaaccatgcatatatttatgtgaattataatataatagtactttttaatacatgtaatgagtggactgcaagcaggatagcatgcaaatttatcacaaccagacaagatggaagaactgactgtatatttgtcttccataaacattgtcatttgccaatcaatcatcacctcctctggctgtatactccatgtgttgccaaacacagatttcttgcagaatctctgagtgttttcagggccagatgtaaggagcagagaggaactacaattcagagccaaatcacacaatattttgagacctgaaaactggggccttggctacccaatgagggagcaaaacgacagctcagcaatcaccatgaagcagttggcagcctctgattgggctgctccttgcttacctgtcccttagtagaaccccactatacctgtttctgtttgttcttcctgttgacagcttacttacaactgaagcacaaaggcaccaccatcattcacacccagcacacagcaaatgcatgaccccatgttttcagttgtgcagaattcatgcccaggttgtagtggcctttcagaaactgaaaccagttgagagtgggagccaatgcaatcatgaggatcgcgccaattttgcgcaatattcgcagtatttacctagtaaaattctctgaaaattaatcttgatatagtgttccgttcaaagaggtggatcaaatcctgaacaattttgttcggttcaataactcacgctgtttgcgcaaatattattcggcttatattttcttaactagtatcacaatatatcactattaaatttatattgcagattcagaaaggaaagaataatcaaattatgaaccaaaaaggtagcccagcacaaggaacacaagtacatcttcctttcctccctggtgtccctcctgcagtttccttttgcttagcacaggggggataaaacttttactgctgacaatggccggccacagcaaaagcctcttcatctgtggggttggctgatagctatcctgccctactacatacctttccatgtctaatatctgaagtcggttgagaggtgaattcagcagaaaggggttgttgcagggggcaaggtatctcaggggaaacttcttgcagcaaactgcacacggtttggcttagctgtgctgccacattttctcactggctgcaagcagcttagctagcttgtactcactactcccctatctatatatacaggcaccaactcttgtaaggttcagagttcaggtccattccaaagttgcaatcaatctgtctcgattattgcctctctgctctgagtgtgactgtcaatctgtgagcttagctagtgactggccattgcacgagaaaagaacaggttgatcgatcattagtaggtgaagtgttcttgccctgttcttttcttggtttcttgggtaaaccaactggttgggttcggtgagtttgagaacttcagaaactgtaacaacaatgggaggcaccatggattacctgtctgatcttctcggcggcggcgggagcagcagccgtcggaggtacaagaagaggaagcagttccagacggtggagctcaaggtgaggatggactgcgacggctgcgagctcaaagtcaggaacgccctctccagcatgaaaggtataaacacaaccaagatctctctcaactctcactagaaagatcaatttctacagttcttggaatcatttcattcatggctgaactgaaatgatgccattctgtgaacaattctggttaatacgcacaaacatacgaccaaaaatatctctgaaatcatgccagaaaaatcaaatttctactgcatgaaaggtataaacacaatcaaacacaccaccaaaatctccctgaattcatgccacaaacatcaatttctacagttcttggaaccattcatcatgcatggccgaactgaaatgatggcattacttaatctctgtgaaatgattttggttaatacacacaaacatacgaccaaaatctctctgaattcatgccagaaagttcagtttctacagttcttggaatcattcatgcatggctgcaatgatgtcgctacttaatatctgtgaagaatccttgttaatacaaacaaacatacgaccaaaatctctctgaattcatgccagaagcatcaaatttctgcagttcttggaacaattcatcgatcatgcatgactgacaactgaattcttgtttggatttggatggatgcaggggtgcagtcggtggagataaacaggaagcagtacaaggtgacggtgcaggggttcgtggagccgcacaaggtggtgaagcgggtgcaggcgacggggaagaaggcggagatctggccctacgtgccctacaccctcgtcgcccacccctacgccgccccggcctacgacaagagggctccccccggccacgtccgccgcgtcgacgccgtcatgcccgtcgccagctacggctccgccgccgctgccgccgcgccggaggagcgcctcaccaccatgttcagcgacgagaaccccaacgcctgctccatcatgtgaattactgtaactgaatattagtgtaatctcttcagagttcagatgaatgtacgaaatgtatgtgcagatatgagagattgtactccctccatcccaaaatataaaagaatctagaatctggatagttgtctagattcatagtattagaaaatatcacatctagtcatagattcttatattttaagatgagagtagaaaggagggatttttctgcggttttggtctcttgtcgcatgtgcattggaatcttagcccatatagctttatttatactactccgtatatatagtttaattaggttggtagattagattacaatatacatatatatatggagttgtgtgctgttatgagacatatggttgagttaataaaatacatgatatgcttgtacttggtggtgcagctggatttcttctgtccggccattgccttttggtaatagcaattagaataagcaagttaattaaaggtacgtttgattggttggcggctacagttatcattctaaaccttagacgtgtcacgctttgttaaccggttagctcttataattatgatgatgtgccagtacttcactagttcttatgtgtacactccatttctcgccaaatcttgtcacacttgtgaccaagatagaaattgatcatcgcacatagcaacattagtccccagatttctctaggacaagagcaaacttcccgttgatttactgccactcatcccaggccgcctgtgcaaggtgcattttcagcccatccatgataagataaagggttgtctctcgggattggagccatcactgtttgtatgcatgcggggttgggggggggggaattatgatgaacaaagttgtaagtgccatcccgacatacattatcacaataatgaaacaacaaaaacaatcccttcaagaaattgacaaaacgaggcgacgcttcctatgggttggaaatgagaacatgcatggaggcaaatgcaaggtcaattggcccaaggtttgctctcctgttcattatgacggccttggattttccaatttagaaaaaaattggtagagccctatggctgaggtggctctggtatgaatgaagggcaccaaacaaaccttcaatagaaaccgaaacatcttgcgatgaactggataatgacatgtttgcagcatcaaccaaagtccttattggtgatggacgaaaggcgagcttctgggaatcaaattggattgctggccaaatcctaaaaagccaagtgccaaatctttacaggcactccaagagaaagaaccgcacagttcaggaagccatgcggcaaggaagatggatcagcgacatccgccacagcctcacgatcgcccttctcactgaattcttccacatttgggggttctagcacaagtacccccacaactgacagacggagtgcaagactcgatcgtttggcgatggacaaccaatggggagtttagtgcaaaatcctcttatcaattccaattcaacagaatggtaatctcgccatcaacaaagttgacctaggaagcgtgggccttggtaaaatgcaacgtctctagttggcttgtgctgcaaaatcggatgtggacagtcgaccaattgcaagctagggggtggccaaataattacttcggccagctatgcttatgaaacctagaaaccgtcaaccacttattgtttgaatgccgatctttaagcaaatctggtttggcgtactcatgtggttaggccaaggacatatcatctcgaggtggaacaacagtactaacctattggattgatagacacaaggaataagcaacccggaagcagcaaatcacaaagagctcaaattagtcttcttgctcattgcttgggaaatctggggggaaggaatgtgagaatctttagagggaaagaggcgtcagtgtaacaaagaatcaatcgcaggggctagccgacgcaaaacacattgagagaatgttgccgtgaggtgtaaggagagttgacttgcaagtttgtttgaactcaagtatgtacaattttccttttcttttggcctttggctgtgtatacttaaactcccttctattaataaaacgtcagttgattggctgttaaaaaaacattagtccccatatcaaataagcccttaagggcatgctcaattaatgttgactacttataatataggtcccactgaagtcatgtacaagagaggatattaaagggtattaaggtagacctcatgaacccaagactagccgttgagagatggagagaaagtcgcactattatgggagaggaaggcgtgatagattttttttattccttgtgagtggcctttatacatatggctagctcaaccaaatgtctcctatcataatgtataaggtttatttaaaaagcttaagacccccttatgtctacattgtcgctgcactaataccaactagtggcaagcacatacacttttacctccttatttccaatcatctgaacactcgtcacaactatccccaatattgggatttgttcggttaatccatttcccttagggattgaggaaggagataggaggattaattgtaaatatcaatatatgtaattgaaccccaccaaattttatagacaagggatcggtctaattctcccctctcatttcttacacggggaataatccacttttacaaaattggcggcccaaaatgatggattgcgttgtagtcttaagcttacttgtgccctaaactaagcctcttattagctctatggctgataagttgtgaaaaaggaacaaagtaacaattaattatttatgagtgaaacttttattatatatgtttttaaattaagatttaaaagataatgatgaaaaatgaactacaatgaacaaaatcgttcaaatgaactctaaattaaaatttaaaattgaaagtttagttgcgactaacaaatcagcaaacaaacagatgattaattaagctttaaactactttctccattctaaaatatataaaataactactttttaaagttgtttcataatataatacgtgtatacattaatacaattaattagcaccttatcctccctaaattatgattttctatatcctgcactcccaagatctttaattttattgggtgcatgtattgagtgcatgtattgtattagtgttgatggaaaacacatggcctgaaagatttgctttacttcagtgcatgtctaattttttagtttaaaggcgtaaacaagacagataaatagcaaaaatcagtaaacggtagtctatcggccgatagggagtattaaaaagatccggtcaaataatcacagctctacaatgctttgaaaagcagaatttcctgtctctgcatgctttaatgcagttttaaagatggataattttaagctgaaactcttttccctcgctttctctaatttctgaaagaaaacaaaaagcttttcggacgaatgttggtgtcgacacgaatagaccgtgtttcacaaagcaaaagttatttttggcgaagcttccatggaataatcaaagcatgcatcacatgcttgcacattcgactagaagtgcagaattgatactccacaattgactgccggagatgaagtcgaatgagaagctgaaacaaatacttgcgccactaactaaacctgccacgttggtatggcctctgcgacgaaaactgaataattaattactacttaattataacagaggttttagctattggcaaaacctttattacgctttttactgtactattcatttgtttaagtttgtgtcagcaaggtgcttaaaccatgcattctactcactccgtttcacaacgtaagtcattctagtatttcccatattcatattgatattaatggatctagacatatatatatatctatctagattcattaacatcaatatgaacgtgggaaatgtaagaatgacttacattgtgaaacgtatatgtctagatccattaatatcaatatgaatgtaggaaatactagaatgacttacattgtgaaaccgaggaagtaatgaataaaatggcgggttaatgtgatacgcttcccaagtttataaacggcgcggttttcgtaaaacttttataaatatggttttctttaaaagcctattttcaactttatagtagttcatttatattctaattaaggagtgaacacaaaatcatttagctattctgccattcagctacactacaattatgacaaatcttattgtctttgtattggcttatgatctactagtacaaaacatacctcatctcagaaatagggatgaaaatagagctcatacagacagaaagtgctcatactatatttatttttttacctttagccggatataagacaaatacaaatagctcggatacataaacaaataacaattatttcgacaaatatagtcagacaggaatactgaaacaaatatttctcgcaataaaaaagacctaaacttctaatagagacaaatactatcacacacaattagctcgttttacacaaaaaagtttcattgtaaactaaaaacatatcaattaacttcaacatgtacatcattatactggtacaaaatgcatgtctagtcgatattataacatataacatacaatgtaatttataaaaatatttaaaagtttaaataatattaatagcgggaactatggttgtgatatggattactattaaaatctaaagaggtaggttgaaggtctagagttagaaagaaataggttgtgttttataccttcagctgatatccgaatagcattgttcataggatatttgtattattgttcgtatccgtcggaaactccaatataatattcgtattcatatccaggaaaaaaaatattcatatgcgtatccatatccgtattatccgagaactatctactccaaactatatacgtatttgtttttgtctagagtggatgaaaactatcagctctgtttttatccctactcagaaacttattaaaacaccacaagcaaaattatctaaaagtgaaaaatggacaccttattactactatatacgcaattctcaaataacagagatggttaataggtatgcatggaagtatataagtggagtgttaagcccatacttcaaacaccttaagacatttgaaatgggccggactgcatatctagatcattggacataagacttgtattgggaatttccttctattttgcatggtgattttttattggaattttcttggatggtctgctaatatttcttattcttttcctcttctacatacattcttttacaggatttcatctctacctcatgtctacttcctctgtctcaaaataactcaatctacaatgcaacaagtctttatccatatttattgtattatgatgagccatatccattcttggttgagttattttgaaagggatagagtatgaatggcaacatagctaccaattatttaagtagagattgtgtggttgctattggaacatgacaaattgataatcattgttggcaccgctatagaaaggcaagctcctaatctatctaaaaggtggaaagaatcgtggagccaccttcctaacttgcaagctcactcttttagagcaagattctcttctttaaaaaacagatttcatgttgcactctatgacactgacatgtgggactaaagaaaagtgccgtccacgtatcggttacacttaatacatactatataccgtagaggatgtgtattatatcccaccctttcaatttgaataattagactagcgcctataatactcactcttatctagaacaagtagtggtagaatgcttaagataaaaatctaaacagtaactcactagtaaatacggagtataaaagtatcaagacatggtatatgaaaaatgacgccaacagatattttttatgaaaatactttcatctagttatactttaattataaaacatcctcaaaagaaaccgatgtcatacactcataccttgttgtattagaacatcggctacatgcacgagagctagggaaaataacgagagaaccaaaggttgaccgcatagtgatagtgatgaagtgaaaagacatcgttgatcatgagtcagtgtcgataataccaaaagtaaaacccgtgaaaacaaaataaataaataaatatagtaatcactaaaaggtaatcgtttaccagttatgtcacttctttttctaccgtatttacactaaaatttctatacgaatattttattctaatcaatctatcaatcatcaatagttctaaagctggcactggaactgcaagcctatattggtccaagtgacagtgctatactttgtaagataaatctataaattataatccttccgtttcacaatgtaagtcattctagtatttcccatattcatattggtattaatgcatctagacatatatatctatctagattcattagcatcaatataaatatgagaaatgcttgaatgatttacattgtgaaacggaggaagtataagagataaaaattagagaaaagaaagcacctccagcttctcgattgggcagagtaatggacaccttgaaattagagaaatttgccctcttccaattgatgataattgtaatgattaaagaaaaaaaatttagagatgaaaaaaatattatatttaaaatttaaaatttatatgttgtaaattaactctaaatagaacacacgggttacgcaatgctcacaccaacagaaacaactttaaaaaataccgtgattgtgattacgtaccctttatttaattaattatgttcaaaacgacaacggttttatttagaaaaaagtcttgcatttcgactcaaaactaggtcacacattaggataataaatccaccaattatttagttggttagtcttctttattaaaaatgattttatctctctttgatgactaatattcaacatttgttattgtagtatcactttcttatattcattatttgatacgagaaaataaacttatttggccatctacaataccgaaatgtaaaaaattaattaaacaacataaacgggatataaaatataggcgtgccaattgacgcactgattttctaatgtttcaaataaatattgggtctatttggctgcaacaagccagctgttgcttagttcctgcaggtaaagaactagagtccggcttcgcggaacatgcctactaagattatgtactataaaacatctaagtataaacacctagatgatactcctacctaagcttgaatggtgaggtggaggagagaacagagaggatgagccacccctcatgcaagagagagggtgtgttcggactgttgatacagccaacagcagcccaacagctgtaatatgtagcttaatcgaacacagccatactcttttcacaaactttaaggaagaaatggaaaatagtgatgttgatcaaagttgtcagtatcctgatctatatcttagtattctgtgatactacaatcctatcaagctgaaacaatatcgatcctacgtagtatcctaattttcataatatctcaatcttattattcatttttatacgatcatacaaaattttaggtagcagcccgatactacgatccttgtgaacctaccaaatattatttaaaataagacagattgaaaataatactgaagtttacataaaaccaattaaatttatcagaattgatattatatgctttaatttatacaaaatattatatattttatataaaagttatgtatagtaataccgatactatgatactataaatcaaagaacaatcctacctactatcttgatacttattatcttgatgttgattggatgagagcgaataaaataaatacttatgtattggggttagtaaattagaggcaatgcgtagcataaattgctttccaattaattaattgataatgtgaataatattagatgtagcaatcacctctaccgtaaacttgcgctcttatgttgtgacttgcgagcttaactcatgctgagttcagcaggtggagttaggaactccatcttctcgcacaaaaacggtattacttattaataatacgtaattaattaagtattaactaaaaatacttaataaaagattaatacgattattttagcgatctttctataaaatatttttagaaaatataccgtttattaatttaaaaaatatacgtggttaaaaaaagagaggtgggtttgaaaagaaagagaagaacacagacttaacactaaccgaaaagcctcaccttacctgagcttaagcttaaataccactctttgtaataaacgacggtaaatcggatggaagtacccaagccacccccaattctcctcctcgtcgtcgttctccttcggcttcttaccacgcgcgacgcccgccgccaaccaggtgagctcaccactccccccggcggcggccggcggcggcattcattcttcctttctcccccccctcccatctccttctttccgcttcgcatccctcccgttcccagccgccgcggcttccgcccccttgggccttttgcggctccgcccgctgacaaaccctagatcgccgccccgccgccgtgctctcctcctcgtgcctcccctatggccgccgccggactccgccgcttcggtagtggtcgtcttctcatctgccgcccccccgaaccgaaccctagctctccgccgccctaccctaggtctccgcagcagcagctgctgctcctcctctaccagaaatccccgctatcggccgcccccatgccgcgcctccttccccctttgcctcgctcgccctgtgatttcgcctttcgaaatggagcctctgtgtgtgcggcaagctcacttttatctgttgatttttagttttggtcgcaggtggctgaggaagcagtcttcgggtggcctttgcgtggtttgcttcatcaatctctccatcctaaggtgagtgaaagactagtcccacctgattatttgtggcttttgatgatcaatctgggtagttgggaaatgtagctgctggaattgtagttactgagatggacatgagcagtttacttctgtgcggatttgcgtgtacttcaatttgctctgaaatgcttgaagaactatatgatttagcttattttagatctgtacctattattagatgctacactttacatggaaggaagactatctcgtgctatttttgtgcttgggatttatagttggctgtggtggagtacttgaatttttgaattatttgtgttcttatcatatacaaaatatatgactaaagtcaaagaaatgtacagatttaagacccaatttcctaacgataactgcatgtcacaactaaacctgtacatatttgtcaatatgctcacacacgccaattcaagggcccaatcccacacgtcacgtcgtaataaatgaattccatgcagtgatcccaccaaaatctttacccatagtccccaaactaaataacgtgttgccttacgttattatccatatcccgcaaacaaaatgacactttcctatattctgtcttcttccaacgcttaccagttacccctatacttggaagaaaggcatccctaaccgtaccaaagctctaacctctacttcatcactaaactccaaaactcaagattcagagcaagctaagcctcaagttcactccatattggcccatttttatgcaagaggcctatgcagctatcatgcacagccaaggatggtattgatgaattacgttcatggggtgccagcaaaaggaaacgaataaatggaagggcgcatttaataaacacatagcaaaaccagatttaccaaactagatcaaagtcaaatgaataaaaacaaattagggattccgtaccaataacagacatcagttttcggtatctcttcacactgatctcgcttaggagaggaggagagtagtttgagaaggcagattgttatggtataaggcaggcatgcactgctgtgaacattgatgattcaggcagcagtgttgaatttgagggaggggatatgatggaagagatataagaacatgttggggatcaccagatgaggttgattgaattcttgcttatttcctcctctgcattggaactggatcaatttacaagggaattttgtttatccttgatttcttaccatgtataggaaatgatttctctttatgaggcccctaacaatggaaaattaaaggattgtctaaatgctcccaacagatatgcttggatgcaactacacaacatagtcctttagcaatcatctacgctgctggccctgccatttatgcaccacctcatgggccatagcatgacattctgctactgactttttgtatagtcactgcatatgaagttttccttagtgcataaatttctatatattaatcaccacttaagaactgtggatcatgtaagctttattcaactacctccgtcccaaatataacaacttccggctatgaatctagacaagcacatgtccagattcatagctaaaaatgcttaaatttggggatggagggtaatacttaagcatggtacctggattttggattagtgggctcttacggtctaccatgatgatgtactgattactatgtctctgtttatccattaaagtttggttacttcatttcattttttttgtttcaaatacttgtatgtgctgataaggctttacttcaatttattatgtcattttttagcaacaaccagattttcatcttttgtctgtattagttcagtttaagtggtgactgttaattacagagcgagttgcttctcttggttatgtgtatttgaacgaaaaatttagctagtataatctttttctgagggagcagttttgggttgaaattggtcattgagaaaacattgcaactgtttgaaactttgaattcaattttactttctcctttctgatgacaccaaatgctgtagagctcttccgtactgaaggtgttgctagtgattcatatctctgacccatttggttcgaccaaacttccaaactgtcttttgcatggagtgaagacaggcattatgtaaatttgatgtgatgtttattagagagtatatgattcttataagaaattaatgtttgctcttaattttattttcaacttcccaagtgtacacatattattctgattctttactcacttgagtttttttttttcaaaccaggataggcaacagagtgctttgctaattgctatggaccggcaagtcaggggtgaccatgtaagatatattggaatgtgttcctatgttctttaaagaaagtcttgattgcattcattgttatgatggatttcaataatgtaggaagggatcaacgttgttgggtttgaagtgccaacatcaccagattcaagctacaacaaccctgttcctggaaatgaagatgaagctcgagagcccccattggttcctcctcatctgcagcatacattattgagcttcccaccaagccaagatgattcaagcagccttcctccacctcaaaacgtggtactcaaccacctctacatagagaaagagaactctagatccgtcgtcgccctggggattacccatcggttcagggcaaagtttgtgactgttgtgctgtacaagcccgtacaaaggcggtagggtgaaacattttgtgtacctgcattcctgcttccatttcctcgtgcagggactagacacccacgaggttgaactgccaaacaaatagaaaccctccttgttgtagtcctgaggaaacagaggaacaatctagctgcccatgaatctcaaatgattcaacccttgtacttaattggctgttggttgcggtgattggtggtggtccagttgaatgttggtttaatcttttcctgcgtcttgaacagttaaacccctattgtgatcttggcgtcattattcatgtgtgtgggggacaacagtgctggtgcttcttgctctcctctgatttcgtcttggcgtttggatctgcggcaactcaataaaagaccagatgccttttgtttcggcgattctgctagagatgtgataagaattggaggtgtccatcgcaaagccgaagtacatcattgcctgatttttattacagttggtacaaatcgtcagctcttgtcaattacagaacatacatatactcttggtaataacagaacatacatacatacatactcctacattacaaggggagactacagactcaaattgttttgtctagacaaaaacacgatccattggtacattgcagcagggttaacagcagtgtacatttacagacattttgggtcgtggcaacagcaggcagcagcagatgacagttcagttagcctctctgaaacggctgctccagctctctcagctttgggcaatgcctgatatcaacactctccaccctagcaatggattcttctcctccgatggagctcagctcctggcagcagaagatcttcagcctctggagagacggcatttcgctccatatctcaccgccgatgcactccaccccggagcaaaactgcaactccaagctcacgagcacagggagttcacgcaggccgcatcggagaactgaatggg

SEQ ID NO: 5640 - DNA, 36193 bp, Oryza sativa
tttccattaacacgttttttttcaatctgttaaatggtgtgcgtgtgttttttttgcaaaatcttttatatagaagtttattttaaaaatcaaataaacttatatttaaattttataatcattaatattcaattaattatactctaatggcttacttcgttttagctgtcgtaaaaaagctaaaccaaatatatccaaactaggcctaactcttcatcagccaatgagtgaatgtaccgtgaaagtatagcacgaatgtcatttgaggttccattagaaaaaaaaatggaaaagcaaaataaaaagggcaagttagggatgacttaggataaagaaagagttggatgttgatttacaagccatggtacattaggcaattaaaattcgactaaggtgacattcttataaagctgtctccatagcaaacacggcaattttagttaaaaaaataaacttaggttgcgttcgttgctccatgttggaaacttatcctcccacacgaaaaacgaggtgacttattagatcatgattaattaagtataagctaaaaacataaaagaagtgattaatatgatttttttcaagcaatttttctataatttattttcaagtattagcatttttttctatttttttaaaaaagaacgcatcatttagtagtttaggaaacgtgtgcgtgaaaaacgaaggagcgaaggttagaaaagaggataaacgaaagacacgaattgctgataaatctataaatataatgcattctgaaataaacaaataaagagagagagagaaaaaaaaaaacctccaacatttttcaaatgaatcatgcttcaaaggcaaattttgctatatgacactcatattttatgtaattagcttatagatatcgcaaaacgtgttaccactgaaagataccataaaaactagtaatttgctaatttgctaaggacactttcggctcaattggagagaaaaaactagtaatttgctcaggacactttcgactcaattggagagaaaaattctttaaaaggatgaggatgcccctaaggccaaaaacttccaagctgaggtcgtgtttagttccaaagtttttttttttccaaacttccaacttttccatcacatcaaaactttccaacacacataaacttccaacttttccgtcaaccaaatttccaatttcagtgtgaactaaacacaacctgtggctagagcgaaaatggaatatgatgtatgctagcgatatacttggggtgatggcaaatttaaagttgcataattttcaaaatttcactccatgtttgaagcatgtggtactagggacattctcgtctttcataagaacttatctcttcaattgaggcgaaagtgtcctctagcaaattatcaggttttagggtatcttttaaccgtgacacgttttttacgatgactaccaacaaatcacacaaaatttgaatgacctgtagcaaaatttactagcttaaaattgatgaagagggcaaaacctacacatcaaaatgtcacttcaagcccataatcctacccaagccaacatggcccaggctttgagggccgtgtctacgtagcccaaaatcaattaaacaagaggttaaggagatgttggtttaggccctgtttcattcagcttagaattattataatctgtattattagaagtaagctgaaaataaacaagtagattattatgatatattattataatctataagctagattagtataatctaataatcttctagggaggagctttttccggattattgagtggctaaagacccactacccttagatgcttccaataatctagagacaaataactcgtagcttattctaaaccagcttattataatccagcttagagtaatcaaatttaataatcttgattaaaaaaatcttaaactgaacaaacaagcccttagctaggcctaatgttggaacagccagaacatcttgctttttggtaggcttgttaggctttgttattccaactagaaatttccttttgaaaagggaatgagaatagcagaaatatgttagaatgtaaattaaagaattaaccaatccaaaacatatggaaatttacatgaaatttgcaggagtttttaacccagatgttttgctctttttttttggggtaaaaatagagaaactgtttcttctgcaaaggaaagcaacgctgtctttgctttgtccaaaacaaacttaaggccccatcaaacggcatatttacaaacgaaaaataattcatgaataaaacttttatatacgtgttcttatcgatctaaaagcaacgactgaaaaataaacttcgatgaaaaaacctcaaaatcagcttcaaatttaaggttacaaatttaaattttgactaataagcataataataagtgaaaagatgaggccatcaaggaaaaacattctacagaaataaacctgtcaaataaaaagttctatgtataaataaacaggcaagtgtttgactttcttggcctaatgtattaggtattttgacaagggaatgttgctctttattacttatccattttgaaatatagcaccctacatgtaacattatactacctccatttttaaatgcataatgtttttaaatatcaccacttattttattaaatatatatatgtaaatataatttattatgttatgacttgttttatcattaaatactttaaaaatggcttatattttcttatgcacactaaaattttaaataagatatatagtcaattgtgaagcatgaaagtcaacatcgtacgtgacaaaggaaaaaaatatgtgttgttaatacattttctaatcaaatattactgtaatgtacgcctccctaaaaaaacaaaacactttcaggctcatcctcgtaagttatattttttcgggacgatggaatataaaatacgagtattttattatctacaaagataatatggccttatccgtaaaaaaaaaatcaatctaggagtgaatataccccatataacgaatctggagtcccgtcctatcagattggcacagctccatctcccatataacgaatctggagtcccatcctatcatattagccaaacagtttcgattttgctatatctcactcgaaagattttttcttatctctcactcgattttctcactcaaatttacagtgcattttcttgtaagttacagtgtaatttataaaacttacactgtaacttttgtaagttacactgtaatttttgaatcttcacatgtaaattttaaattttgtattggatttggtctttttcttgaggatatggtaatttaatattcattatggtgtttcttaattgctttttgctttttattatatctatcggattttaatataaagattaaaaatctgtgtgatacgattataaaaatctttcgaaagatgtataggtactcccaacagttttgtggagctctatcacaaaataaactatagagttgtggagctgggtttatgcagcttcacaactccactccagaccctgaagctaaatttaaaagttggagttgtaccaaacaggccctaagtttttttacggaggaagtaaccacaaagttatgcaacaaatcacctataaacatcctgtcatatcaagataaatcatatggcatcatcagccgcccaacaataggcataagccacaacgctgtggatctcaaagaaaagtcatgacaatgtgcatcaccacaccatcagctgcccagcatcaattcttccaaacgatccaataatcccttccccctccccatccaaatcaccttttaattattctgcgtccgcgatttcgcaatcacccgaattcatttcgtgttatccccaaatctcgcgtcatctctcttgacctgggccaagcaatcgatcatcccgatccactcgggctttaaacaaatcgctgcaaatttgttgttttccccttaaatttttatgccaagatcgcttaaattcaaccggccaggtggggatttcctaggagaggaaggcgatggcgccgccgcggaagcagcagcaggaggaggagatggttgccggcggaggcgaggcggcggcgctgcgggcgccggcggacgtgatcgcgcgggtgttctcgcagctggactgcgtcgacctcctcagctgctcgctcgtgtgcaggtcagtgagcagagcacgacgcgattcccggttcttgcacgcggcgtgttcgacgtaatgcccaccccgacgcctcgagctcgctcgatgcagtgaatcgaatccgttttgctcgatctctccgagtcaatggctatgatgtagcttgctgtctattggtatctgccttttgcttacaggctggatcatagctctgctcttaacagtggagagttgaattgatgatggatcatcgctggtgaattagggagatccctaaatccgattaattttcgtgttttaagaacatttcggtcaagcaaacggccatcatatttcttgctgaattttctgaccaaagtgaaactacagttagtttaattggtgcttgatcagttgctaaaagaagtgaatactcttttttttttttgtaaaagaagtgaatactgaacacaagaatattcatcttttcttctgttacctcaagcaatttgctcagtactagtacccttctgacctgaaactttgctcatcattttgtgaatcatcaggcaatggtaccgcgactccgcggagctgcgagaggagtggagaaaggagtacatggaggcctggaaccagtttggtctctacgtcaagcagcagccgcagcagccatgcccgacctgctcaagctcgatcagaaccctgcgaggcctgtgttcctgagaactgctgctccctccattccctgtcctgccattttcacaaaggcaaaacatttgtagatggcaccaacttctgtattgcacatgagcattggtggtggcagacttgtgtgttttgggtagtgtcagtgctgcctctgcaacagattcatcagtatgtgtgtacatggtgaataaaactgatgttagttacatggtggattgctcttctgtataattgtattgttgattggtgtgtaatgcagtaatgcaatgtgcctcttgatatatgcaagaaaattcatgtgaacaaaaccaaacagcaaattcatgtgaatctgccattattgagccaccaaaaaccaagtacatgcacacaccattattatgaacattgcctctaggccctgttcacataaacccctccagctttgcacaacacaaagcctgataggcacacatcaagctcaatctgatggattttctacaaccatacaacacagcataatatcaccaaattcctggaacttgcaatctgttataagtgatataccaaccagtactataatatatgtctgacaaatggtttagcgcaactcatgaaagtcttaacaaccatctactcatctagtaggtaacaagtataagatccacaacttaaagagagatttgcatgcgtgtagacctaaaatatactccacttaaccattgctgtaacatttaatctcacacgatatgtttctaggatagtgatgaagaactccatgctgcttgcaaaaccgaagccatcattcagtcattgcgttcggcattggcctggaggaggccatctcttatctgcgccgcgacatccttgactgctccggggccatgggggatgaacactgaggtggacttggaggaggccccaatctccttcatggtgtcaaagtactgggtaacaagaaccatgtccatgatatcctttgcagtggttccagggacattctccgagaaggcgagcacgctgtctctcagcccatccactatggcctgacgctgcctcgcgataccgacaccagccaggtacttggactctgcctctccttcagctttcttgatctgtagtatcttctcggcttcggctttctcattggctgccaccctcaatcttgcagctgctcaacaataccataaatcaagatgttagatggaaataattctgagtacatgttacagaatcaatcaaaacaatcaatgtgtaaatgattatgtgattgatggaaggaactattgccaactcagtattcccaaaaagctattgccaactcaatctttggcgagaagatcgaaagcaagcaacaattatgcagggaaagggcaatggttacttgcctgcgttgatctcattcattgctctcttgacatggacatcaggctcaatatcaatgatcagagtttgcacaatctcatacccatatgcagacattgcctacagcaatcataaatccagtcagtccaaaaacaaatgttttcttgtctctaggatagcaaatagtagacaaaccttttcaagctcatcttcaacagcctttgcaatatcattcttctgctcaaatgcatcatccaagttcagctttggaacagtagctctaatgactaaaagataaacgatgtcgcccaatgagaaacgtagaattcctttcgttcactaattaaaaacttagcaggtatatatgatgctcaaaactgaaactgttaacttcaactagcctagcaaagaacacacgaagacaaaactatatatgaaaagagatggggacttcgacatgtgaaatagaattttcagacagatggaagtgcagaacatttaccatcaaagacatacgactggatttgttccctggtgttgcttagtttgtagaaggcatcagatgccttgtcagcaagagcacggtattgcacagatgcaacaacagtgacaaagacattgtcctaaattcacaaagatccatacattagagctaggaaaaaatatacctagtgagttatctcaaaaatgttaatgaaatatttctgttcttcactcatactgagttagtgagttatctgggtttcactttataacagaaatatgttcttcactcattgttcactttccagcaaagcatgaaaaaaagaaaaaatagaacgagattggagtaaacctttgtctttgtttcgcagcggacatccagctgcttcacacgcagtgagaggtaaccagcaatttgctgtcctatgcaccaaggtaagaagtggcacccaggctctagaacctcactaaacttgccgaaattttctttgatggctacagttgactgatcaatctgtactaaacccaaacactgacccatgtcttacctgcaaaggaaaacgacttaaacttgaaagatggttcagatactgcagaaagtataattttatttatttatcatctcacaagtgaagcttgcaatgcaaaatcagtgaaggtatcactgaaaagcgaggctacaaattttaggatatgcttcacaataatttgtacagattgaagttaacagtcccaactcccaagtaacagttagaaaagtgtgaatcatgcccaatcagaatgacattacatgatgacaaatataaagtagttcgtaatgcagctcaatgctttgaaaattagtaaatctgagacaccacaaaacagctcaatcatatcaactcgtggcacaatatcaaattcatcccccaaagaactcatcccatctaattatttcaaataagcgcatgcttgagacagtaaaaaaagtggatcatatgcaatcaaaataataatacatcatggaaacttaaaatatatatatacatatgaaacaccacaacacctcgaaaaataagtcacaaaaaaacattcagcggtatccgttagaaaaactcgaatcactaaaaccaactgatcagatcagtaagcaccgcaagacaaacgagtgttggcatggcgcactaaaagaacactgggatcaaaggaaacgatcgccaccaagatgcaaatttcttggccacctaaaggcaaactaaactagcacacccaaactacataaacaaacagatccatcacacaaacccgcaaaaacgactctcgaaccaaagctttttagtagggtttaaacacgctgaatataccccacaaaaaagaagaaaatatttcttccactttaatttttcacaagcataaccatctcacaaaatccccccaaagaaccccaggcccgtgcccgcattaccaaaatccatctaatactcggagaggagatgaaaaccttcaagaaatcctcgaaaaccttcttaccttcgatcgaggcagaggagaatccgacgaagaattcaaattcgccgaagtaaacactgagaggagatgattcgtgagcggttgcagctttgatttgctttggggttttgagagctccatcgtgtgggggtctatatatacacacagacgcggccgagaagtagaggcggtgctctttaatttaattaattaccgcgatggacggcccagatcttctctcgatgacgatcggacggcggtgattcgcctgtccgtcgaatatggtagtcgcggatacttcttggtgacgggaaaggactgtaattaggaaatagttttatttttggtcgatgttttaagaaagtttctagtagggttttattttggtccatatttacaatgtcctgatcgatatatttattaccttttcttttagaaaatgagataaaatttgggactacctatatttatagttatagcatcatatttttcaccaaaaaatagttgacatgtatttacattgtaagttcctaaattacatatgtaattttaatgtaagtcttaaaattacattacatatgtaaataccaaaattacgtattaattacatatgtaagtgatgtgtaagtggggtgtaattttttagataatggaagctttattaagactcagtcaaatataccaagatgatacatttcaactgagctcacccccggcctctgcataaaatgcacacaaccaataaaaggacgaaactaaacccccatcacgaaacatagatgttagtgactatcaatccgtagactagatcgccacctatgctcttgggtaaaaacatcccgtgccacctggtccaaacgtcgagataccaccgcaatagtatcctgcaatcccggtttgtggaggatagcccaggtacgcagccaccgggtaactagagtaataacctgtaaaggagaagacactaacttgttataaaaaaataaccccgtttctgcttagccaaatggaccaacaaagagctgctgcacccatcaaaagcagatttctcatttctttaggaacacatgaaagccaacgcccaaacatatgagtaacatttcaaggaggttgaaagttagaggccatatgaataacggaccataccaaacgagatagatgacattggaagaacaaatgttgaatggtttcatccttatgacgaaagcaacattttttactgcctttccaattttgtttagctaggttatccttggttagaattactccccgacgtaagtaccaaagaaaaacttttacttttagcggtactttaatcttccaaatacgtctattaatatttgggacgtccgtatgaacaagagctatataatgtgaattgaccgagaagaccccagtgggatgtaattactgtgcaaatttgtataaatatataattagaataacaaatttgactgctacaaagacaggaggtggagaaacggatgttcattgtgcacacgatgtccagcgcagcgcatccaagccattaaaatccaactgtactcagccacgtaatgtagcgacactttttcagcaaatccataaaattttggtcgagaattatggtggtaacattgacaggttttaaatttttggagtatattttccacgaacccaccgggaagtaccgtgtaaactttcaatacgagaagagaaacaacatagactaaaaatatcgtcgattttctaaaaatgagttatgagatatttctaaatgtgcaagcatctctctgtcacatttcctttttatgtttggaaagatgtacaatatatatgaaaacaggaatggtttccaatggtccatatgcaatgcacatatataggaagattatatccctaaatgatgacctgcgtgaattaggaaggacacattattggtataatataatagcactggcacacataattggatcgttcctcgcaagctactatcttcgagtaatacttgaaattgcaagtggcatcctgcatcattacaaggcctaattgaatcagcctttaggttagacgttcgatcgagaggcagtgatacacaaaccaaaccctctgtttggaacaagggaataaaatcgaattttcgccaccaaaattcttccatcacaaacatgactaaatttgtgagtgctgatttctgagaaaacatatggtaacattctaataaatagattattcgtggacacgaggatttgaaattacaagcaatatactaaagagaacttttcaaagatatatctttagaagcgtggagcaagtaatgcacggcaataatctggtgaatacgcagaaaagaacacaacctcacattcacagcgtgttcatgagccaagaaaatttatgaccatgcaggaaattcaggttttgcaccttccaggaaacagtgtaggaatgatggcattgccttctttaagcgaaatgcaggtaaaaccgcggggtgtgtatcactatccgtttctaggcaaaacgcagagaatcacgttgcctctgctgcaggtctgcaaccaagacttggcttgctgcaagaaaacagtatggctctctgcaaatatgcatccacaagagaacaagagatgcacagctgggaaaatgcctatagatcaacaagagggcattttttggagaacaataatgcactcacaacagaaccacattggcatatctaccaaccatttttgcattttagggtatgtgcagtttcgcataaacagtctggtaggatgcacctatgcctcctaaatgatgtaagggcaatcattaggaggatcattgtgtaattaaattaaccaaagctagcttactttggaggaaaaatatatagaaaagggtctatcagcatccagttaaaacctcagtgcaaacatccacaagggaaatctggtacctacagctccttttcacctatatccattttcacatgtcaatctacaggaaagatcaattcagattgcacaacaatgttcagccaagccactcagccccccaaccaagttccaccaactagaccaggattctctagttatttcacgttcggcttgggtgagtagcggaacggggaagcacgggggccatcggacaggctcctcatcggttgctgcccgttccgagcaaatgaaccctgcaccttaagggcatggctcctaccattcatgctgcttgagtgcgccattctctcagcttgcattgtctgatagaagtacgaggagctagccatgtccttgaggttgagcagtggcttgagaacctctaccacttggctcatcagtggccgggctttcgggtcccggttgagacaagcacgtgctaactgtgctgccttctgggcacctttgaccgagaagttaccctccaaacgagggtcaattagcttgtagaagcgctgcctttctcctaggagggggcgtgcccactcaacaaggttgtgctcaccatttgggcggttcttgtccattgacctgcgccctgacatcatctcaagtagcaccacaccaaaactatagacatcactctttgatgtcaaatggcctgaaaagtggaaaaaatacaagaaaattataccaagagtcataatgaaaatcgcataaaataccaaaggcaacaaatctgtgtttgaacttcatttgcacaaataatcattgaaaaacccagtgcccagcattagcctaatattcaaaaagattgttgatgatatgcaggcaataatacattttcctggaaatcaaatgaatgacaaacatctaccatatggacaacatcacttaactctacagttgcactcttagacatatttgttttgcccctgcaaatgtgttttcacaacagtgctgggatttctaatcaaacaagacgcacttgtgcaactactattaattgtaatgacaagtaattaaatattatggtatttcccttctacattattttcccaagatcaagtgtaaaggcttaatatagttcataaatagagctgacattaattacattaatcatagccaaagaaactaattgatacactgtatacatattattaattctaggaagaactaactaaaatattttgtatattacattcacaatattttgtacattaaccactaatctactatatcatgacaattcttcttataatcatttccattccatagatttaagtgtcgccgataagagagaccgaaagaccatagggtgcataagctgatcgttgatgcaagaactgtaatagtaaatcgccatagctgacttgtttttggcatacataggagagataaaacaaagtggaagtggaactatcttcagaccagttatgttttgtctgagtgatgaccagggtttcccaaaccgccggggccagggttaccgcaccccggcagtaagcacggttaccacgcagtaaccgcgataaccgtgaaaaaccatacaaaaccgtgcaaaatttatcaaaactttaaattattttttaaatttatttgaatttaaggaggttactgcggtatttatattaccgtacccccgcggttaccggcggtaacgtcaaccctggtgatgactgatgaagcacttacctgtcataacatactccggagctgcataaccatatgttcccattactcgagtagacacgtgagttttgtcacctacagggccatctttggcaagcccaaaatctgagagttttgcattgtaatcctgcaagagtagcataatatacaaaattacaagatgtgaatcgtgtggtgtgcaatacgtaatccaattcaaggacttaaaacttacagcatctagcagtatattagatgttttaaaatcacggtaaataactggtctttctgcttcttcatgaaggaaagcaagaccctttgctgctccaagagcaaccttcattctgatggaccaagggagaggaagagaccctataggtgaatcataaatcatataagattcaatatttctatctatttaatattttttccagcagcaagatgcaatgaccaaacacttcagaagagctactcaaatatgaatgataagttcattcattaaagcacaggcattgtatacaaattgaagtttcaatgtcttgagaaactggtcagacacgtacttctgaatagatggttatctaaacttccacgaggcatgaattcataaaccagcaatctttggtcatcttcaacacaatatccaatcagcctcaccaaattgggatggtgaaggttacctaggaaatcaacctctgcctgaaacgaagcagaacaaatgtcagtcattgggggttctaatgggaatggtaccaaacatgaacggaacaaaagcaatttgaacaataagaataacaaagcacataccacccattctttgtgcccttgaagcccatcatgattgagtgttttgacagcaactgtaaggcctgtaccaggtttcataggtgcagttccattctcttcaatccaccctttaaaaacacatccaaaacccccctctccaaggatactctcaggcctgaagttccgggtggcacattttagatcattgaatgcaaacttgcgcaactgtgaggcaacttttatttcctctccagctttagatgctgatgaactgctctcagcattactagtagttgttgagcctgagactactgatacaactggatggttcctgctaccattttcggttgacttttctgctgttccatgaaatggataacagttttaatatggcatactaatgagaaacgaaagaccatctcctcaacaataaataaaccccacaacactaattcagataaacacaagtaatgaaattggcaaactgtacagtaacttctgggatacagctgaaggacacagtgaagtgtaaagtttagttttggtctttttgggtatggatcccaagaaaatacgactttctcatgttccattcattcatgtccatcaatgaatgcttaaagcagccaagcagccttgatgagtgatgactcatgatttcaaacaccacatctgctgtcaaaacaccatcaaagtcaggtggctgatcctaacatatcaacaaccattcctgactggagaaaccaatggtgctcatttatgtgtgccgttctaattaatttgctacgagattaagtgtggcatgcaaggagcacgaacaaccacatgccacactaaaaatagaatagaaaccccaaaagaacactcatgccactggtcccatacagtcgctcatccaatatctatcttccaatttaaacggtaataggtagtaatgagaactacagctcagcttgaaatatgatgctggatgatatgtatgatttgccgactgtttaccgataattacgtgtcctacacgcttgtcgtaataattactagtcaatttgtacattcaatgcccaaaacagggacgcgcgcaaagcgctgaggattctaagtacaaaaacatagctgcactcagctctctacaaaactatatgcctatgcatacgtactcgacatttacattctaacctactataacctcagcgctaatcaaggccatgtggttacatcacatctaaatatccagacatatttatggccaaaatccatttacataacagattccaaattccaattatagtcgttgcaggttagctcatctttagaaaggacgaaagggacgttaccgccgtgcgtgctggcgctgctggtggaggtgtccaccttggaccgcggcggcggtgggcagctccccatcggccacagccggatgcagcacccggtggccaccgtggcgtcctccccgccaccgccgccgccgctgcccttccgtggcagccgccgcctgctgctcccgctgccgctgccgctacggctcccgctgcggctccggctgcggcggcaccacccccacctctccctctcctcctccccggagctctcccacccgtcgaactgccccagctccggcggcgccacccccatccccacctcgcactacacacactttcccaaaaacctcacaaagaggagagatcccctccaccaccaccaccacctcctcctccaaatcgcgcaaaaccacctcactccgggcgcctcggacgcatcagatcggccacaaaaccgccgccctcacgcatcaacgaaagcaccaaaaatcaccaccgccgccgccaccgcagaacaaaatcccaccagtatttccgccgacgaacacgcccacaaatcaaaccaaaccaaatcaaatcacccccacctacaccaccaaatctccctcaaccccaccaccaccaccaccaccccccatcctcacccaacccaagctcaccaccacgcccggcttaccgcagcagctgaaccaggtagacagcaggacagcccacctgcctcgctcgccggcggcggcggcggcggcggaggaggaggaggcggcggcgagaggtggagggggaataagcggagagaataatggatttgcgtcaaaagaaggaaggaaggaggagacaaggaagcggaggaaaagcacaaatgttcctcgcttcgcttcacactctctctctctcttctcttcgcttttttccttttttttttttttttgtgctgcttctcttcttcttctcggctttaggggaagggagcacgtggtctacgtggaccgcttttgcagcgtgcggcggcactgtcggctggggcccgcggcgaggggtggggcccaccgagccgatgtggcgctgacgtggacgtcggcgtaccctgcacttctccctccgtttcgtcattttaaatcgaactttttttaaggtttaattaagtttataaacaaatttaacaacattgagaatgttaaattaggtttattaaaggtaatgttgaatatattttgataatatatttattttgtgttaaaattttgttacagtttttttataaagttagtcaaaataaaaataatttgattaaaaagtaaatcgtaatagcttagtaatataaaacaaagagagtactgtgtaatcttgttgtttttgcagggaatgattggggataggggggaatgaagggctgtccctttgtgagatttttttcttgtcccagttcgtcggtgaagagattagagatgtgaagggttacagtgctactctcgtcgtttcttagtttgattttgttggcgtccaaaaggtgtcacaaactcataatttgttaacctagcgtttgcttgattggttatacacttttattacttctcgaattcgcatatggtggactctaccttttttttttagaacatcgtaaactctactggcatagttatctctaacttattgttgcccacattttatatgacatgttggcatgtttcgattagtgctaatttataccatacgattttttttaaggtaaatgtgataaatatatggatgcatttagtttgttaccaaatattagtaatatctagagaattttggcaacaacacatttagccttatcaaaactttacattgttatcactttactaaaattttggttttgccaaatttttgaaagttcattttggcactaatctaaacatgcatgtctcatccctttgacaaagtgaggtggagcagggggaagcattagcggtgtgatggtggagtcgtgatgcatgtctccgcccactacgattcaagtctagtgtcatgaatattacgcgcatataggtgggttttaataggaaattagtgagttcaatgcacatgtccagataatgcagcgtgagtgtagtgtgagtgttctatagcacatgacaccaagatgcagtccagatatcatgtggacaacgagaggccaacggtgaggcatgatatcttaggaaaagtcatgtgctcgggttgtgcatgtgcttctttatgcgcatcgcacaccctcatggacttcttcacgcgcggtccatgcgctcgtggacttcttcatgcgcatcatatgcccttgtggatttcttgatgcgtgatccgtgctctcgtggatttcttcatgcgtgatccaggcattcttcggcggtgaggagtgcacccccgccgagctccgcctcatcggcacgcccatcgtgtcagtcccgcgcaccgaccggctctggcgcatgttcctcccgcccgccgccgccccgtgctgtttcgccatggcctcgccgtcctccgccgcagttggtgacgatgacgcggctctcctccccgccgtcctccgccactcccgtcgcaagcgccgcggccgctcccgccgtcctcaagccccggcggccgacgccgccccgtgcccctctgggagagaagatagacagagaagagagagaagacagacaagagagctgacatgtgggcccaagggcatttttgacatttcacatgatttctctcctcttcaaccggaaattattattctaatcgacgcggtgtccattggcaaattaccacgtttatggagtattttcccccaaaagtgagttcgagcggtgttccacggctaaaactacgaagtcgaagtgtcctttagcaaaatttgccaaaaatataaggcacattttgtttaacaaggtaatccgtattatccaagaatttctttactaatatattatttatgtgacactttttttactaatatattatttatgtgatttcaaaaataaaatctaatatttttaatacgaatgcaatcacattaatttcgtatacaaattatacctaattaactaattgttgatcgcccaaatgaaacataacatgtctaatatatttcgagggagggttatagctgctcttttccctcaccttccctcctccatattagcagaaacctatataagagatatgctaattcttgggtagtagcagcggtgaggagctagctcccagacaggtcggacggctttctgggttcggctgctagcgtcttccttatagatagctgttgatgttaaaaaaatcgatcgatcaccaaaaatattagtattcgctcgggtttcacgacatcactagctccatcactggttagtagatttgaaaatctgtgacaaagcaaaacttcaagtacacgttactattaggtaagttggttgcatcgtgtgcttcttgtttttgcatctccgatccatgacgtccattttgctgacgtgactgtcaattattccgaccaaatatcaaaacgttcgtgttgacaaaacggccacatctaacatgcactctcacatgcaccggcaaaacggcgctcgtttgactctcgtggagtcgtggttaatttaatcaaattttcttctttcttctgcgtattccaaatggccattagataaattaagcaaagatcggcatggatttttttttgcagataaaccgatcagcatcggaagatccaagtatgcttcaactgcattgcattagtcagatcacacgtgctcttttggtgtaaatagtacatggtctcacatgtatcttgcattgcattattgccagttcagctcaagacataaacaacggttttagagaaactccaggtcaaatggctgccgactaatctcccaacccagctggtcaacgttgggttccgtctccacatgctattagaaaaataatttaaaaatagcatccaatgtgtcactgacatcagtgacatgtgggtcagtgagttaaggcctcacttagcaacacgcattggatgcttatattttgtaattcccgcatatctgcaatgatatattgagtcatttgtacatttaaaataaacaaaaatgttacatatggttacttttttttctgatgtatgagaataatatgtttctgtacaaccacaaaagaatcatatatgctaaagtcaagacataaaagaatattagtcggcctataaatctcacaatattatcaatgcacaaactaactattatcactggatgcctttgctcccttggcaacctttatgaagacatcctccaaggtggtatcaaccaggccccaggcatgcacggtgaaccgtttcttcgcatcctcaactgcgcgaaatacctcggctattttcacctcttgctttggcagctcgaactttaaagaatcatatatgctaaagtcaagacataaaagaatattagtcggcctataaatctcacaatattatcaatgcacaaactaactattaacactggatgcctttgctcccttggcaacctttatgaagacatcctccaaggtggtatcaaccaggccccaggcatgcacggtgaaccgtttcttcgcatcctcaactgcgcgaaatacctcggctattttcacctcttgctttggcagctcgaacttttgagttccagataggtggtagatcttatttgcgctcggagacaagtcatgaactagccgttcaacctcttgttcttggtctggagatgttgtcattgtgaatatgtatgctcccccatatctcgcctttagctgcattgtgcaaatgaggttttagatctggtcataaagcacacagtgtgattcaagaaggcaataaaatgtacctccttaggatttccaagacattggaaatcgccatcgacaaagatgccaagtcgatcacaaagtacttcagcctcctccatcgagtgcgctgcgagaatcacatttgatcaacactatttgatactcttgtaaattttaaaatcaataagtgacgcgttaggaatctaagaattggacgcgaaagtagaaagggaaaaggataagtactagtaagaacgatcgcacggtttcgcttggcctccttcacaacattccacaagttatttcttgatgcggggtctagcccagtgcttggttcatccatgaaaacgacctacagaatgtgttgtcaggttgcataacacattaacaaaagaacaaaaggacatcctatggaagggttaaaaaaatatacagaaaagtactttggggtctccaatcaatgatattgccacactgagccttcttttcatgcctccgctgtactttcccacttgcttatcaccaacaccaccatggaacagatttacgctcttcagagcatcctcaacagcctaacagtggaaaaatcccagacatggttcaaatacaagatgtacatatgctgagatagctgagcagtatagtttatgaaatacgtgacaaaacaacttcatatggtcaacaatgaaatgtggatattaaatttaaaaataagtgaggcagagtagaggtaccttcaccaacacagcacctttaagattcttcagcctgccataaaagaacagatgttcttttccagtcaatggttcccaaagtaagctgcatttcagattaaaacgtattactataaaaaaaataatctggtctgggaaagattctttttggtcagataagtgctagttgtagcaaatactcatgctgtgggcacacccccatgtttgtatatatgtgatccatatccatattgatatccattccatgaacataggaagtaccagatgtaggtttaacaagcccaatcatctggtaaaataacaaaacaaggttaataaaggtgagctgccacaactaagcaattttcacaaaaaatggtaccacgtgccattttagtactataccatactaatgaaggatgttttcccagctccatttgggccaagcattccaaagcactgcccttttggtacggcaagagataatcctcgaaccgccagcttatcagggtttccatcccttccaggatagatcttcttgaggttgtgacatataatagcttgatttgcattgcggcctaccaaaagttgctcaactacttctctctggatagaatttgtataatgaataaatttagaacatatgtactccattaaatctggactggcaaagtatagcaggtaacctacttcttgagcaacatctggcttctccatatcgacaattactttagaaccctgttgcacaaagctaggcttctgcaatgacggtgtgtgcttcttctgtaaacacctgaagaagaataagggccttttcctgacaccaccacctactggagagacttgatccaaatagaatgctaacataaggagaaatgcccattctactgtcatgatgataaatataccacacattccattgattgggtctctcaaatttccccatgtcatgccagaggctcccatagcacttccagagaaagcatattggccaagttcatatagtcctcgatagagggaaaatcctgggacaatctccattactaacaaccaaccatctgagtagaaaacaaaaatgcttgttacccatattatgtaaattaagttgaaaaatacaacagatataataacttactgggaaaggtcctgtcctcaacaaagaaacgaaaaagaaatgcccctagcaagccagagccaaatacataaatgtatccaatcactgcaggaggaaatatgtaatttgtgacttccagtaagaaacattttggacttataacttacaaggttgaatcactaaccagtggctgtcttgacagatgaaaagaaagatgccacaaaaaatgcaagtgcaatctgcaaatttatataaatgaagaagaaagcaaactgtatgctgtagtcattgagtctgaagaaatttagacctacaaaaaaaatctattgaaatatctagatttatttgtcagaacagcaccttcgtgaaaatagattggaagaaaattaccaattaaggagccaaaaatcacaaaaaatgtcatatagataaccgatagagcaaagaaataagcataagaaattagccagtaaggcccatccttcagaccatgcatcttcatcataatttttagcttttgttccttctcatacaccagatatgtcaacataacctggaaaagagagtcaatttgcaagctgtacaaatcctgaccataacacactcaacactccctttttcttttgcatctgaacttgttaaatcacatcatactcactgggaaaagtagttcaactatccatgtgaagaatagcacactgagaagagaagagagatcaagcctaaaccttgttccaactttgggcatctcttttacatattcaagcagcatatccaccccacttcctctgataaattttaggtatgcattggatatctgcaggaaacaaagcataaattgctgaattgtcagatggttctgtaatacaccgaaattactcaggacgaagttatgaaaaggaaaacatactgcattcaccaatcgtggaactcgtaatgctgcgataaatgaatatgcagtgttatcattataagtagagttgtaccaaacatttatattgaggtcatatcctgtcgtgttcaagaagtcataacctgcagagaacaattaaactatacagcacacatcattgcaaataaccaccaccatttatacgaaaaactacatttgttatgttttgaagcaattatttggagatggggccatggaattatctgtactatgtgtggcattcaaaagcagtctgttggaaggtattcaaattcaaaatgtgaaaaaaaaccactgttacacaaactcattctggttgcaaattgaccacaaaatggtcacattgagatagaaagataacctgcaacaaactcatttgtttctcctcctctttgtacgtaacccttaaacagttcatagttgataactgatgcactttcacgccacaacatctgaacttcaatacactgtatatctggttcattcaacaggacatcagaatacaatctaggcagccctacgaaagagtctaaatgaacgatgaacatattgtatttattgttgtcaaacagactgcataaatagttaggaaaagctacactacacaacgtactagacatgtacaagtctcaccacacaactactatattccattatctaaaaaaactagttgtcttgtttctgtttgattgtattgaaagtagaaaccatgcaaaatgaataacagaacaggaaaatattttttagtcccttcaaatgtaaatgaatttgtacaggaaaagttttgaattgcatatttgcatccctagcctgacttactagcaaagtaacttaagtttttcaacacaagtcacaaattcaacattgcaaagaaggaagctttaacttaccgatatgtaagggtacgccccctgcattgtatggaatggtcccaaacatgaagggcatgcaacgaggctggagaagatgcaaagttttaccagaggaaaaagcgggctctagcaattgggtataccatggctgtgtgtctgaaccctatgacaaatcagtccaaccaataactccataagctatttttcaagaaaaaagcgtgatctacaagatgtatactcatgcagccatcgaaggaactcacaacaactatcctggagaggatatcaagatagtctgtcacttgagagggagaaaagggaggaggcatcaggtagtctgtcacattaggcaacggataaagggcaggaaacacccgacctgaaacacctgtcaattggaagtactcaagaactatgaacacattcacctaattttttgaaatatgaaaagttcaagtattcattttagcaatcgatcagcaatatggaaaatatgacacatacgctcagctaatgtttggttctctccagtgacgaggagagtgacagggcaagacccgtcgccacggcacaatgggttaggcaaatcgtcgaacggctgcgatgcggtcccgacagcccggaaccctggccaggggacctgaatcagggccggccaccgtggtgggctgggcacctcgcagctccatacctgctccagcgtcgagtgctggatgccgcactccttccgcaggcaggtcccatccaggtcactctcggtgcattcgcagccgcactggtacttgggcttgtcgagctccccgttgatcacgttctgaagcacgacgagcagcacgcagatgaggatcgggaagacggtgatgccgacgttcgtcttcaggttccgcctctgcacccgcagccaaagagacaagaatcagatgccaccaccaaaaaccatcaaccatatgcctcccaccctcccaagaacacagatgaaatcgatggctgcccatcatccatccaaaagccccaaaccagagcagcatgattaaaccataagaaccgggcaggcatatccacaaacacgtcgcgggcagcaaggcagacacagagaagggatcaatcggtgcggctttcctggaagcagaggttcttgcggaggagggcggaggcctgggtggagaagctggcggggctcctccccctcctcctcgcggaatcgtcatcatccatgggagaggcggaggcggaggcagatggggagtagccgctacgcttcggcggcggtgaggagaagaagaggcgttcggagttgggattttgagttaaaccgattgattgggtttggtttaacttgtcgcggtttatatatgccgtcgatttctcggctcggctcggctcccgccaaatccgctttctccgtcggtgcttagggactagggactgtctatgctatcgattaaattgcacgtacggtccctatactcgtatactactgtcctgtttggagaactaactaagttattttgaaagctactattttttatacaagaaaaaaacctttaataaaatatccctaagttgtttggatccaaggattattttgagagctatttgacctttaatgcactttcctatgatttagatttatgaactactccctccgtttcgaaatgtttgacaccgttgtctttttagcacatgtttgactgttcgtcttattcaaaaacttttgtgaaatatgtaaaattatatgcctacataaaaatatatttaataatgaaacaaatgataggaaaagaattaataattacttaaattttttgaataagacgaacggtcaaacatgtttaaaaaagtcaacggcgtcaaatatttcgaaacggagggagtattaaaatatatttttgggtttctgaatttatcatggtgagtgctatatatgtctaaatagggttcactccgcttcgtgcagtgacgcaacatgtcatgtcgatacgtatcatccagggtttgcgaaaccagcggtaatcgctctgccaaggtcaaaatcgtggtaacaccgctaaattcaaataaatttaaaaataatttaaaattttgataaattttatatgttttcttgtgatttgccaaggtaaccgcgtgcttatcactagggtgcgctaagcttgctcccgttgataagggaaaacccgcgcagtcacatataaaaagaactaaaaatatattttcttctctctgttttttaattttatttttctatgtaactgacacgtgggttccactaatatatagatgccaccatggcatgccacgacatgttaaaaaactaaatatgtgttttgagagcttaaggaaatagatgacatatctacacaagcctatagaccacccgtgcacttccctctgaaatttatatgtagtacgcttagtgtgtaattatattgtaatttctataagataaaactatagtactaactttcaaaacccagtaataacgcattatttccgtcaagtgaaggtcgtggggccaaacccattcatcccgatggcgtgcgctgtaattttttcatttccctcctgcattaatcttgaagcaaatataacgattcaaaattatgtaaaagtcgcatacaagttaaatagcaattgtgtataaattacaatgtaaaattattaggagaaatttatcgacaagcaaaattgtgttgcttattgacatgaagtactgaccatagcggtagtatattgcattattgttgttaccctcgtactccctccgtctcaaatcaaatgcgagattgatttatttttttgacggagggattatttaggtcatagcagtagtagatctacaggatgggccgggtaagggttggagttgggccaatcaaaagcacaactttcatgggccgagcatatttgtccggttctggcccattaaggatatcgggccgatgatttgtgccagcccgattaattcgggtgaagttgatgctattggaccttttttgggcctgtttttctctctctctctctggtttaacttgcaagaagccattgagacggtgtagggcaaactgaattttatgacggctgggatgtgacttgtgagaattatcgtgattcaaaagggtacggatgattaaaaatcaaacggagttttatgggaattaagttgatatacataaaaatacgttcttttatcatttgaataaagatgattaaaattctcatagtaaaatgggaaaaaatatttgcttcaaaccagtgcagatggtatattgattagtgaaactaccatagtactctgcatttttcttgacagataatgtcattaaattttgatataatattcgaccattcatcttattaaaaaatgtataaacgttattattagagaaacttttaaacttgacttatcgttttgcgtgcgcacccgcacacatatatttttttttaaaacaacatgcccaaagttaacggtgtcatctattataaagaaatatataggttcaccctatccgtgtcacgaaaatttcttgcgcttcaaaggggtcagtagcatactcatgatgggctcgtcctaatgttcttcttctgagtttgaaagatttgtggaggaaaagtggagggttcaacttgctataggaattgataccagctattcactcattcgaaatggacgattggggtataggacaaatagaggaaatatatctttgctacagatttcaaaggaaaaacttagacatccactacaacgtactaccaattcttttttccttccctaagttcaagacaaatcaattaatgctcaaaacatcctgtgactataattttttcaaaaaaaatcataaacaagcttgattgatttaggctgtgttcggaagtatctcttcccaacacgcgcagtacacacggaaaacagagcggtccattagcgcgtgattaattaggtattagctaatttttttaaaaaagtttgatcactatgattttttaagcaatttttgtatagaaacttttttttttataaaaaacgtaccatttagcagtttgaaaagcgtgcgagtggaatacgatggagtggggttgggaaccctgggttccgaacaaagccttactatgattctatgaaatatttatgtgtttaactaatcccttcaaacaccatgttttactttttttctatcctgcatttcaaataaaccctcaataactagttgaatcaagctttatatcttttaaaaagttatgttttcactgtactgttgtcgctggcggcgtgatcaaccatccacagatgaaatcgtgttaaggccgccagcgatggatatatgaccctattcgtaatagtgccagttgctcttgaatgctagtagacgcaagcttagctacgcggagcatatgcacgaacacgttccggcccatatctgcacctattcaagtatgggctctcacgttctcggcagttactcttattattctacagtggacttagatgcatggccagaatgaggttcttgacaacatttgcagatggcatacacaatccaattgtccaagaggacacgttcaggtaggttaagctatgcagcatttactggttttgcatcatggcaacaaccaacggcttgtgcataggggtggtaatatgtgcccaacattttagcctacaaaatatgatggctgaaaccaaaaaagagttaggctgaggtttaatgagctaaaaatatttaagaactgaaatgggttgtgaaaaggtccatgagccttaacctattaccacccgctacgtgcacttttggagactttgttttggaagggccagtcgaagttagggcagaggtagagtatgggagggggagggtgcccacgaacccgtccaaaaaaaattttttagcctcacctatttttcatcatgcatgtgtgcacccctcaatataaactttagcacccgcatcagtttacacttgatctaaaatagaacaaattaagctttactccgtttcgttctagcgtggaccccggtcctgttacggtggtcaatagaggtggaaataatatgtgcatgtgttgtagctcgttgtattatgaaacttgttgtcatgtcgttcttttaaaaaataattgtaggttgtgtgcatatcgttatcatatcctatttatatatacatagaccgatcgagcgtgattttagattaattacatcaacttaatatagtagtatgatatgaacaaatcttactttatcttttaaaatacttcacacattcttcttcagtccattaaaactttgtttaacttacgcctccaaattggcatcgtatcttagcactcgatccgtaacttggaggcataagtttacttctaaagaagtactcccttcgtcctaaaatatttatgaatgaatatgatattctgaaacggaggtaatacttaatagaagaccgacaatgcggtaacacggttgaggcatgcatgtaaaacatacgtagtattatattacggttggccgtctttattacatacacatcgtgtattgtttctatacatttgatgcgaaaaactattttgagctctaaatagcacgtgccctcattttttatatccagcggaaatgattacaaaatatttcggaaaagttaattattgagccgcagcatatacaaacaatcatgtcgtatacatccatgttcgcttgttttcagctatagattttcctcgatccatggggcccagttgatctaaattaaagcaaccactgatgcacatgcagcttcagtcactactacacactactacaggaatgattttcctaggcaggagtcattttaaattgcagacggaccttaagtggtcgcatctgcgaaaatcgtgctacattttcgtgtgcggctctctaagacgaccgcacggaaaaatcaattttcctagacgggccacttaacagggcttattttctcgtgcggacctgttaagtggcccgcacacgaaaatagccaccgaccttttagatcgccctacacccaactatctcctcccctcgccctctcagatcgccccacacccattctctcctcccatctccctctcagcccccacacccactcctccctccctatccgcctcctcctcccactccttcctccccctatccgcctcctcctcccacttctcccatctccggcgacggcggcggtggtctcggctagggcggcggaggcgaccattggctatggtggtggcggcggagcggatccatcaccggccgccacggggaggcctgatccgttgccggccaccgggagggggggggggatccgtcgccggcgaccgtagggggggggatccgtcgccggccaccgcggggaggccgaatccgtcgctggcgactgcgcggacgacgacgacggtgacggtgtttttgattttttttttgtttccatttgttatttttccttgcgggcggcttaagcgcccgcacatggaaatcacgattttcgcgtgcggaaaatcagtattttctcagacacctcattctagacgggtggaacatccgcacgcaaaacccgattctaaccacacggaaaaatcgttattgtactagtgagtggagaagccaatcaattaattggagatttacaaggcaggcaaaataatgccgttccatttggtcatatgtcaaagaaagctgcaaactagtactagtacaagagaacaactcatcactgaacgaggtgtctgcgaaaatcattcactactctaatctgttcagttccgcaccattcactatactaaacgtacacgcgatcatatggtaaaaagagtactacaaactttttgtgtaattagtagagagaatataggagtacaccttgttagctgaacacttcttaaatttctttgctggcgacctgaatgcatgcatatggccggtcattaattaaaaggtgatcgatcgatcgattcatacacaatcacactgttggcttgattgagatcgattggttgcttggcttgattgcgattggtcattaatttggttgctactatatataactgattgggggcaaagcattccatgttcttgctcactgtacaacgacagaagaaagacaacctctgcatgttcatcaaatatgggttcagaaatttcagaatctacaaattaaaatgtccaactccaccgtaccggctggtcgcttggtcagtcctagatatgcatggacatatcatgaatctcacgatgtatatgcataataatttgaacaccaaaaacgtcgtacgtgcacaaccatcaaatcacgacaagctttcttataatcgttatcgtaatcacctcatcctgctagctttgatattgtcgtcgttatcctcctcctcctcctcctcgtcatcattctcaaccataaagcatcctcaatatatatgtttattaagtagtaaaagtgagacttacaaaactagatagtagttattttaattctcataatatatagtcagtaagctagacctcatatttataagagaaatagatgggtgaagaagagagaaggaatgagagagaagagagttttagtatttgtttattgcttattgcctggtagtagtgctactatcgaatgatactactacccactttactacatggtgacttataatcgtatggccacacctgccttgagccaaatttggatattaacacatgcccctcctacctttttggtaaacttgtgaaccaaaaagcactaagcacggggttatctaaggatgatatatatcctctaatatcggcaagacatgcctctaagaaatatgtgttcatgatgatacaagaatactacgagaggccccgtcttgttcagattgtgttttgttttgatttggcctccactctttcctcggcacttttttgtgttgattcctttgtaacctattcttttctctcaaccacctatgagaagaacacgattgattattaaaaatcggtctttgtggcaatgcccataatggataataatacaatatataagtgggcatcatccatgtaccattgaagctccatggtgcataccaaggctaataccatgaagaaggagaagtaggttgtcgtcggtggtacgctctcgcttgtctcctaccttgcttggtaaataacttgatttccttggttgctcatcttttggaatcttcgacttgtcatattgccccccctgagttttgaagtcttcaatgtggtcttgtcctttagcaatccaatggtgcgtataggaaaaggtagctcatccacttgcatttttgtaaaagtcaatcatccttcatcaatggccaattgaatttgtctacggaatacattgcaatgatttgtggcatgagaataagagttgcgccacatacaatatactcaccgcttcaattcctcaagtgttggtatgacacggccttgtgacaatttaatttgattcttttctaataagtagtaaaaaatcctatcgcatttggccatataaaatgtgaactttacctcctcttgccaattcttgcgaccaccgacttaagagaggaccaaacgaatggtttagatttggagttccaagcccatttggttgtggatacaacaattgtctcatcatccgaagatttttgttgatcaactatattaacatgagggtgatcagacctgacattctatgcgattttggcttctctaacgcggctttctttagctagagcttttcgaagtaattggcttatatctaagaaactatgaccatataacttttcttttaaatattcaagtaaaccagaataagacaaatctatcagaaagtgttaaactataacatcgttttcttctgtttctaaatcttctaatgtattcaggctcattatatttttgtttaaccgattttaagtgcgtcaaatttaattcgaactcaccattaaagtagtcatgaaaattttgttctagctgagaacaatcatgaatagagttgggtgcaagtgaaataaaccaagtaaatgcagcacgagataaaggcaatgaaaaaaaggcaaagtttcaaaatactactagcactagttttaatatttgtttattgcttattgcctagtagtagtgctactatcaaatgatgctactacccactttactacatgttgacatagaatctagttgccacactttgagcacgttatgtgcaaccctcggcggctcccaaagatgcgctgccgtagggagtgggtagatgcttccgaacgaacacccgggaggtacctcatcagggttgtcggtgacatggagccgggagtatcatgactagagacttgggcaggagcaatcacccacgaggcctgaccccctcgggggggtcgggcccgagggtgaagtgcccgcccccctctttgtctccccgaggggtcggaccgcttccgtttcggccccgagggctgaggcgccccgaccccttgtgggtttggcgccgcgtgtataggttaggtgaacgcagcggggctcacctaaccacatttattgcggtttggacgagtccgtcatgccgcatgtaacgcagtgcagcacgctcgtttatccggtctgtgaccagtcacggaccgatcagatcgtgggttaggtggcgacaagcggtctgacacacgcctcgccccatcccgtcaggatgagcgcctccaagcactcgtccttagccggagccagcgtgttatctcctgaagatggcacgttgatcccggtcagatatatgccaggcttcatcctaaccattacaatcaagatattgtatgaagaagggcgaacatgcagattgctaaactgacgcgtggtggacaagaatgaccgatttatgaccggtctgacactggtcatgtcgtcagcagacagccatgatcccacgtcgcgcctgcttccggcggaagtggaggtaggtatgggccgtcccatcagaaggtgattcggacggcaaccatgcaaatctccgtccattcatgaagagaaggcaagtcaagttggtaaaaagagagataagtccccacacaaaaaagagagatggtgcatgtggtatccccttgagatataaaaggaggaccttgcccacttagaaaaaaaggaagaaaaaaacggacgaaaggagagaggaaggagggagtttgagttcttgagctctccagctctttgtagcttcttcatacacagatccaccaaatcacaggagtagggtattacgcttctcagcggcccgaacctgtatacatcacccgtgtcttgtgtatttccactctcgcgaaccttccacaaagaaggagcttagaatctcacccagggtccccggccgaaccggcaaaggggggcctgcgcggtctcccggtgaggagcccccaagctccgtcaagggtgaacgcgcgccgatttgtcctaggctcggcaagctagctaggatgtcctttggcgccatagagacgagagacgacaagcaattggggatttaaggagaatagacttaggataggtagcaagaaggagggaaatgtagaatataaagggtttggatactaaattgatttggacgattgtttggtggttgtctcaatcaactttagcccccttatatttttaaggagaggtggacttgctttcgaggtctttttgacgtccaattaggtgtagaaaccaattagaactctaaaatcttaggctttagcaaggaaactcgaaaaccgacaaatcgaacttagagttggactctgccgctctgaacagccacaagctgctggtcagaccgacctcacgtgacgtgacaagtctgaggtctttccaagtttgtctatgatttcctatttcttaccttagaaggtaaatttggatattaacatttaacactacgacctacttccacaatggtgaatcaggcgataggacttcttactacttactgtctccatcccaaaatataagggattataccgttcaaatttgtcctggaatatgaaggattttgtaatcccaaaacgatactttatttctcacatactagctaccacttttatactatcttatttttcacccatcacattttttactggttatttctctcatcccctttgctattttattctcccaaccattaccatttgaacctttgttttctatcattttttaaatttgtttcattaaaaaatatattcccttatattcaccgagggagagagtactttttaacacattgcggataccttattgctatagctagcggccaggagttaagtgggcctatctttctctcctggtagtgcttaggcagcacgagtagctcacaaataacgtgaagccattggacatggaactcgcagtgattgctccagcagcagcagcatgcagcagcggcggataagagcaggtacaatagcaggctataagctagctgtaaatatattttaaacagataaataagaaaagagaaagtcagcgggctatagatttatagccagctgtatcacggactccaagatatagtgtgtgtatgacaggtgggaccagatattaatagtgtagtatgtaactattgtatgaataagctattagattgactatagatgaattggaggtagtggttggctatactattaaacttgctctaatagattcagctgtagctagcgctgcatgatctgcatgcagtagtagtagtagtggtctgcactctgcacaacgaacgcgtacgcggcgcacgcattgatcgcgcatcacatgatcgatctgtcgctagctgtagatcgagtgcagaatcatgatctcctcttgcccctcattccctctcccaattattggctgtgtttagttcacgctaaaattgaaagtttgattgaaattggaacgatgtaacgaaaaattgcaagtttatgtgtgtaggaaaaaaattgaaatgtgatgaaaaagttggaagtttgaagaatcattttagaactaaacatggctattatcttcccccattgtcaataaaacaaatcctctacggattccggctagctagctcgagcatttcattttcactttttcatacagacctgccaactgtgagtttgctaatagtcccactgttgatccaatggtcttctacattcaactgaagagagagcgagaacaccaaggctgggatgactcaccatggatggcggcgttgatggcgacttccctaatgagcccttgaaactccgttaggtttcggctgtgtttagttcaacatcaaaattgtaagtttgattaaaattgaaagttaaaagaaaaaagttgaaagtttatgtatatagaaaggttttaatgtgatagaaaagttgaaagtttaaagaaaaagttaggaactaaaccaaacattcactcgattagattttcagattggaggcggtgggaagaggtagaatttgagagcggcttaatttaaagaaatggctagggtggtgccatttacacgtgtatgatggaaatgggtagaatgagatggagacggcgcctctggagccattggaatggaggatgatagtggacagggtaaagtgttagataatttattgaatatatatatatatatatatatatatatatatatattatcgataataaattaggacatggagttgataggtcttaggataaaaatatagtcagactcttatcttagtggtaattgcatgatggcagtaggcgagagaacgacttgttggtaggggtaaaaatcggtcgggtacggttcggatcttacccttcccatatcctaacccacattttataatcggaatcgggtcgggcatggatagtgccaaatacagatacaaactcggataatgtcgggcaaaaatacggaacgaatgcttaccaaaatggattagtacactatcgattacggat

SEQ ID NO: 5641 - DNA, 35083 bp, Oryza sativa
ccaattttcccacagaaggtctatgatctcgaacaaagcatacgcatccaaacacctttggtggaacaataaattcattacatccaaataccatctcatatggagccttcatcccaagtattctcgatggtgtacgattgataagatatgtagctgtcatgaccgccgcactccagaggaactttggtacattcatagtatacatgagtgaacgtgccacctccaagatatggcgattctttctctcagccaccccattctgcggtggtgtgtcaggacaagaagtttgatgtagtatcccttctatcgaaagaaaactaccaaattcgttgttcacatactctttcccattatcagttctgataattttgacacatgtgttgaattggtttctaacaaatgcgtagaagtccttgaagcattttagtactttatttttatgtttcataagatatatccaggtcattcgggagtaacaatcaataaaagtcacaaagtacttcattccactcaccgagacaataggggaagtccacacatcagagtggattaacataaagggtgatatgctccgaagtcctctgcttatatatgtagctcttgtatgctttccatattcacatgcatcacatactagtttgcttctgtccaccttactcatctcatcaggatatatcttcctcatagtttcaaaacacatatggcccaatcgacaatgctggagaatcaatctagcttcctcttcacttgtaccaactgccaatgcactacatagtgctttatttgttccgcttctatctaagtaccacaatccgttctgcctaatgccaatcccaagcttccttcctgttcttctctcttctattaggcaattttctcgatcaagagtaacccgacaatccatatggtcaaccaaagaacttattgataccaaattaactggaaaggagggagcatataacactgatgataatgtaatggatggagtgcactgtactcttcccacacctttgataggctgtgaagtaccatcggcagtctgaacagtttctttatatgtgggtggatatggagtaaatgacacaaactcacttggcatacctgttacatgtctagatgctccagagtctaatatccaggttgagtgaggtacctgcatctgcatgggatgcgcgaggttgacaaggttgccaagaactgttgttttctccctctccttccgtattctttcccttatttcttgtatttctacagccattttcgcaagcagttgttcaattccttgacttccctccattccttttttttttttttttttttacaaactcactctattctaacaccttgaagacaacgtcccctggttttctttcctcctgatcagggaactcgacacagcagcacccctctccctctctgtgactgccgaggcttggactgtgttctcgcatacacgaattttggttggttgcctgccaatctgaagcactaacttcacattcaccttgcacaacctgttgccttacttcttgacaataattaatttccaacaccaaagccgcttcttcccttctagatgaagctagctacagctttcctcacctgctattgctctctgcacctgtaatcttcagcacacacgacaccaccaacagatccagcagcaatactcccttctttttcttcctttctcaaccacacacagcagtacaatactcacaagctcacctccttgccgcagcacacacaagccacaccaatagcacaaccggcaaacaattcctctgctcgctcaacagcaacagcaacaacacacttaccaaatttgtgttccccttttcctttcagcagcaacagcacactaccaaatcctcagctcgatcttctctgcctcagcaacagaacagcaatagcagctcaccaaatcctcacaccagcaccagcagtgccgtcctcacaaccagcagctccctccgcgcgcggccgccgttggctctgcctgccgccgttgacgccgctgcgtcctcgccgggagctccagcaccagcgtttccttcctcacctggagctccacacgctcctgcgccgcgtacacgcgcagctctgccagcgcagctccctcagcacctctctgcacgcctcgacaagctccggcgaggctagggtttagccgtcgcccgtcgccagccaccagccgattggctctgataccatgaagttttgggaatttttctctagaagcttcactacttttttcatttctctaactctgctatatacatgtacatatgagtagtatatgggcctcatgggccaacacatacataactcaacattatccatacatgcaaaattcagcaacaaaatgataaattttgctatgatgaattgctgacccttttttttttgttgcaggaccagtttttattagatggatcctctgattctggcatgtggattgtccctattactttaggatgcaattcacatgatatgcagaaaagattcttactgaaacataaattcagcgacataaagggcatcaattcacagtacgatgaccaagaccgacagaatagtggaaacttctggattaagctgaatattgatgaaacaggattttatagagtcaaatatgatgatgaacttacaactgcacttcgaaatgcattgcagatgaagaagctctccctaatggacaaaatcggtagacacaaacacaacatggcacaattagtctcgattacaatttacagtgatttggtaactggtattataacactattattacaggcatcgtggaagatgcacatgctctttctattgctggcaagcaaacattgtcgtcgttactacatttactgtatgcttgccgtgacgaggatgatttcagtgttctttcacacataaattctgtatgtgtatttcatgaccaattgattattccacgatgtccggttattctttggcgcttatttgtctacatattttattttggcttgtcaggtaacttctagtgtagctaaaatatcaattgatgctactcctgaattggctggtgaaatcaaacaactttttatcaagcttcttctccctactgctgagtattttcctgccctttaactctcaatatattatttcccaagatacattccttttgtatgggtatgtttgtttagatatgcttcttgtatggccatgtttatttgcagaaaattagggtgggaccctaagaacagtgaaagccacctggatgcaatgcttagaccagtgctcttggttggcctagttcagcttgggcatgataagactataagtgagggagttaggcgtttccaaatcttctttgatgatcgcaatacttcccttcctccagatactagaaaggtactaccttttagccatattattttacctggtcttctgcccttttaatagactcatctatctgtagtttttgcattgatcaggctgcatacctctctgtgatgcataatgttagtagcacaaacagatctggctatgatgctcttctaaagatatatagggaatcaactgaagtggaggaaaggttaaatgtattaggttcgtacttttcaatcttcttaggttaacaaagaatgatattttgggtttcttccctgaaggttttgtgtccctttttataggcatactatcttcttgccaggataaggatattgttcttgaatcgttgaattttattttcacagatgaggtataagctattgattgtttcttctttcatgattccattggaaggtcatggacgaatttgtagttctatgctaactacctgtaagttatatacatatctcatttgcttatcttgcttgtcaggtgcgcaatcaagatgcatatcttgtccttcgaagtgttattattgacgcacgtgaaactgcatggtcctggttgaaggtatcagtgtgttgcattatatattattgttgatattataaatattaaagttttaactatatatattaaaatcagataaaaataaaagtccatgttagaaacaactttctaactattaatttcgaatttcagaaataaataaaaatcgagagtccaagataagtacagcttcgtatttattaattctaaattctggaaaaactagagagtccacaattttataagtgttcttatctaacatgaactctcctataatctagggttatgataataggatccacctaatcaatgaccgtctttttggttaacatagaagctcccttggaggctcagtgcccaatttagtataggggtagggatagatgtgttatcgccacataaaaattgtgacgtgattcacttaagaattttgcatgtttattcttctataaatcatcaaatattatgcatgcttctacattccaaattatagtaaatagctaaattcattgcgcacttcaatgctgaaataatactccatagatacgtacgctaaggtggtgattatatttgtaaaggaaaaaaaaatacttccctactatccgctgaagcacttaatttttgttctcatcaatttaccccccaaccacactagtagggaatatctactatctgctgaagtgcttcattatattgaatctctgtttgctctcttgttatacaagctaagtgaaattgtgtgtgccctcctctgatcataattacttgatattttggacaagatctggttaatatttatgtcaaaatatcgatgtcttcagaagtatttcataatctcgtaaacctattggattttaagaacttgttctgttacagaaaattgtggccaaagtcgtaactcaaataccgtgaaaaactcaaacttcaagtactttgaccagagggaatatgataatagatgatcgcttaccgtatgtatgaaatacttttgaaaaataaatcatgactttttaaaagtcagtcttagttactatgaaactatacgcaagttgcctcttaaagaaaaacctttgaatgaaaaatcgagtgggatgcccttgttcaggaattaaatttcacgttttgttaacctcgtgttctttctatttccttacaaagagctattatactataagccaacagtgggatattcaaaacattttgcttacatgccctattatgtgaatgcaggaaaactgggatcgtatcacgaagacatttgcagcaagcgcaatcttatcggattatgtcaaatctattgtcacattggtatcatacatctgcacttttctattccccaattccgtatatgttattctgatcgggccattgctgatccttgtttcttggcagttcacctctaaagagaaggaagcagagatctcccagttcttcgcaacccgcactaagcccgggtttaagagggcactaaagcagagcctggagaatgtgcggatcagcgcaaggtgggttgatggcatcaggggtgaagctgagcttgctcagactgtgcatgatcttctcatcaaactctgatttgatgcctccagaatttgatgcatttgctgtgatgccaactttcgccaaagcatacattgtcatagcagctcattgtgagaaaaacatgtaggagtatgccgtcagcttgagttcaaataattcctcctggatgcaaggttttcttaccatttattctttatcaataatggatgctaagtctttccttagtatcccacatgcttctttttttttttttgagaaaatcccacatgcttctttcaacatagcagctcattgttgccctgtttatgaagtcataattcaagaagtgtcgttatgtattgtcaatctctcgtatgtatgttcaggcatatgtacagacatttataattcttacaaagtcttggacacgcacacgcttccggtggtgttattttaatgtgatttgtagataagcattttttatttaattactatttcctttttaaatatatcgttaagtacaacttctttttgggcataaaaagttttatgctcaaatcagactctatcatatggattttatcataatctaaactaacaaggattgtttctgtagttacctttaaggctcctttggttttaaggaaacaacataggaattttataggattctaatcctataaacttttttctatatagtcatttgaaacaaatgattggatactattgaatcctatgaaatgtcttattccatgcaagtttcaaaagaaatttaacatgaggcccaacctcatggaaagtttcttttgagtcttcatctctccttaaatccctgtgttttttcttgccgtccaattaaaacgaccatttttgtatttttgtatgttttataataatttgttttacactgtattctattaaaattatgtgtttttcatataatcatattgtctgttttctcaattttgtgttttaaagaggacctaaagattctatatcaagagctaatccctctctttgtattgttgactgaaacaactgttaggtgtaaatcaccttgaatagtggtagagccaaaaggttcatacagcttgggtaagcataatatgcatgcaggctattccactgtttctagtggacatgagtgactacaagtgatggacactccattgttgcacccacgagtatctgcgagaatcctattcagcccgacgcgccagctccattgttagtgtctgcgcccacatgcgactttttttcacgagcccacacgcacttgattttttttgtgattttttgtaatttacaatttgaatttttcatttcaaattttaaaatattctattgaaaactttcaacttgatttttgagatgaaagtttctttaagttttagttgaaagttttgaattttgagttgaaagtttttgaattttgagtcgaatgttttaaattttgagattaaagcttccgaatttgggttgaaagttttcaaatcttgactttatagttttcaagtctaaattgaaagttccaatgttaagttgaaagtttacaaatttgagttgaaaactttaaatcttgatttaaaagtttttaaatctgagttgaaagtttttatcagtgttaaagataaggcatagttcctatacatggatttatggaatacgtcaataccatatactatacgagtaggtatactttaattaaggaaatacgacaaataaagaaggaaattatcttcctggaatataaggtgttaaagtcctgttcaggaaagataaagtaacctggggcttgtatccggtcttatctctttgagatctacttgcagaagaagatgatctacgctataaatataagtcccccaccctcagtacaaggagggaggggcatcgagttgcaagtcggaaatccgagggagccaaagatagatctcgtcggacctttttctcaacagcgtctagtcaggtgagtccaatcttcttattccctattgtacctattgtactcttttgtgctattttcgtctataattcatataaactggactagggttattactcatcttgaaggctcaaaccggtataaatttgtctgttgtatcgtatataccttggttctaatgatccccatactctataaataccgtggtcgggatatccaccctcgacaatttcaaatctttgactagaaattttttaaatcaagttaaaattaaaagttctcaacgagagaaaagacagatcgaataagttccataggtatgtaagtgactttatctactagcgcacgcgcacgtgataagtttccccaagtgtctgccatcgtagggccctagtttgaagttcggccgctgcagttggataaaaccacctcacataacaagtgcaaaaaattcttatatatatgtgacaaatgaaaactagaagaatccaaacaagacgttaaagagagttggcgtggtgtcaccaaccaaaacttatctcctgaaaaacagctcggtataattattgctatactgtgcaagcaccagctgaaaaaaatgataattgttattcagttgataaattttgttggtgacaccacgccaaccaccatctgaccaacaaagtaattcctatcaataagccactatataaaaccaaatcatcacccctttttttacagtgttggattatactttgatgcctcgtattattactatctaattttttaaacccatactccctccgttaaaaaaaaaagataaatcctggatataaatcttgaaaatacattatgtccatatttatattcggggtttatctttttttttttggacggaggacgaattaagcacttcctaaaagccatgactttccatctacgtatcgcataaatttaccattaatatattaatcatgttccgcttcacttgatagcgaatgcgttgtacctagctgtttgccttccgtggctatagtgcatccgcaactagcagttgtaccacacagctaaacatgcccattatatgctctataataatacgcccaattacacaacagccaatgttttccctaaatttatttctgacaataaattactataactactgtcttccatgactgtggcgcatccgcagctagcagctgtatcaccccgccaaatatctataataaataaagcatccaatgccaccatagccaatgttttgtttccaagtttatttaagattaaaaatttccacaaacatcacaagggactaactcacaaaagggagaaaacattcaactgccccacccatttccactcgaaggaaagtaaaaaaaaaaaaaaaaaaaacaaatccacaaatccctcccaaatatacacgcggcgaccagatcagtccctgtagcccccaccgtcccgaatccacgggggcggattcaacattcgagactcgagcgagaggaagagcagaagagccgaagagagagagacggcctatttttagcaacccccacacgcggcggccacacgcccagtccgaggtctgcgcgcggagcagcagagcacacccagccgactcatccgccctgcctaccacatttcgatcccctcaccgtcgccgccgccgcccgtctccgccgcggaggtgagctcctcgtccctccccctcttcgtcgccgcggtagcgccgtttcggattttacggtttgggggtggggaattttgttttgggggaggggagggggattggatttgtagttcctcggtttggtttgatttggtgaggcgggcggtgtgcgcgtggtggtctgattccgatctgtactatgtttgtagggtttgtattttttttgtggtgttggtggtgatgggtggcgtggaaccgccgccgccaccggctccggcgccggcggggctggcggcgtggctggtggcgcgtggggtgaagcggagggcggtctccgccaagcgctcctggccccccctctgcggccgcttccccgccccgccgccgccgccgccgactgctcccgtggccggtgacgatggaagtaagggcgtcgagggcgttgtcgccaaccagggcggagcggagggggtggctgtctcacctgaccgttccgtgccgctatcaggcggcccaaccgccgcttcttcgctgccgccgccgccgccgtctatcatagcaggtaatgttggggataacagtgtcgagggcagaggagatgttggagataagggtgtccatggtgtcaccgagggcaatgaggaggagcaggttgcctcggctgtggtttcctcggccgcatgcattggtgccctctcgcacggcccgtctcagccggaggcagagaggatggaggtggatgagggagaggggcgggagaccggagaggcgcagctacctaatgatacagatgctcggttgtcagatgatcagggaatgggcgaggtgcttgatgtgatgcctttggcagtagctgcaccagttagttgtggtgctaatgtctctaacggttctgcggagaatgttagggatgtggccagtttgttgatggacagggagggaggcaagtggggctgtgaattcgagagaaaggaagttactagcgatcgggatggccgagagacggaaagtagagtaggtgttggtcaattagagaggacaaatgatgtacatgatggtggcagaaaaaagaggtggttgatgtcagttctgaatcctccacccaaaagaagggcgatctcagccatacgcaaatttccacgtgactgtgggagggctgcttctactcttgcggaaagtggtgcctctatggaggagttgcctttagaagcaacacctattagtgtagctaccggtggtgcctctatggaggattccttggcgagaacccctatttcagtccagggtgcttctttggtgtgcggtctagaccattctagtgaggcaatagatggcaagacaattgaagatgatgaatctagcaaggtagaaaataggatccaagagttccaagttgccacaaatgttgccctagatgattttgaaggagccaagaatggtagtacacacccaaatgattctattgccaaaccttctcctagccatggttttgttgagagggtgaatggaaagggatcacaacaagaaaagaagcttgtagcacgaagtgctggggatggcaagatggtaagcaaatatgaagagagattacaaaaaggtactcccgagactcgtatgagagatcttgtcgatgtaaaggcaaaaaagaagatattaaagagtgataagatgaatggggcattgcaaaatgacgctagatcctctggagatggtaagatgaaaacgaaggcttcaagcactcagagaggtgtggtgcgctcggatatgagcttgaagcaaggtgatattgctcgtaaggttgatgccacaggcaaatgcaagggcggcgtgaatagcctcataaaggaggctacatctgggaagcatgctacgactaatggaattgaagaaaatgatgatagagaccttgtcagtgacaggataattgtacaagcactaatggccccagacaaatgcccgtggacacgaagaaggaagtctattggtggttcctccgagtctcgtactcctaagcttaagaaaaagtttggtaggccaaggaaagaattgaaagatactactccaagggaagaagtttccccggaagttgcctcttgtaaagcgatcaagcatgaggccatagaggacaaggaggattcttactttgaggatgaaggcaactctaaggcttcttactcggatgttgaaggcaactctaaggagctagtgcgtggaggaaaggcactagttgtttgtggaggaaagaaggagttatgtgttacactccctccttcggctccttttggcacagatccccgaagcaaaataaggaatttactcataaaattccatgcggcatgccgaaagcttgtgcaagttgaggaacaacataaaggtaatattggaagaattgacatcgaggctggtaaagccctaaaacaaaacggttttattaagcccggacctattgttggcaatgttgcgggagttgaagttggagatgagtttaattttagaatcgaattgtcatttgttggactccatcgcccatatcaaggaggtattgacagtacaaaggtgaatggaatcctcgttgctataagtattgttgcttccggaggttatcatgatgaattgtctagctccgatgaactcatatatacgggttctggaggaaaggccatcgggaataaggcagctggagatcaaaagcttgagcgtggtaatctagctttgaagaattctattgaaactaagactccggtccgagtgattcatggattcaaaggtcatagtaaaggtgaagctagccattctaaatccaagcaaatctcaacatatatttatgatgggctgtacatggtggtggattattggaaagaaggcccagagggctcgatggtctacaagtacaagttgcaaaggatcccaggtcaacccgagttagcattacacataatcaaggcaacgaggaagtccaaagttcgcgaaggtgtttgtgtgcctgatatatctcaaggaagggagaggattcccatacctgcgatcaacacaattgacgatacgcagccaacagcatttaagtacactacggaagtcatatatccacattcctatgcaaaagaacctctgaaaggctgtgattgcacgaatggttgctcagactctaatagatgtgcctgtgcagtgaagaatggaggtgaaatccctttcaattccaatggtgctattgttgaggcaaaacctctcgtatatgagtgtggcccatcatgcaggtatgacgtgcaaaagcttagcaatccaaaataataacaataactaaataggagtaacatttgcatcatattctgataataccaaagtagattcacagaaccaggaaatatttctcattgcttctgaaatttttaccctttcaacaagggctgacatttggttgcagattcatttgtcagtgaaacaccctgcaacacacaaggaacataaaattgttggtggcatagtttaaaatttctcataaaaccaaccattttcaccttaagtctgtaggttttcacaccagaactattcatttacagcagatcattaggttgaagggaataataaaatatattctcaatcagagagctagacatattatcataacagcgaaattggttcattcaccttaaattggtaggtttgcatatcagaactactcattcacattgcacaattaggttaatttgaaactacaagttctgttccgatgctttgagctaactaatgctaatatgcattgtttgcctgaagttaattgtttttcgcgccagaattattattagattaaacccaaattgtaaattctgtttgaaagctgtgaaataccaaatgctcaaaccaacatattgattacagaagcaaccaattcacgtcaagttaattagtttttacaatagaatttatttgtttgtattggaatatcaagttaaaccggaagtagaagttctgttctaaagcagggagctaatctagctaatctaatgttcaaaactatgtgcaggtgccctccaacatgccacaacagggtgagtcagcatggtatcaaaattccgctggaaatattcaagacggggaacaaaggttggggtgtaagatctctgagctctatctcttcaggcagtttcgtatgtgagtatgcaggtgaggtgctgcaagaaaatggagatgaacatgtagagactgatgagtacctttttgatattggtcatcactatcatgatgaagtttgggaggatcctaaatttgaaggcattttgggtctagaatcttctacgtccaagacaacggaggatactgaaggcagtaaaacaacggaggatactgaaggcagtactatcgatgcatcaaagtgcagcaatgttggaagattcatcaaccacagctgctcgcctaatctgtatgctcaaaatgttctctgggatcatgatgacatgaagaaaccgcacatcatgttctttgccaccgagaacataccgccgctgcaagagcttacttacgattacaattacggtaaagtcgaggataagaatggcaaggagaaggttaaaccttgcttctgtggttcgcctgattgctctcgcaggctgtactgagatgctgttggttgatgatgatgatggcgacaatggtgcccatttttcagtggaacactgttctgtcgtgctattgatactttgttttacctcctttatttttttactcgttcatcttgcacagttgcagtcatgggtagcatgtaatgttctcttctttgtctttatctcctgaattgaactcttaccgcatcttttggagcaccgactaaattgcaatggaattgatgttaggccattcccatcccaatgactaggatagtgtccatagtattaaataagttgcgacctaggataaaaaatgatatggcaagtgaataaatgaggaaagagaagaaaaccatgtcttgccacctaggatgaaaaatgatatggcaagtgaataaatgaggaaagagaaggaaaacatatcttgcatgagatatgatttctacacaacatcgaagacattatgtgagataagtagcactaaatttaagtatggaatagtgatgtttgcattggaagagtagtgactagtactagtttattgatttggagtttatggaaactatattagtgttttgggttgggaatggtcacaacccacaagttccttcactgctggcaaagaacggatataaatttatttcgtattattcgtctattatacagtacaatgcagactacccctatgagcatcttcgaagactggaccgattgacgaagtcaccacgactggaagagtagtgactagtaagtttacggaaactatatctagtgttttgggttgggaatggtcacaacccgcgtgactacccctatgagcatctctacccctatgagcatcttcgaagactggaccgattgacgaagtcaccacgactggaagagtagtgactagtaagtttatggaaactatatctaatgttttgggttgggaatggtcacaaccttcgaagactggaccgattgacgaagtcaccacgactggaagagtagtgactagtaagtttatggaaactatatctaatgttttgggttgggaatggtcacaacccatatctaatgttttgggttgggaatggtcacaacccgcaagttccttcactgctggcaaagaacggatgtactgtgactacccctatgagcatctcttcgctgtcgatgggtacgtcgtctaccactgaaagcacaacgccgttaaatcctggaaaattcgctcccatggggagtcgaagccaggacctcaggtactactgagcctcttgtaaccactaggttacaggccctttcgctcaatcactatatatttattcgtctgtcatattcaatctacagtttttttttcatttgaccaacattttctgtgttttgcaataggctagtcctgatttgataaaagcaatttatatatatctatatttttcacaaatgaatggtacgccatttataactgaccggatgaaaagacaaaaaaaaccaaaaaaaaaaagaagtaaactgtattcatgggacatcaacttgatatactgtgcaatttagttcacttacaaagtgagcgtgctaatgcaataattaacttagcaaatggatatcttgcaaggtgatatgaatgcaattcacgaatttactaagcgagtaacgaagcgagtaacgtactgggtgaatgacttgcaaggtgatatgtgagtgcaatttagtttaagaacttacaaagtgagcgtgctaatacaataacttagttcaagaacttacaaagtgagcgtgctaatataataacttagcatgtggatgacttgcaaggtgggtacaattttggtatattgatacaacaacatattgtgtcaacacacttgcgcagatttatataagcatacttattttttaaaatatagtcactaaaagtcaattagattttaccatgtagaaaattgtgtatttctgttgagatatgagaatgtgaagataaattctaaaccggtgatgcaaattgattcaattctttatagatttaatccaagattgtagggtaatatttgcatgattgttacgtcgcattgacaatttgacatcatgagaaaactcatctagcactcgttaaccaaacaacatgtaactagtcaagttgttacacacattttcttgtactggaatatactcactaacttattatacttagacattcaatttctaaatttttttaactaaattacacctacataccaagtttttttttaccaggagtgtactttttacttaaaaaaagaatgttataactttggactctcaactacgaaacctagctaactttgaaaaccactcacattttatcatgggtcttatgttattcgatgaactggcgtctacatggagtcaacgtgattgaagagtaacgacagcaaaatacaatgaataataaatgtcaatcttgttttttttcctttgtcttttcccctaaccctatatataatttatttaaaattgctaactatgatgccacatgctgccaagtcatccagagccatccaaatttaggtcgaagaagatatttttagaagttccttttatagtaacaacaattttaacttttaaggcccttcatttttttttagataatgttaaggcccttcatttgaaggaaaaacataaaaaaattgtagaattccaatcttatatgatttttcacatatatgaccgtttgaaacaaatgattgaaaattatagaatcctatgaaattcctaagtaatgttgctatagaacccctttgattccaagaaaagttgtaggaattttggaggatttcatttctaaaggatttcctagatagccctttgaatcaaatgaatagacacaattaaatcttaagaaatttatgtggaatgtctcatgttatgcaaatttttgaggagatttaacatagggtagaaattcatgaaaagtttcctttgaatctttatctcttctcaaattcctatatttttttcgcggtctaatcaaacggttattcatatggttatcttgtgttttgcaatcatatacttgcattcctgtcagatcttgtctttttcctatttctacgcttcaaaggaacacgtggcaagttttgggtgtttttaacatgagtccaacctactggaaagtttactttgaatgtatcttcgtcattcaattcaattcatacgggtttttccgcggtccatcaaacgttcatttatgtattttttccaatgttttacaattctctattttatatttgtattattgtctaaatcttatatttttcttatttctctgttttctcaatctaatatttaggaaatcacaagtggatgtcttaagaaaagaaactagcggccactagttagcaatatcagcaggctatatacatgccatgtcagatctttggatgagttggaagataaagaagaggagagagaatcagagtgggcgactaaattagcgtcgacagcaggcgcacagtacgatgcagggtggaccccacctgcattctctcccaatcaatacatgaaagaaggagatggtgggcccaatatggtaaataaaataaagttcatctctagtacatggctgtggattagagctaatctattgtacacgccgcgagcgaatctcgtgcaaccccatgctaagcctacgtaactagcaataatcctacttcttactgtttttactgattcttaatagtaaaataataataataatatacaaattgatttgaaaattctaaaatataggttgaaagtttttagtttggatttgaaagttttaaatttcaactgaaagatttacatgagttgaaagtttttaaaatggttgaaagtttttagtttggaataggatgtttcaaaatttgagttgagagttttcacatataagttgaaagttttaaatttgaaatagaaagttttaaaatttataagttgaatgttttaataaactagaaaaatgcccgtgcgctgcaatgggtgaatgctattttaatattattattgttattgggtttagttagggtaaaattcactgtgggaattcgcttggattttgtttttagaaaatcatgaggtggaattaggagtccgtcatctcaagttagcatgagagttttttaaaagtaatttcttatacgactcctttgtattttcaaaagcaaacgtgtttaaaatccaacttttatacgactcctgtatttccaaaagcaaaagagcttaaaatctaacttttatacgacttttttttatttccaaaagcaaacaagcttaaaatataactcaaacacggatatgtacttccaaaagcaatcaatcttaaaacctacttaaacacggacgacgtaccaaaataccggcaaaaacatatttaatatttataatagtagagaagagatgagttaaaagtttccaaaattatgataaagtgtaaaatttgaggggaaagttttaaattttgtgttaaaattttttaaatttgagttataaattttaaattaaaaatagaaacgtacacgtgcgccagcaacaagctagcgcatgcgcgaggtagcgatctcgaagaaacttgccgatgacatcatttcgtttgctgtgggcccaaggcgattgtgagccgaagccaaaagcccaaaaacaaccgtgggcacaaaagccgagcccatataaatatggaaaaagtacaccggaggtccctcatcttgtcactgaattacaaaatcatccctcaacccaaaatccagatatataacatctcttaacttacaaaaccgagtcactttaggtctttaggtgattttgaacccggttttatcttacgtggcaactgagtcagcgtgggacccacatgggtcccacatgtcaatgactactttctttcccctctctctacctctttcctctctctcttcttctctacctctcttcctctctctcttcttggcaaccggccatgcgggaggactgaggagcgcggctgacgacgggcggggagaggagcggaggtggagacggatgcggcggggcgccaccggcgatggcctcgccgtcgcctcgctctccgctctgcttgacgagaagcaactccagcgctcgcccaaacccaccctcgccgagtacgctgtccggcttgaagttcctcgtcgccgccctgagctctgcgaacatgaagattcagaggttggggacctccaggatcctcccctccggctccgggtagagcgccccggcgacgccgatgactgcgccgcctgctgctcccaggggcatattgttgctgctactgctgctgcttggtgatgctgctcatggacgagctcgaccttccgacgtgatgcccggtggcgctgcttatggaagcaaacacgttgtgtagtgccatgatgggactacgcctatttgctggagcggctgcttctgctgcgaggtttgaaatttgattagaatatgttgtcaagaaccaagggagaagaaatgccacaagcatttgaataccttgccagcgtccatggtggccttatgttggtgccctcacggtcgcagcagcttcagcctcctcggagccgaaacagtcccccatgggatcagctgggagcgaagctcgatcaaatcgagttgattattgttcgttacctcgctgcgtactgaaacttggcaagtaacacgcgagacgctagttgattctttcttgtcaatcagtagcagctctcgactcagcatcccgccaatgagagccgccgccgccgggttgggagcggtggagggcgcagcacccagggggacgcgtggccgagcgctggagtcgcctcccgtcaagcagagggagagcgaggcgacggcgagggcgaggccgtcgcctcgcccttgccggtggcaccgccgccgcgtccatctccccctccgctcctctccccgcccgtcgtcagccgcgctcctcagtccttccgcgcggccggttgccaagaagagagaggaagagaggtagagagagaaaaggaagtagtcattgacacgtgggtcccacgtgggccccacgctgactcatctgccacgtatgacaaaaccggggcaaaaaccgcctagggacctagagtgaccaggttttataagttaagggatgttatatatctggtttttaggttgagggatgattttataatttggtgataagatgagggacctctggtgtactttttcctataaatattgtgggtgcagacccaaacattaaagcccaaaactaaaagattgacggcccaagaactagcccagagaaaaattatggcccaaggcccacttctcatggccgctcatatctcctcgaccatcatctcccacctctctcatcggagctcctctcctcgcctccaatggcgctgctcttcccaccaccaccccacgcgctctcccccaaaccccccttcccctccactctccgctccacgaggtcactgcgtctccgccgcgccaccgccgccgccgccgccgccggggccggagtctcctcctcttccccctcgacctcctcgccggagaaggccccggcgctggacgtcgccagcgggaagaggggtggtaagaagaggaggtccctgaagccgagcttcgagaagcaggccatccgccgctggtccgcgagggcgccgtcccagcgcgcctccttcccctggcagcagcagcagcagcagcagcagccgggcggaggtgagggtgaggccgcgggcgatcaggaatccggttggagtgggagctccacgctgcagtccatcgtggattacttcgacttcgactacgattcctcggatggtgatggcgatggcgatggcgatggcgtcgtggtcggcggcgaagcggccgaggcccaggaggatgggccgcgtcccgagccgagcttccttctcgggagccggccggtgtcagcgccgtggatgcacggggaagaagagcccatgacgaaccaattggtttctgacgaggaagggttggatggggatggtgcttccgaggatgagatgggtttagttgatggagacggagacgaagacgaagatttggggagtgaggaggagacgctaagtgagagctcagacggggaattctccgaggattatgcagcaccggccgcaaattcttcttctatgatggattcggtactggaccatgtttcttcaggtggtgggttttatagaggtactaggcggagtagcgtaaattcaattgttaacacaatgaggaattcgatggaggaaagtagtagaaatgctgcgattgagtgtcccgagaccgaggattttgtccagaagctcggtcctgtgctcctcccatgggagagggagggggatgtcgataggccgagaaagcgcagcaacacggagctggctgagaggactatcccagagcacgagctgcggaggcttagagatgtggcattgaggatgaaggagaggatgagggttggtccaggaggggtcactcagctcattgtggagagcattcatcagaaatggagggtggaagaggtggtcaagctgagatttgaaggacctccaagcctgaacatgaagagaactcatgatatactagaggtgcggttaccttttgctgtctcatgttttgttcattcacaattttttcgtggcgtgaaatctgatagttactttgttatcttgctcttatctatcaggagaggactggaggaattgtaatatggaggtcagggagatcagttgttttatataggggaatgaactacaaccttcgatgtgtgcagtcgtatacacaaactacagaggttaattttgataaaagagttagtagtaatagtgttgaacctatccatgttgaacataaatttcagaagtcaggtgcagatggactgaatcgctcagcatatattgtcaattcctctgaaaaacctacagagacatttgatatcgatagcttcttggatcagttgggaccgcggtataaagattggtctggtcgtggccctattcctgtggatgctgacttgcttcctggtgttgttcctggttacaagacaccatttagactacttccttacatggttaaaagtacccttcggaataaggaaatgacggctctgcgtagacttgcaaggcaaactgctcctcattttgctctaggtatttcagtgaacttatctgagtagcttttcatctaccgcatagtattcaatttgtcaattaatttccttcttttcacacttcatgcgtaccgtgtggtttagggagaaacagggaacaccaaggattagctactgctatcgttaaattgtgggagaaaagttctattgcaaagattgccatcaagaggggggttccaaatacatgcaatgacagaatggcagaagaaatcagggtaaaagatcatgataactattatcagtagtttgcctgtttgcattcctgtctccacagtgttatgtatgtgttgaatcaaataaacatggcattgcttgataagtagctattttgctgccttaattagttcttttgcttaattcacactttttgaatccttgaaatgtcaaatttctgagaaagctgagagtaacaatctgacaaagaacgcttaagaaatccactaatggactttgctttcttctcctctgcacttccatactaatttacctcttcgcctgcttgttcttgtgacgtattgaatgccttcttttcttgattcgatgcatgactgatggttaaccttgaaatatgatcattgtattagtttctcttgcacactgcagcctatgcatgttttgaatctgtgtaacggaacacttgcagaaattaacaggaggagtgcttctatcgaggaacaaggagtacattgtcttctacaggggcaatgatttcataacacctaaagtaaggcaagtcttggtggagaagcaagagcaagcaatcacttggcaggatgaggaagaattggctcggcttaaagcatcagcctcgatcagtgtcaaacccaaagtatttaaaaatcccccagttgctggcactctcgcggaaactagagaggcaaaatctcgatggggagattccattaatgctgagctcaggaaaaaggagaagaatcacatgattcttacaaaacatacctctcttttgaggaacttgaagagaaaattgattttggtatgctcttcaaaatgcatctctagaaacaaaagtttagtattttaatttcattactcatttgtaagtagcattttagctactttttcctccattgcacaaagatatctttgtgattatttgtgtaatatctactcctgtgcaggcaaaaacaaaggtcataaaagcagaaaaggccttggctaaagttcaagaatttctctctccagcagagcttccaactgatttggaaactgttacagatgaggaacgcttcttacttcgcagaattggcctgaaaatgaaggcctttctaatgcttggtacaactggcacttctcacttaacagttgtgatataaaatgcatgtggtgttttatgacttgtctatatgcattaaaattttctcaggaagacgagaagtttttgatggaacagtacagaacatgcacttgcattggaagcatcgagaattagtcaaggttcttgtaaaggggaagagctttccacaagtaaaacatattgcaatatctctggaagctgaaagtggaggagtgctcatttcagttgataagacgacaaaaggatatgcaatcattttgtaccggggtaagaactacaagacgccccaaattttgaagcctcgaaacctattgtcaaggagaaaagcattggcacggtctatagagctccaaaggcgggaggtaattcaagtgcaaaatctgattttctttttccattattttattttttgaactctatgtaagttgtatatgtatttaatcaattacatggtctaaaataatctagggattaaatcatcatatctcaaatctgcgagacaagatctggaagctgaagtctcaacttgtaagtcatttatacacgagttctctatgacagtatgacttatattttcttatagtagtaaacatttcttgatgatgttctcttcctatgtcatgaccatcaggtacgaatgcaagttgctggggaaaaaccagatgcggagttacttcaaacagttgaggctgatttgtctaaagatgacgataaaatagaggtaatcatgcatgaaaaatgctgagttcaaaagcactgctgcaaattacattttgttaatacacacttatagctcgcggtgtttggtggtgttgtgatcaccttcaaatgccggcacatcgctagtggttgacaggtagcttctgttgttgcaggatgaaggagaggaggcctacctgcaaacttacatcagtgaggatgaagaggaacctgaggatgatcagaatgaatatctctgaatcttaactggcgaaacttcggtgagtccgggagaaaagtcagtagtaaagcattgcatgttcatattgtgaaatttctgcagtgttactcaagaggcaggcagttttaagattcatctatggattattgccaacacaaattgacctgcaacagcattagtggcctttgtccattgcgagatcaacgacaaaggatgtagcttgagtgtgtgtggattgtggtgcatggtctgcagttgctgccattcctttttttttttttttttaccttggctacttccatagctccatccatgcctgatgccctgatggccttctacatcctgcagatttgaaaaggtttctgtcaacacacgatcaagttgtctgctgtgcagaagtttgcaaagtggcagtgtataaatcaggctcgtgtgagttcgtttcattttgcagaagctgtaattatatcatgccattttagaagaatcctccggtccacgttagattcatatttacaacatgaacatgtgaacctttcgttgatacggaattttgaacggttttctgcggaatctctcaaagctgagagcgcgattgctaatccgcgcgcgcacgtttccggcccgccgccggcgcgcgcctcccactcttttttttttcgtttttctttacccattttttttcgctttttccttttttctgattatttttttaatttttagcatgttttgagtttgaaagttttaaattttgagttgaaaattttcaaatttgaacttgaaagtttttaaatcttaacttgaaagttttcaaatctcgatttgaaagttttaaaaattttcaaatctggacttgaaagtttttgaatctcgagttgaaagttttcaaatctcaatttgaaagttttcaaaatttcaaatctggactgaaagttttcgaatatcgagttgaaagttttcaaatctcgatttgaaaattttcaaatctggacttgaaagttttcgaatctcgagttaaaagttttcaaatctcaaattgaaagttttcaaaattttcaaatctgtacttgaaagttttcgaatctcgacttgaaagttttcgaatttgagttgaaagttttcaaatctgagttgaaagtttttaaaatttgactttaaaatttaaatcgaaaattttcaaatctaacttaaaatttttttaatctgttagtaaaaaaaatctccataatctttcctaattactattattagtgttaagtatattaattaatagagatagttaagtatattaactaatagtgttaacagaggtagttaataggggaggagtgctcgctagcagcgagcacgcgctagctaggagtccccagctgagagcacacgcagctaccaaaaccaagaatttttttcggttttagattttttttaaatatttacataaataatctatcggccaaaaaaattacaaaaataaaccctgtcgcccacctctggggcggcaagctaacgtggcaaacgggggaggaacaggcgttgatggagggagggttttttgcaggaaaacccttgccgccctctggtggggcagcaaggggcccgaatgcaaaaaagccagtcggggctggccattctgcaggcggtcccttgccgccctctagccgggtggcaggcctcgctgcctataaaaggcttgccgcccagcccccagccctcattcctcccccctcaaatccagtgaaaaaaaaaagaagagaggggaggagaagagaagaaggggcgaagccctgtcggattcagacgccgatttcaggtaatattcatagatcctatatgtgactattgagataaatagtgtgtattttttaaaaatttgtttgaataaatgcattatatttttagggttttagttgtactaatctagaagtgcgtattgtagatatcggtaactacgtagatctactagtttggaatcaatacattaccgttgcattggcttacacaagaagatattacgttgtagatgtttattgcatgaaagagtaatatgatctagttatttcgttgacagatatgtcgaacaaacaaatattccaagtttaccatggaccaggaaacgtccgttacgggccaactggggtagatctgtcagattttattgtatcagaaaggggaattgatagaccggctgagaggagtgtaccttttataaaaggatggttaatgaggggcttgagagttgatccacagacaagtgacataacaatcaatgttatagtaagtcgggcaactgagggtttttattgggaattaatgccaattcaaaactctcgagtgtggagatggtatttggaaaatgcattgcaacgcgggtggcctctagctttggttctgtttgttcacccgaaggatccaggtgtgcagatgaacatggatgatggcgagggaccaagtgctgaagtaaatgagacttctgtggaggaggtcaatgcacgagaggacgggggcgtagtagctccactgggcattcaaccaggtggagtggccgacgagggggaggctgtcggtgccattgtggatgaaatggagagggaggattctgacaatgagcgtgtagaggaaggtgattcgtcagacgatgagacggatattaatccagcagaatgggctagtgaggatttttctgggctgatcgtctctgaagaggatagtgtgagatgggagtacaaagaaaatgaggttattcagggagcgatttatagtagagcagaagatatgaaggaggcggtaaaacattttgcagtgtcacttcatagagagttttgggttgccaagtcgaaccggtcgcaatatgaagttcggtgtgttaaggaaaaagatggttgtccctggagagtgcacgcgtataaggggaaatggaaggattattggacagtgtcagtcattaccaagcatacatgttttctacctggtgttcagaaataccacaggaacattacatgtgcatttgttgcatgtgagatgtatgtgcatgtcatcgataatctcacatatgaaccaaggtcaataatccgacacatcgaagagacatacaagtatactattagctatgccaaggcctggagggccaaacagaaaataatagagatgagatttggaacttacgaagcctcgtatgacaatttgccacgcctgcttggtgttatcgaggaaagaaaccctgggagctcttacgaagtgaagaaattcccctcaattgaacatcctggcaagagtgtgctgcatagggcgttcttagctctacatgcatgcaagatgacattcgtgaactgtcgtcctgttctctgcattgatgggacattcttgacaggaaagtatcggggccagatactaacagcaataggggtagatgggaacaatcaggtattgcccttggtatttgcttttgttgagagtgagaataccgacagctggtactggttcctgaaattggttaaaacaaaagttgttggtatgagggcaaatgtgtgcctgatacatgataggcacgctggcattctgcaagcgatagaagagttgcagtttgggagtatggaatgaggataccctggtgtttgggaagatgtacagagtaggtggtgcatgcgtcatatgggagctaatttcttcaagcaattcaagaacaaggagctcatgaacatgttcaagaggctgtgcaatcagaaccaggagaaaaaattcaatgagctttggaagagattagatgagttgacagccaaatgcagtgatcagcgtgcagcggctccatcgaccgccgttgctgaccctcctcaagctcttggacctctcccaatggatagtccaacattggttagaagaactggattggagattcggaaattttctcagtggattctgcatgaaccaaaagagaaatgggccaaggcgtatgacacaggtggtgctagatatggaataatgacaacaaatttggcagaagtttacaactgggtgatgcgcggtgtccatggactgccactagttggcatagtggagttcattttacatgggacatgcaggtattttagggatcggttctaggcagttcttccctctatgccgaacaacaacattttgtttggaactttcatgcagaaaaagctagaggagttgcgtaaaaaggccatgaaacatcgagctctagtgcaaagtacccaacagcacaggtttgagatactatgtcaagataaggcaggcaggggtatctaccgcaagagagtgaagcaggagtgtgttctcaaagccgacggcacatgtcattgctcttgtgcaaagccgaagctgctccacaggccatgcacccatgtcattgctgccgcagcagagtgtggcataccagatgcagtatatgtgtcacagtacttcagtaagcaagcaatatatcatacatggagcggcgagatttatgggttcggcatagctggggagttcacagagactaacgatgaagtactgtaacgccccgattttcgttcgggattaaaaatcattaaataatgcattttctaaaaattaaataaaagttaatcaatttaatcaagtgaattattgggaaaattaaaattttcccttaaaaatcattggccgagaatattttgtaatattctttttgccctaaaacactctccggatttttccatgaattttcggaactcaagaaataattttaaaagcacaaagttcattttaaccaattacataaaaagaaaaacaattaaaaatctcccctccttcactttgggccactttcggcccaaagccctccttctctcccttcctcggccggcctcccctctcctctcttgggccgtcggcccgtttccccttcccctcacgcaaagtttaaataaccccctaggttctcctccctctcttcctccccgacaggtgggcccggcgaccctacccgtcaggccctcctcctaccttcggcttcccaggccgaagccgccatggccggcggttgccgcccatgtcccgccaaatccggcgccctcccgctcgcgccctcgcgcccaaaccgagtaaaatcggttccccaccacctcctccaccaaatcccccacttttccccaatttttggcgtcaaatcgagccctactttgcccacgatgtcgcccacgttgccggccgttgccgcttcaaatccgccacgcccggccacgattcctcctccccgagcctataaaaagcaccctcgtgctctcctcttccgtttccccctcctccccgagctcctcgtgccctctcccgtgctccccacgccgctccgcgcgacgccgcccgccggcgaactccggctacacgccgccgtcgccgtagccaccgccacgccacgccacgccgttggttccttcggcttcgcctcgccctgccgcaccccggcctccgctccgtttccccatcccatcgctgcagccatcctcccaccgcgaacccgagccgccattgccatccgccggctccagccgccgcttctcgccgcttcagccaccgccgtgccgtgccgtcgccaccgtcggcatagccgcgccgagctccaccccgtcctacacctcttttccccaatctcgcaccgaaattccacctccactgtccacccgagccgcctcaactataccacctccagccgccacctctcgccgctctagccgtcgccgcgcagcgtcgccgcgctccaccgcaccctggctgccgctccactccgtccagaacctcacgggagccgcttttccaaaatcaaggtcttgccggccctcggccgcggcttcgttgtggtcgggcgtcgtcggaacgccgttcccgtcgcctcccgcgccggccgccgccatcctttccgccgccggtcgcctccctgtggttgtctcgccgccgcagccctcggtgagctctccctccgcctcctcctttttcccctcctccgccgctccgcgtgcccgctgtcgcgacgcgctgccgtcgccggcggtcgtctggccgcacgccgccacgcgccgtcgttcgatcgggtcggctttgtgtcgtgcccgtgtcccggctgcgccgcctcgtggccgcccgatcggctttgggccgatccgggccgtcggttcccgtggaccggcggtggaccacctcggtggtcccggtccacggtggaccgacgcccttgtgtcgctgaccgatggggcccacatgtcggcgccagccgccccttgctgacgtcagcgatgatcttttcctttgtaaaaataaataataattacacaataattcgttaataattctagaaattcatttaaatggctcaaaacttctaaaattcatatctaattcattagaactccgaattgagccattcaacttgcaaaattcatctaaaattgagctctacatgtttgtttagtttttatgtactgttttcttggtttttattagagtttttcctcgttttgcgtgccagcgtgtagaatccgtcgtttcggaagtccgcggtcgcgaggaaaagagttcggaagatcaaagtgaagaagcaaggcaagtaacacattccccttgagcatgttgatcccaatttataaatgttttactgtttgcaaataaatatgcatgttttgctaattacatggggtcagggttttacctatctgctcgcttgtgccatgtttacttgatatctgtcctttgtcaagtttgggttataaatcgactagctcgtgttacttatgtgacctagctagaactatatgcttagccatgcttaattaccactagctcagatgatgggataattacagtattagacctttttagtatcagaatgagctgcgtgcttgagacatctggccatgcttcatggtcgtaattatccaactaaaatgcgagtgaatggtgggctgtgggtgcatggttttgctagtcgctcccatggcaattaaggaccggttcacgggaaaccctgaaagaattcctcgtacttaccacaagccagcgtgggcaacggctgggcttgtagtgtagcttttctctagccgacgtacccaggcgagggtgggcgtgatggagttgggtcggccggggtgtccggttgatcggcttccggattcactgcggcacgaaaggggggctgcccgttgcctgctggggacgggggcgaaccctaaggtgtggtgcgatctgttagagggggttatgcgaagggtcctgtcacggcctctttccggtatgtcgtggtggcatatcggcgcacggaaacatgtcgtggggctgtgtcttgtgggtacagttgtacacctctgatcagagtaaaactattcgaatagccgtgcccgcggttatgggcggtcgactagattcaccgtgattagtcctaccttaataaatcgacccagtacactgtagttcaggtgggttggttgggcctgttcaacgtggtgtagcgttgatcagtggagatttaatgttactttaattactcaacagttttactgttttgctcaataaaatgttttgcaaccgcctttatgcaaatagccacaaaccatccttgtatccccttgcacgtctgcatcgttggtgtggcttgctgagtacggtggttgtactcagctttgctattattcccccttttcagaagtgtagtgcttctgagctgaagacgaagttagaagaccaaggctcagaccccagttgagttttgcctgtggagtggagctgaagccccgctaggatcgtctttttccgctgctgctgctttcgtttcggtgcgaggactaagtgcttcttctgtaagtattttacgctttatttacgtttggaactgtatattacttgtcgttttgtgtaccctggctggtcatggacagggatttaatacacaaaatagtctagaaatttgggctaaatttatgggcgtgacaagtactcaatattcctgaccatcgaagctccgaggcaaggctggaaggaggaggactcgtcgcatccgcaacgatatggacgagtcggaggctggcagggtgaagcgttgcagcaaatgcgatgaacatgggcacacctacaagcattgtcctaaagacaaggagaaaccaagtgcggcggaggcaggactatcaggatcagcagcagatggagctcgccctacgggtgaaggcactacctccactcgaccacgtcctaggcgtcgtcgtgccacgtctagctatgtggtgtagttcttatgttctatgttggcatgtggctttgcttgtaattcgtttcgaacttatcgatgtgtttatgtttcgtcgtgtaatgtcagacttcggcatgtcatgtctttaggtctcgtgatgtaacatcagactaaggcgcctaacatctttaggtatgctgatgtatgttggacttcgacacgtaatgttatgttatattatcgaactctacatatatgttaaattgcacgtcatcgttatgtaccattagtaacgtttgctatatttaaatagcctgtactcttgttgtacataattattctcatgattttattaatatttcataattttgcaagttatcttttgttttatattactactttttgaattgttctaacacgaaacactatatttttcagagatggcacgtcaggatacacctcagttgttggacccggcgatagatcaccgacaccggtctcaccttactgcggtgcagggggctcagcttgggacgttccaggcactgcgcccaggacttcgctcgtgctgtgagtaccttgcatcgcatcattcctttatgttttcatgtctttctcttcgtgaaattttacgaatatgtacgaacaaattaaccatgcaggtcgacgacatcaaccgggtcgtcgttgacggttcaacgacaatccaacgtttaggcgcggggattccggtacccgtagtgcagttctggcagtacaccgggacttcgtcacaggcacccggcatgtcgagtcagggtccaccactggaccatgctaggaccttatcggaccgcttgctgccttccaccttgctcttcgacatcactgacttcgacttcgcttcaggctcgacagaggacgtcatcggcccctcacagctgggaggcgcaccgccggtgcatacgcaggaccaggcgcaggcctctcctccgccagacactcgtgctacccgtgctgtgccaccggatcgtttcacctactcccaggaccacgtgcgagcacaggcccggaggaccaagcgtggtcgcggcgcggggcagggccagtagagcagtcttctctttttttatttgcttcactttccagtactgtatacttgtgtaatgactacgttgttgttatatgtgcacgatacctttcggcgcatgcacgactactttctgccgcaccgatgcagcctcctttattcgcgtgcgatacgagtatttgcccgccatttggcgcatacgaccaatgtaactttcggcgccgatcaggctgtaactttcggcgccaatcaggcgtacccaccataccccaccatgttcacatgtcaggggtatcactcgattttttgcgcctatataagtcgccttaacgagtgaggcctcacaatctttcagaactcagtcacattcagtactctcttccccacttgcttcattacaaatcctaccggcttttgtcaatggctagacgtcggggtgttgaggatccaaactggcgtagcgatccttgtgtatacctactaccaccttggtgccagcgtcctctctgcctatgcggtgatcgatgccaactaatggcttcgaggaatcctgatattcgaggaaggcgcttttttaggtgccctaactatgaccgtgaggtattttattatctgcatatgcttattcattccgtatgggcaatcgctttattcttcgtaacactactctattcggcagacccgcactacggcttgcgcatacatcgagtgggtcgatacagaaaatcccattctcgacctaaccacttgtttacaagaaggtcgctggtatttcgcatccgaaaatactgagcaatacttacagagaaaagcggcttatgaacgacaatgtcgtgaacaacagagcgactggcgggtgctaactacggcactccctccatgggaagcccgtccaagatgcaggtgtggtgatcgttgtcaggttcttcgttccataaatcctacaacattgggtcgaaggttctttgtttgtctaaatattcttgacgacgatttcatggtaagaatattttgattacatgaatccttattttctcacaacatttactaactttgcttgctttacatctattctttcctcccaggaaccaccaaggagatgtcaatacagagaatggatagacaccagaagggttctaactccacctagccgtgttgtgcagcttgaattactagagcaatatagggttactaaagcgcggtttgagagaggagagggatcctcacgtaggggttagctattatcggacaacttggcatattgaaatttctactgtcatgcttccttgtcccattactacatcgtcgttgtgttcaactattgcactacctccctcctagttcgaatctaatatcatctatttaaccacaatgtaaatagttgtatcatgttcaaattgtactactatttcttcatgttacataattctccttgtttaagtccatataatgtttctacgacccagactgcgataggcctatataaattatccgagtactaatacgtcgaataaggtacaaaataatacctcacttaacatatgaaattgcgcaacaaccaacttcaatacatttttataacaatattaacaagttttaccaataaatacttctttatttattattaacataacatagaaaaatcttttggccgtactttttacatctgggtccctattggggcggcaagggatccagatgcaaaaagtacggccgcaagctctttatgggcggccaaaattgcgat

SEQ ID NO: 5642 - DNA, 25694 bp, Oryza sativa
ccccctccccctcccccctcacctacctttctcgccttctcctcaagttgaggtgtctttgctccgttgttttccccatctccagcagctccccgcgatcgaatccgccatcacctactgttggcaccacgccgttcatctgtatccaccatccacggttgaccatcacctcccacagttaatcagctatccctccaagcgcgatgatcccctcctctttcttacccctacctagtaccctaaatcctaactgcgctgccttcgtcaaggtcaccgagaggaggagctgggtcactagagtagaatcacgaaacaaatataagggcatgtttggtttatttcaactcctagattcacctcaaatcaagctagagcccaccaaatagtctagctccaaaaaagaaaaatggaacggagcagactagatcgctccacaaaattgtactagcggcgtggagcagcattcccgtagctccacaactccaacttcaactcaatttcagaagtaacccgaaactggaaccaaaattacccgcaaatgcatgtaccgcttcccccacgaagaggagcgcacggtgcgggcgaaaaaagcggtacatcgcactactacaaaattgattttttatggcatcaccttattattttctctagcggttatatgtggaaaccgccagcgaaaatataacaagggatggggggttacaaaccgccagtgaaaataaatcttcactggtggcgagttaaaagagccgctagcaaaaacatagctattttcgctagcggactacttaaatagccgccagcaatttttgctagcaaatgtttaggaacgccgcctgagaaaataaattcaacatataaatacacccacctcagcctccctcctctctctctctctccgcctttctctggaaaacaagaattttcagaatataccaccgattacgcaccgttttcaggataggccactcaattcgcactacttttagaatatgccatttggatgcgaattttcttcgttccgtgacactcccgtccttccaccgtcacttcttaccggcgccagcaattccgtgacggagaaggaggagatgtcacctccggctcaccggccacctcctccgtagacacgcccgttcgccccaccggccattgccggtgagccccaccgtcgacggcggcggcttgtagccgagaggatctggtcgccgaggtcctccacgcgccgctccccgcacgcgcatctggagctcgctggcatgggggaggaggagcttgccgttgcatgaagaagctcgctggtgtgggggaggaggagctcgccggtgtgtgagaggaggagctcgctggtgtgggggagggggagcttgccggtgtgtgggaggaggagctcgccggtgtgtgggagggggagctcgccggtgtgggggaggaggagctcgccggcgtgggtgggggagttcaccgctgtgggggaggaggagcttgcccgcgtggggaacaggagctcgccgatgtgggggaggaggagctcgccagcaggggtacaagagctcgccggcggtgcccagatgagcgcttgaaaatggcgcaagaggaggaactgacgccacgccggttcgggagacggagtgtcacgaactgaagaaaatttgcgtccaaatgacatgttctgaaagtagtgcgaattgagtggcctatcctgaaaactatgcgtattcggtggcatattctgaaaattctcctctctccctactcctctctctccggccttcctctaccactgccggctgccgtggcttccatcgccgccgccgcatccgtcctagggaaagcaagggcgagggggatggatccgctgccggcggcacgcggggagcgcggggcagccactgcccgccgcagggtctcgtcgtcacggtcgtcgccgccgggccgctgggaggacggatccgccgccgtcgagccgcggggagcgcggatccagcgctgccgggccgcggggtggatggatccgccaccgttgacgccgggcaacggggtggatggatccgccgccgtcgagccacggagagcgcgggatccaccgccgccagcacacggggagagcggagccaccaccggccgtggggcctcgtcgttggctgcgtcgcggatctcgttgtcaccgtcgggctgtggggagcgcggatccgccgcccgggctgcgagcggtggtgctcggtcgacgacggcgacaacaggtggtagcggcttaaaatttatgtggatttgtgtttggatttctgtgaatttctatggactcgtgcaacgatccgatccggttagtgtgtttggagatgggaacggaaatttgtgtgattgtgaatggaaatttgtgactgtaaattggtgatgtaaatttatgtggatttgtggatcgatgagtggatttgggattaatttgaactggcgttgacggaggcggacggagcggtgttgctccgtcattttttttagcctcggcaagtattaacattggcagctggtatagtctaccgcctgtgaaaattcattttcactggtggctagcttacaaaaacagctagagaaaatggattggtgctggcggttggctaccgccagcgaaaacactgtattatcactggcctttactcactggcggtggcgttggccgtcagcaaaaactcattttggccgccagcaaaaatagtttttctagtagtgtcggcagcacagcggctgtagtgcaggttccttcccctctctttccctcttctttctcttctcccctcatgtctcttccctctcctgtccatgagattttgaccaccggtggctcttgctacagacaagggtgacggtggaggcgtgaggaagcaagcccccatccctccccccctcccccaagccccaaacggtgtcccctcctcaaacacctagaaatcccccaattttttctttcaaaggtgcatgatttctgtgggatggatttatttttcggggtacattgaatcacagcaggtgttttgttctctatttctctttcaaggtgagatgataatgtctgtaggtgggttgggttgtatgcttgatttattacaagttgtttccacggttctatgacattatttcagattgatgcatatacttgtatttaaggaaaacatgatgtatccaaggatgtattttgtgatgacctagtcgttcgtattacaggataatgtattttgtggtcctgctacccgttattatttctaaacatttttattattacatatatgtcatgcaacaactaaaattttatcaattttactttaatagaaaaaatacccatgtgttgcaacgggtaaaaatattttttcagtgatacaacaactattaagaattgagcaataaattgcatgcctctctttgacttagcccacaagtgaagccacaggcccagctcgcacatacggtgcgtagctcgcacatatggcatcttcaacctacgagagacaatcacgtgcccgtatgccagagccgatcctccctatcaaattgggctgaatctttctcgatattccaaaattggctgagggtgtttgatccgctcgatccctttttatattttttttctcaaaatcggagtaaatccataacactcgggataaaaatggttaggggaagtcaccggtcggccatcattggcgaattgagattaaatctgaataatttaaagtccaattgaaagggaaaacgcgaggaaaataatgaaagataagtgtggaatcgattttttaattaattgaaggagaaaacatacggtgatacaaaccgacgggacagcgggacggaaaaaataatacggcggtaaaaaaacaacgaaaaaatggcgatgagaaaaaccggaggaaggctgatcgggaaaccagcgacaaaaaaataatacgagacagaaaaaaaaacaaaagttttatgtattttttaattagttatatatagatatgaattataaaaaaccaactaaaaatcgactcagaaacggatgacgtacgaagatcctgataaaaatattttcaatttttataatagtagagattaaattttaaccttccatacttatagcgttcaaatcattaataacaataacaactattaatcctacatcaaataaatagaaaaataacaagggtagcattttccatcaccctgggctagccaaacacttttagggctcctttggcagcccgggatcccaccgggatcccagcccattccctgggagaaaggcccgcgggggaaattgtcacgggttttattccatgtccatttggaagcccacgaggcagggatttcccggcccaatccgctaggaaaccctagggaaaggtccccgacctccggaggtcaggaatttttcctctctcgatccgccgctgcttctcgctcgcgcaaccggagtcgcttctctctcgcgcgaacaacagcgggcgccgccgcgcctccttctccggcgagacggccaccgccgggactcctcctccggcgagaagggtaagcccttctccttattcccctcctctcctcctcctgggtttccattctcctcctcctctagggtttccgcctcctctagttagctcccaatctcgctctccggtctcagcgcttgcatcgcaggcaccgacgcgtgggcgcggcgggtggcaccacggcagccggtgcaacgacgacgaagcggcgagccgacagcgcgggcacacggctccaagcaggcggggacaggggggatccaaggcagcgcgactcaccagcagaggaggcgctgaggcgcagatccgcctcctcctcctcgctgcgcgacgcccgccggtggttgcccggctaggtttgtgcgtgcccttgtagctgctgcttgattcttgggggttcgttcagtacttcagttttcttggtgtatgtatggcatgtttcttgatttggtttgggagagttataatctgttctcctattctttctaatacattgtagtattgtaccctgcagtagcatttcattttgttatggaagcgattcagaaggggatatgggtgggcgtgtggtgctcttgttttagatcatgaatgagttttggtaagatgatgttctaatttgatggagtaggttgtgctctggttttttctgcagtgtaattatcatgcttagtgcagtctaaatatgtgagatcaatgtgccagtcccaagaaatgaggaattatcacacatgcagtgaggatcattcaactagtgaggtatatgagaaattttagtctgcaaaccagtaacagtttttttctagttaattagagatgcagttcttttagttagatgctgtcagctctgttaacctagaggtagatctcagtactggttgagctgctagcatcaagttttttgttttttctggaggtattttttagtctgatccattcttgtagtctctgtcagggaactgtagaattagtggtcaatttagcatgcatgttgggactaaataaatggtaacaatcatatttttgataggaactcatacttactacaaaataaagtcttttatgctctatacttatacattagtccaaactttagtttcatgtcatgtatcaccagcagaaaatgagcaaggtggcattgtgcattcaaaaaacacaagctttggcagcaacctatatacaaagacacgcacacacagatgtttcaatctcctctctctcactcgctgcacaatacactggccaaacaaagtgacctagtagtactgattaattaaaacaacaactactactactactttttttccttatcatgtccataatgataattcataattgtgctcttgcattcttcctcttgccaggattcaatttgaattgcatgctcaacttactttcaaatatggacttgaaatagagtattgttggaaaactatcaatacaaaaacatggacttcaaatgcgtttgatttaaaaataatggtgtgtatctgcatgtagggtgtttgataccaagagtttgtttacgctgatgtagctgacaattgcaatatgttggttgatgtgcatgcatttttttacctaagctagtatcaatggccgtccttcaaatttgattgctgaagtatcactattttatatttattacttaaatttcagattatctttttcatcctggcagatttattagaatatatgaagatttgttgaagagatgatgaagaagatagaagagataaagatttaaatggacccatgtctcattcttgatcaagacatttgtggatataaatatgatgtacagttctatatttgtggatgcaaggatgattccaaagattttaaattttgtatgatatggatgattctaaagtttaacttatgtcatgtcacgaagttggtttccacataaactcacctatatttctttgtatttttctgaatttctaatacttgttgattttttatgtttttatatttttttctggaatttttgtaggttgtttcctatttatatggattttctatattctttctatttttcttgaaatttctataatatttctagagacatattttgttgttcaaacactgtttagcagtttgcctgtctaaatcccccttcccccatcaaccccctcaccctactcccaaatggtatcagggaaaattcccctaacaggagtgattcccctggaggtggaaggggatcggttagtgcaggggaaaatctctgtacgggactttttcccgggggtttcctccccctgcatccaaaggagcccttagggataaagctagctcccactagagctagtgtttgaggggaattaactatttgccacttatccaaatggtatttttagatttgccttttttttttgcccttttaaggtgatggcttcttaacaattttaccacttttgtttacgtggcgtgccaacgtggcttgcaaccttaaaaagcagagcgggacccacaaatcagcctctcccctagctttatcttccttctcgttcatcctccagcttgccgacagggaggagctcgctcccaatccggcatccctccctgcctccctccgagcccagcaccggcgagctccctacccccctccaagcctggtgccaacaagctcccttcctccctccaagcctggctccggcgcgtcggaccagttgtgcaagtctacgaagatcgggaccgtcgggttcgtggctcatcgcgcggcggcccttggggcatgctgccatgaggttgcagagcgcggcgagcacgtggtccaccgccataggcgatggagaggttcgacggcgacaagcgacggcgctggcccgatggatagcaggtgtgacgcgcccgctggcgcgatggagaggttcaggagcgtgcgcagcggcgcagggcgtcgtgccgcgcttgctccgtcggcacggcctcgcccaccggagctacgcacgggtggccctccccttagcggcatatctcctcggtggcgggcgtgtggaggtgggcggccgtcctctcagcggcggtgccggagctcggggacaccgggcatggagcgggcttgtccccattggcaagctggaggatgagtgaggaggaagatgaagtgaaggggagagactggcttgtgggtcccactctgctttttaggttacaagtcacgttggcacgccacgtaggtaaaaatggcaaattgttaagaactcatcatcttataagggcaagaaaataagagcaaatttaagaggggtatttggataaatggcaaatgcaatagtgacaaatagttaaattcccaagagtttgaagctagaatttgagttcgagcccttccaaacatgctactccttccatcccaaaataagtgcagttttagcactgttcatgttcaacatttgaccgttcgtcttatttgaaaaacaattatgattagtatttttattattgttagatgataatacatgaatagtactttatgtgactaatatttttaattttttataaattttttaaataagacagatggtcaaaacgctggagacgaatatctatagctgcacttattttgggactggagatagtaggagctatctgaaggagactacgtcgagacagagacaaaacgattacgtaaagcttgatttccgccttcaggggtttctgaacgagagagagacagacggcggcgggcggcggcggcggcggcgagggagccgaagcctgagaggatggtgtttggccggagcaagtcgtcctcgtcgacggcgtctcctccccctgctgcggcggcttcctcggcggccgcggcggcgtgctcggagctgcgtgcggcgtaccacgagtgcttcaaccgctggtacgcggagaagttcgccaaggggcaatggcacaaggacgactgcgtcggcgagtggcacaagtaccgcgcctgcctcgaggtcactcccttctcgccgcctccgaattcgatcacagcatcactgatttattaccgatcccctcaatttgttgcaaagacgactgccctagggattgctcttgtgttttcgcagtttaggatggggtttcatttaagtaggtttttagtttatatggcaagaaatcgagttgttttctagtgtgttggttgctagatcaagttgataaagtggcttatgtaatggtgatggctaaagcctaaaggggattcttctttgaagaatcatctgatttggagctcctagttagacctctgtctgtttgttggtcatgattcaggctaggcggcgcatgcgctgcgctggcctgttgaattcctccgttacaaatgtgtgagattagtgctgcttgattcgctggtgctgattgttcatttttttcgcacttgaagtatggaaacacacacggatctttagggatttagtccaaatcgactatgcaactgtttgggtgagaagtggggctctttgacattcagacattcagagtggagttgtactatatggcagcatagtggctgcaatagagttttgagggaatcgcctttccgtcacttgacagcccttttgtagattgtctatactgtctctttgttatttgatctcataaatcttgatgaaattcatcaggtcaatctttgggctggcctgtcttaagaaaaaaattttgtgctgctgtgtgcaattagaaattcagaaacctttctgaaactagcaatacaggcatctattttccattcttgaacagaagttacacaacggtgtagttgtccttgcatttggtttattggtttatggaaaacagttggggaagaatattctggtattgttgtattgctaactggcatctgaatgctttccaaaccattttcctacatggtgaattcgcaccattgtatcagcttctagccaattgtagttagtgtattgctgactgagaatttgcactagggctagcccagtgtgttggaggttggcaacccagcctgaagatagcccatttgtagcaaaattcaatgttcttgatgagttttgtttcttatagtactaagttatcagaataacgtgaatattcatgttttggggattgagcgcatcaattttctgaaatctgacaaaagagtgatcatgttgtggtattcatcataacatatttgtctgagtatttcccaggatttcttcaatttaacataaatcatgcctcccatcaccattgtttcacttgtgacaggcctctgggtaaattatgttcctcctatgaatatgatgcttgtttttcgctaaacgaatctatggatgttccatgtttttattacttgcaggaacatctggaagacaagaatctcaggcaaatcctattggaatcagaaacatctgcctactatgcccagtttgatgctgattcttcttctcgaaaaggtggcacctcgacgaagtgacaacctagggctaaccacatatgatcaagtttcgcttgactcaacctggattaggagaccctcatagatgaacgaaaaaggtgtttgtattttacatattagatgcatgttcatgctgttgcatcgcgctgcagttcagcagctgagatgtaagcttttccaagatcatattgaactcaaacctacaactttgatgtaccctgaaatttgcagcagtttctcttcctgaatctgggagaacagcttcagctatatgtaaacttaaaaaatattctccaacccaccaattttgtgctgcatcgatgcaaattttcaatacctcctatatgccatcttccaaagtcctttgagcatagttctggtagcgtgacagtgacttgcagtcttggaggctcttgtgttgtccgaatcagatgccttgactttgttgtctattatgatggattcattcaacaaagcttattgtttgtcacataggcctgatcctctctgatgtggtggcaaacaagcagtgaaagctaccagtctaccactcactcagggaagcttcgtagcaaagcaaagcatcagccttcaccttgtccagagcccagagaaaagggatccccttcaagctgctgttcttcatggccaagaaaggcaagaacaactctaccagaagagcctctgcttcttcttcttcttcctctgccgcagccgatggcgatggatcgccatggctgcggctgacggccttcgccgtgctcaccctccactcggctttctctgcatatctggctagagatgacgcgaggctggtcgccctcgtcgtcgtcggctacctcctgatgctggtgctgctgttctatggcctggccgtgcctgtccaacagaagagagactaaggtgaggcttcagcaatcagtcctcaagcatgaacctgccttgtttttttttcctttttgctggtttggttttcttgcatggtttgatcttggtattgaactatggatgttatgtacaaccctgtacatgctgatcaaatgtgtatctgtatgtttaattattgatgttaccaaagaatcacatgtataatataagtaattcgaaagagccacacactatggagttcagtgtacacttgcacaactgcactgagctgttagagttattgtacatatactgatctagatcaatgcttttatttgaatacttgtaccatttgcaactttgatcaggattgtctgctcgagtttgtactttagcggttgcatatattggaggcgtgtgattgatcagaaatgtctagttttgtatacaaatacaagcacttgaacaagaaaatcctttgaagttcacgtcagggaaaaaaaaaagcaatcttcttcacatcaaacaaaaactccctggaaacagtgtaaaagacaatagcatgaaagtcggggatatgcttctgaccatcatcacaccggcagtaaaaaatatcagaaattttgtgttgtagattttcttagtatatgacaatgaagttttttttttttgaacgaaccattcagatgctacattgattattattttaaaaatattcccaccagatcctaaaaaatatgaaaattcaattaaacaaaccaatgatttttaaaaataatctctgaaatctcaattcaaatcaccgtccccatgttttaagcctcttgcaagcaaatatgtagttcttcatactgtaaaaactttgcgatcgaactaataatagttggaaatgggatgcgttaggattttaaaccaaaatacagtacatcgcagcaaatcatcataagttaaatcagatgcctgagatgatttggcgcaagctcgtcccattcaaaagacttgggctgtgtttagatccaaagtttggatccaaacttcagtccttttccatcacatcaacttgtcatacacacacaacttttcagtcacatcattttcaattttaaccaaaatccaaactttggatccaactaaacacagccttggtaacttcaacaatactgtccctagaataaaataaaatgatatgacactagaacagagaatagcttagtactaactacccggctcttaggataaatcgtattgactatacatgtttttcttacttttccaacaagtgctgacctaatcccaacagcaaactcactttcaggctttcagctattcccaaataaattttctgaataaagtcatagacatgacaagataacgttcacagatcaccacaaataaactttcatttcaaccaaaaagaatgcataaatcccatttgtatatgttaccatgaaagagaacataatgatagtactggtaacagatactatgattttgtatgaactgacatgcctcttctcttcagtgggcaatgtcagtcaggctgcaatggtcaacacagagaatcaatgatttgtggtcaatcacaaacaaagagaataatccaagaaccaaatcctaaatcctgcagctaaaactgaacttactagttattacaggtgtaattaagtttccaaagggccttgctgggacaatcatctcatcacagatcatctgtaaatcagaacatcctccttggttgaatagagctgcattagacatgttttcctttcccacaaaaatgttctgtcaagcaagcactatgaacagaaacaaactagtctgtcaggaaggatcaggatcatgcagcaaaagaccaaaagtagttattccggtgaaacagttgcttcggctattcagaacatttgcataagatgaacattagcgatgtaagatacaatgtgtctctcaacttacaaaaacgatatacgagaggttttatgacagtaataatgcccaattttaactattatagcgagttgactgtagtcaacccagccgagtcaacgtagaactcacgcaggatccacactttggcagccaacctttcttcttcctcttttcccctcctccatctctctaggccgggaggcaggcggcatgcctaatttagatgggtctaatttgggccgctaccattggtagagtccaaaaatataggtgggccggatttagtagtcgcgaagtaaattttagcgggcctacatggactaggcttggctagctatctgtctgatagattagatattttgctaggtgggtgctgacgtgttcacctttctctcaaccacacgatatctcatagtcttttactccgaaagttggaggttacacgtgtgctacaaaaaagtttcgagtcacctgtatgccatgacacaaattttcgtttacctatgtgtcattccatccaccttctgttagagaatgagctctgatatatgagacccacatatgaaaatgaccaaattacccttgaagcattttcatctctactactcctctcccgtgcaatgccctagcctagccgccgcctctcctcgccggcacgccaccgcctctctagccgccgccgccgccggtcgtcgccggcacgccgccggtcgcagccgccgccgatttctcttccaaatgttccaaatagagcaagggcaaaatagatctttcaaacctccgttagtctccgttagtgttattccatccaaagtggcgcacaggtaaacgaaagtttatgtaatggcatacagatgactcgaaacttttttgtggcacacgcgtaaccttcaattttattaatggcgtaggggtaaaagactcacgatctcaaattcccaatcgaacggcggacacgaaaccaacgatccagtttaccctcgccgtcgccgccgccgccgccgccggagattccgccggcgttcacgcgtggaagctgcggacctgctcctccgcccccatccgatctccctggagcgaccgccacctccagagtccagaagctcagcttcgccgcccgagctcgatcgccgtcgcgcagcgtcgcagctcgagtgcccccccccccccccccccccgcctccgcttcgtcggcggcgaggggcgacgagctaccggatgcattaccagaatcagcagccaatcgagctcgccgtcgcccgcccacatccacaccagaatctgcagccagccatgtatcagaggtagtattatcttacctgcaatcctgcattatatttttgtatggttttcccgcacgatttgatctttggtactccctccgtttcacagtgtaagtcattctagcattttccacattcatattgatgttaaaagatctatccatctagatttattaacatcaatataaatataggaaatgttagaatgacttacatcgtgaaacggaggaagtatatgtgtagtaacaatcagtctgtatgctcataaaatggtgtgtttatatatatttatttattttaagaatcaaatgtataagcgattcgaaagaagctaacaaactatgaggttcaatatatacttgcacaactgcactaactgaataattaacaatttattgtacatatagcctttgtactcttcgcaacttttatcttcgtcgccttcttggatttatgcttcagcggctgcgtatgtaggaggtgtttgattgatcggaaacataattggtatgcaagcacttgaacaagacaatcctttgaagttcatggcaggaaaaaaaaaagcaaatcttcttcacaacaaaacaaaaactccctgcaaaaaattgtgcacaagacgtcaggaccttcagtggaaaggatatacttttgaaaatcgtcatacttgtagtaactagtaagtataaaaaaaatgcttgttctgaataccaaaaatatcagaaattttatgttctttgagatgatttttttcctgaactaaccgttcagatgctgcattgattaataaccttaaaacttctgcgtccgtgtttcaaaaaatatgaaaattttcaactgaataaaccatgggatataaacaagtgtttgtttgagaagtagattactgtcaaatggataagaaagaactagaaaagtaatctatgaatatgtgatgacttactagttacaattcaaatcactgttcccatattttcagcctcttgcaagcaaatatgttgttcttgatactgcagtaactttgcaaactgaaaataattggaaatgggatgcattagcatttaaaaaaaaagaaatatagcagtaatccatcatgagttagaccaataatacctgagatgctttgaggtcaagctcatcccattcaaaggatggatttgtaccttcaacaattccggcaccagcataaactaaagtgctatgaccctagaacaaacaacagcttggtaactaattggcccttaggatatggtaacaacatggacatatttgacaaaaaaacatcacatcccaattatatgatcaatcgtactgactacatttttttcttacttttcctagtagtgctgatctaatcccaacagcgaactcactttcagctcctccaaaccaaccaacaggtccagcatacattccacggtcaaaaatttctgatggacataacaatagaacattcactgatcaccataaataaaccttactttcatcaaaaaatcttttatcgtcaattttatttgtaattatgaaaataacaatatagttgcaatagattatagaggcacataccataatcttgtatgaattggcgtgcctcttcagtgggcagaccacaaacggctgggctcggatgaagagtatttaggatgtcaaactgcaatggccaggccaacacaaagaatcagatcgggtgtggtcatttttttgacaatatggtaaattaaaatccaaaattcttcttgcaagtaaacccccaaaaattctgaaaattccaatataaaagactgaagaaagccctgaatcatagactacctcatcgtcttcattcctcattcttgcagctaactgagctgacaggtgttgtactcttggaagtttccgaagggccttgctgggatggacaaccacatcatcgcagatcatctgtaaaatataataaattccttggttgaataaaactgcactggccatgttttcccccaataatattcttgcaactaggaacaaaacaaactatgtcagtatcatactaaaaaaaatcagtcagtgtaaaactcaacttgcctccagcttcttctttatgctgtcccgtactatagtaaattcattatcctctttgctactgcaagaaagttttatattaggacctccttttattttcttcacggacggtgttgatatcgccttaaatcatctggagataggttcattatatgtttatgaatcgaagaagggaaaggtaccttagtagcaaatcttgaccaatttgaaagtcatcagcccttgttttcccccttgctcgtgtaccagctaaagcctcgctggaaatgtttaagtatttccgatgaaataattgctctggctattcagaatatttgcataaaatgaacattagttagaacttaggtcattgttatttaacatgagaaggccaaaataagaaaaaacatccaagttcatgtaaatatagtaagagatattctaataaatcatttggagtaaaatcgatacaagagatcacacagaagatgtgatgaaggaatttgtttttcagaatagaattgacatacactatttccaacaaatgcaggagcatcaggtggctgtatacagaactgataagcattttggccctcaacctgtatattcagtgtcagaaagatctaattgttttaacagcaatacaagagatgcaatatacctttaaacatgccaacagttcaacagggtcaatgcaagtatcagtaatatatctgctacaccttgccagtacgacctgcagaaaatatcgatgcaagcttatttcaaaataatgatcacaacatgacttgtctagatttttttttcttttggggaataaacttgtctagattttttctttagcaaacagtaaatgaaatgaataatttacctttactaattctctttgcttccctttaatcatctggagagctttagtaacggcaagatcccaggatgcctttgtggggacatgattaagatttagtatggttgtttgcagggtggaattgttcactttaattggactggatgatatctgcagaaagcacaacaaggttactatcttccacagttccacatgactgacagaattggaagaaagagaaatgcataccttctgcaaagttgattggagctccttcacagcattttgccatgtccaagaaagtgaatcatcccatgcaatcgtcgttgcgagaaccgagctctcttcaagctcattgtactcaacctacaccaagtatcagaaacacttcaaaggagtcagtatcacattccatctattccaatccataactggggtgatcctggtaattaagtaaggacttacttgaggaacaatgaagtaaaatgatccaaattcctcccattcaactgaatgatcgctcgtggcatcgaagcggatagcaccataagcacgaatcagtgggcaatcccttggaagaaatctttatggacataaatcaagtcattgggtcagcaccagcatgaacctcattggaataaaaaaaaataaaagcaatcatgaagcaacaatcaagaaattcaaagataataaaggatcatgtgaatagttcaccatcaccaacaacacagtaggagaccatgtgaagtgttcactgacacagtatgggccaagaccagcatgaagctcattgaaataaataaataaataaatttataaaaacaatcaaggaattcaaagataattcaagatcatataaagaattcactaacacagtgcaagatcatgtggtttttttttctcttgaacacacgcaaaagttttgtgcttcatgataaaggagcaccagagaaaagtgtcttaaaccaatacacaaagcacttccaagtgagcatttatcccttctatttatttttcaggaagaaatcgccgtaaatttcttattaatccaactgaaatttatcaaaaaaattactagcaactagctgttcatttacttcttaaatttgctacgcatggttagtttctactattgtaatctctctatttttttaaaaaaagttaataacatcatatactaccccatcctaaaatataagtatttttattttttgaatagtgtaaatcaaacatttttaactttgactcttaatagcaaaagaataaaaagaaatatgttcaaaatcaataaacggagtatggtgagaaacgtccagggtctacagctaactctatagagtggtgagttagacaacctaagtttgaagcttcaccccttctaataatttgatattaggtcatttcctaatattcatgtctttttagtaggaacatatcctatgcatacaaactttttgtgcacactccgtgcacaataactagcaaatgtcacgaaaaattctataaaaaattgtacacatacttcaaacagtattacatctatatgtaaaattttatcttcaaatttattatattttagccgtaataaaaaatataaaattctgacagatttttacccttaaaactgtcagatttttcatcttttgttactgctaaaatttaatgaatttgaatacgaaactttgcatatatgtgtaatactaataggagtaaatgtctaattttttgtagaacttttcgtgaaatttgctagttagtgagcacgagaagcttatgtgcgtaggatatgtttttagtatagtcaaagttcaaaatcaacatttatcatcatgtattaaaaaatgtagtagtagatggcaccatcgattacctcttgatggcgcgccagtcgcggagggagaacggctcggtcccgcggaagaacacggcggacccgacgccggcgacgctcaccggccgctgccgctgctcccctccgacgccgcctgctccgttgccgttgccgttgccggcggaggcgatggcgagggccgggcactcgggcaagggagcggcggcacgcgcggagaagaagcagcgcgcgcgcaggtcgccctgcgcgtgcagccactccacggcgtcccctcgctgccggacgggcacctcgatgcggatgatgccggagggcgacgccggcgggtcggcggcctccagcgccgccaccgcctccctgagctgccccacggcgtcccccgccgcgcccgccgccggcaacgcccgcgtctcccgcaccgccaccgcccccgcccccgccaccgccgcgccgcacccattcatcgacagcgagcacgacggccgctgcacccatcttcccacctataccaagcaaaagccaagaaatgcgtcaccgatcagctcccggaggaagcagaagcgaaaagaaaccgtgggagagagagagagagtacgtacgagtctcgccgacgggagcgggcggcggccggaggagcgcagggacggcgacgaagacgacggcgacagcgtccgcggtggcggcgccattggctggtttgcgaggtcactgagcggtgtgaggcgtgaggaggaagaagagggtgagtgagagtgaggtgaggggtgccccacgcgcgcgcggaggggagttcgcgtcgcgagggaaagcgcgaagagataagaggagattctctctatttctcagggggataagtggcacaaccgtaattttccacgcccctagctgccagcctgccacgtggcagggggattcctacaggtcagcactgtggtcatttacctttcaccttaaaggcctgtttggaggagcttctagctgctgcagcttttcccagaataaaaacctaggaaacctaatttttgtagattctggttcttagaaagcggctaccaaccagctgcatctcagaatcttaaactcccctaaacatgtcatctagtttccatatcattaaatacattgtaacataagcaaaagtctaatgtagcaagagttaatggtgagagaggtaaaaagataaagaaattatttctcatgcaagaaattatctctacacaagaattaagaatgaaaagatactatctatataagaataaataggtggataaaaagagaaaagagaggtgattggatgggaatttaatttgaaggcacccaacccaggtcatccccaaccctttattatcagtaatatgtttcctcctttggaagaagaaagtagtgttgaataatttaagaaagtagtgttgaataattttgttatcttttgtctcgtctctattatataggagtatatctgaagtccgcatggtacacgaaatcaatcaatcaaacttatctgaaaccattttttttcttttccgacagattttaaacaaatttgcatgcctacgtcacttttatgttccaaaggatattataaacaattcacgcgactattcttttacttttccgacagattttaaacaaattcacatgcctgcgtcgcttttattttcaaaaggatattataaacaattcacgtgcctacgtggtgtagccacagaatgattttttacgtctaagagtacgtgtaattgtacaggtatttagacagggactgaatatgttaatagtactcatttgctcagcatttaaaaccactttactagacaccttgacaagcatataaacagttagtttaattggagcaccataaccacaagcacagtgtggacaatgacagtgtgaaaatagtaacaaaaaattgtcacctagaagcaagttcataattttgccgagcttgaattattggggtgcaagggttgctcattgaacaagtgctaacaccgataacagaaaaaaaaaatcctcaaattaaacatggcagttcttggaatctaatagactgcaacaaccaaaagatgcgcatgcgccaagatgtttttcaactcatctcaatttcatctttgaaatgtaagtacaccctgagaaaaatcaaggcttgagggccaccgcaatgccgacctttgagctcttgtcaatggccttggtgtcaacttctgctgagatggtccacacagactttggcctccactcgtgctggagcagcgcgctggccttgccggaattgttgaagcgggccttcacgacggtaagcgggtcgagagtgtgctgggtaccgaaggtgagggagttctcgttgctcgagaagctgtgggtcagctcagctccaacagctgtggccgaatggttcacaatgtggtaataagatgcagtgagactatctcccttgttgttcctgcaagacagtttcaaatcaattatggattttggatttttggtaaacaatacaatcaactagcaagtcctacatatgggatcagttatatctatctaaagatgaggataatagagattgatgattagttgatatgagatgcaagccaagatacttatttctagattcaacatatttgtttgattttaataaaagaatgtaacaccaaacgtcagttttcaatgttgataaggtgtgtattgtgcaaagtatcttgatcgtatatggtcaactaaaatagtagcggcttttgaatggagatcacaaacatggcttgtaaacattatcttgctctctgtagttaacgagaacaaggaaacatgtcaactacaataagatattaacattgataagtttactctattttatctcatgtttcctaccattattgaaagaggtagatcatgaaacctgataaaaatatatatatataaactctatttgggctataagttgttcagatggcaagaacagacacattgcttctagcgggacagatggaatggtcaataggatgtacaaatgtggatttcacaataacttaaagagttatgaagttagaagatgatgaaggtaacaattcactgtaagcccaagacacttacaggttcaatgacgcgataagatcatcattactgaagctcaatccagcattatatttggtcaagttccccgtggcggtatcaagtgagacatcagcaccaacagcaagagccttggttccaaaaacactggagagattgactacaggactggcagtcaaaccaatacttgcactaacaccagcataatcatgcgagtattgaagctcaaactgaaaccaaaaagagggagagtgaggacaaccaaccaagaaggtttcattgaaaataagcagtaatgtggtgcatgagcaaattacctttccagatctttgatccggaacagcaaagctcaagatggacttcaatcctggtgttagctcatcaacggttacagtagtaacaacctggccaaagatagaagcagtcaatacaaaaaagggagagcatggcataacagctaatcacagaacatattgctcaatgcaatcaaaactagtagcatattcggtacgaattcgtcagatggcaacgtaaaatcatttcatatagaacaaggattcaaaccattgcaatgtagcaggcaaccacaaaatctaaataagttgtgtgcaagtttatttgggtgtgtctgtgtatttcatatagaacaaggatttcagaccattgcaatgtagaaggcaatcacaaaatgtaaattagttgtgtgcacgtttatctgtgtgtatgtgtgcgcaagcgtgtgcacacgatgtgtgtgcgtgagagaaagagtcatacatttgagtctgagtttgctttcacatctacagtgatgttcttgttctttatctgtgattggatctcaccaaaaatcagatcagccttctttgtactggtagcagtgattgcctgcatcaaggaataacaagtcaaagagctaaacaaataacatcatagctgccacaacaggcatgattgtatcaaaatttacaatcatacaggaaaagcaacactaagataaccctcaaatatacaccccaaccagtcaccacctttacaagctatcattacgaacatgtaattgattagtacagcctttagtagtttaggttattccaacaatacaagacagttttgtgtttattatgcacaaaattcactttcatcaatgcttctcttagcaggagcacacttcaactattccacttacaagcacttgcatgaagggatttctcccataacttttagttttctttaaaaaccgtaagcataccaagggcaaagtataataattgcataatgtaccaaacaagagtcctccctgcttcagtaatagacttgctttcttaaataaagaagactaattaaactaatgttctgcaaccaacaagttcatgttcaaccctctttcaaaacaatcaaaccaccaatcagttgccaagcatgctgttgttttaacccaactccctacctatcattatcaataacaaaaaagacctacctaggatatagattactcctaaatcattttaccactatccaagagataatctctcgaacaatcttttagcttacaaatcccgcgtctcactaagcaacaggtacattgctaatcctcctaaacaagcgaaacaaaccaaggcacaagcgagacctggcaaatctcccggcattcatatacctcctacaatccactaactatggactataaataaactaatccatcgcaaagatcacacatcacacattaacaacagcaggtaggggcagtaaatcacacaaataaatcaagaaagcctcttacatacaacaagtcaacaacaaaaaaaactcgagagcacttacgacgccattgctggtgtaggtggtgagggtgaacttgtggtcggtctggtagtccctgtacagcagatctgcagcaaaaacaaacaactcatcatcaacaacaaacaaacaaacaaacaaacaaacaaaaagaaaatcaaatccaagaaccaccaaagctctaatcccacaagagaaggggacgcggccgctcacccctggccttcttgccgatctccgggtacaggcctggccccaccatctcctcgtcgacgacgcgatgcggcggcggatagcttgcgcgggtgggaggaggaagaagaaggcggcggcggataggaggtggaggttgcgggagaggagaggagaggagaaaataaaggcggaggaaaaaaaaaacacggcgcggcgaggctgcgtgtgggccctgataaaccctagatttttatttcgtttctggttttatctttttttttcttcggtttttttctttattttatcctttgcttctgttatatcttgagttcaaatgacgttgttatctctagatgtctcaagtatctaacccgtcctttggtatcatcttggtatcggatttttttttgttgttcaaaattcaaatggtttataaatttgtgatgatatcaggtgcagaatgggttagttcaataatattttaaccatttattgcaaataaatgtaaatactatttcattgaatctaaatttcacattttcataattcacaattgaaagtatattgtatgcctcttatcatctacttgttaacttatcagctacaatattttaaaacttaattttgatgtgttttcatcacaatctaattttcagcactgtcttttacacccaacataatatagatataaaacttttttcaaaatttattataattgtttcgtttattttgtcacgacttgtcagttataactcaaaaggtcaaagcctatgtcaactaataacctggttgtgcagctataattatgtgttgcttttgttgtgccccatagcattttcattttttcagagtagctgaatacacaggctggagatgtggctgtctagcctgctgagacttgagagctagagcatcaaacgggtttattcttttccaaaccatgtgattgaatgtaaggattctaaggcatatattctctattcaacaagatgtacatgattgagcgatgtataatcaaatagtccttttgatattgtgtctaaacttttgatcaaaatcttgtctagctagattcatatgttcttatgttccaaatcacgaatgcattgcaattgtatacagagtgcatatcggtataatggaaaatattgaaaatgcgacaaaggtccatgatatatacatatcttgatccaatggtccaaatggccaatggataataaatacataataccgtgtgtgggtttttatttccattgcagcttaaatgtaactaaggctgtattcttttctttaaaaccaggaaatagagaaataaaatagttcttctgctagattcttatattttcatggaacccaccgtattgcctgcttatacatatatattgtgagattttcaataacaaatacttacttttgccctaactccaaactgtaacttctttattttccattaacacgttttttttcaatctgttaaatggtgtgcgtgtgttttttttgcaaaatcttttatatagaagtttattttaaaaatcaaataaacttatatttaaattttataatcattaatattcaattaattatactctaatggcttacttcgttttagctgtcgtaaaaaagctaaaccaaatatatccaaactaggcctaactcttcatcagccaatgagtgaatgtaccgtgaaagtatagcacgaatgtcatttgaggttccattagaaaaaaaaatggaaaagcaaaataaaaagggcaagttagggatgacttaggataaagaaagagttggatgttgatttacaagccatggtacattaggcaattaaaattcgactaaggtgacattcttataaagctgtctccatagcaaacacggcaattttagttaaaaaaataaa

SEQ ID NO: 5643 - DNA, 41060 bp, Oryza sativa
caattttggccgacggcggcagacggcgcgatcgacccaccgtctgccacgtcagcttgtcgcccaccattggggcggcagggtctattttagcaatttttttttgttgatagattatttctgtaaatattaaaaaaaatctaaaaacgaaaaaaactcccaaaaccaattcctgtgatttccgtatggcccacgatctagatgggcccagaattagtactgggccgggcttaccattccaggcccaaatcaagcccaataaatttcccctttgcagcttccctcttctctccattttcgaattctctccgcgaaaactcaattcccccacccatcgatcgagctcgccgtctccgatggcggcggaggcggaggcggagccgcggcggtgggcggcgacgtacacgaagcacgtgaagcagaagcgcaaggcgtaccaggacggcgccatcgtcctccaccgcgcctccgtcaacctcgtcctcctcgacgacgcgggcggcaccgtcgagtgcaggacgctccgcaccggcgaggaggtgttccccggcgcctcgctcgcgttccagcgccacctcgtcgacgtcggcgagcccgagccccaccccgggtcggggtcctcctccgccgccgcatcccccgcttcccgaggcgtccaccgcggcggcgcaagcgccagggcgcgtcccagcgcggtgaactcgcggcctccccgtgcgttcgcggaccctaacacgaaggggggtggcggtggcggtggcaaggatgaagccgtgggttcgagtttccaaggtttgcgagccgcctgctctgcgtatgctcacaaggtgtttgatcgctgaacagaatgggcgtaatctgatgaatgaatcgggtgtgcttttgattgcagagtggaccgcactgtacaccacccagctgactcagaaggcgaagaagttccatgatggtgtcgtcaggctcgcgcaggtcagttcgcacgcgaagcaggtaagcagaatgcgcatttcgtagttggtaatttggtatacggcatattctgattgttgggtagctaatggatgatagattggtggtaggttacttgatcctcatgagaccagtttatcttagaatgctgtggtagtggactggggaaaaatgatgtgatatgttgttttggattactcgtccagataattttgctggatgaagagggcggagtgctagccaccaggtacctcaagtcaggggaatctttggaaactgggaagaaatgtcatttccctaactatcttattgagatttgtgaggcgaagagtgtaaacaaaggttggttttgtgcattttccaatatattgacgatttctgtatctaatctttggacctgtgcgttgtgagacgtcaacatttttgctgtgcctaattggagttccttttttcctttgcccacatattgaaaggttgttatttctgcattgccaatacgcaggtttacaaactaattcctcggaggaacctatggtgcaaacaagaccaaggagtggggagaatacaagtaacaaaacaggatcaggtccaacgagtaaaccactcaaatttaccagtccacagaaatttcatggtacatgggtataatgtttttttttaagattgatttaatgaattaatgttaaacatcagttagctatgattgtccttgtccaacatatcacagtgcgaaatgtttgtctctacaagtatagatcttgaggacagtaaatcatcaaatactgctggttcaagtaagccagaaacttcaaagattggagttgtggatgctggtagctcaggaagcattatgggttcaacagactctgaatttaaaggttcatgtgttctctctgtatatgtcagatatttgcgatatgtacaaattgtaaattattgatatatttcaaagctaatagtgaatgtacattctttgtagaatggagtgccttatataccacccaactaacacagaaggcaaagaagtaccatgatggtgtgataaagcttgtgcaagttggttcgcatgcaaagcaggttagcaattagcattcaatccgttagtttcatgcttattaatatcaacactgagaagtttctagtgcaaggtttggcaatatatgattgctgttttcgatgtcactgctagatgctatgtaatgaaatgctgtgatattttgctagttgtagaatggtgttatagttttttaataattggatgttcagattgttctgctggatgaagatggtggagtgcttggcagcagatatctcaagtcaggtgaatctgttgaaagcgggatgaaataccagttgcctaattatcttatcgaagtttgtgagataagaaaacaaaagaatggttagttttcatttgtgtccactctgtagcttacgatactctgaaaatattcaaatgtagtttttaaacatatattccttttttttctatatcacatcttattttactgcattaattggtgtgcagatgtagagtctaaacacccttcagaggtggttttgagtcaaactggatcagcgaatggacataatacaactgacaggacagatgggagaaacaaatctccaaaatttgtcagtccactgaagttcaatcgtatgtgatcacagagttccacacattagtactttgctgcttatgacatactttaatgtaataattcatttgtctctacaaattttcagattttcaaaagagtagattacaaggtagtaatggtttcaacaggccaacggttgccaaatcaatacatactaacatgattgatacactaaaatttcatggtaattgaacatgatatcataaacacttagttctatgtcctactactccctatgtatctttaggtagtaaggctgctgtttgcctgtttgcagatactcagaaggctaaaccagattttactgttggctacaagacagaccttggcaaatcaacatttagtaacttggatgatccacatcaatttaatggtaattgggtttaactttatgcacaatatctgtcttccagtagttatatttttatatagttaaagtgctggttctttccccagtttttgcagataataagcaagataaaacagaatatgctgcaagctataatccacaagaagttggcaaatcaagttatgatagagtggacagtcctctaggattctgtggtaaacagacttgatgtagcatacttgcacctattttttaccctcctgctgttgacatactctaatccagaaatgcccatgttttatttattttctgcagatcttcaggatggtaaatcaggatcttccactagttttttgaggagagaggctggcagaacaacttttggtaacacggatgattctttgagaactggtatgtatactttacctactttctagtttgaataggtttgaccacgcaacagaaaaattatgttgcatgtttccttcatgtatgtcaactacacgaacagtagataagtaatctatgcacccacctggctactattatccctatacccaagcaccgaaagtaagacaatccaatcagccattgttttaacaaatttgtaatgcttttatttattgtattaaatagataattggtttgatatatgtgcacttcagaaaataaaatacaagacaagtctgctcaagtgaaacttttactggcacattctatcagtgttctctcttctgttgtgcaatgctaaggttgttgtgaccaatattggctttgttcattaagactagtttcagttaaggttgattatttcagaaactccatgatatggatttcaaaatagctttctggtaggtgccttttagcagcgtactttcaggacattctttatggtcagattagatatgtctctgttgcatgcatcttgcagtaattatttcatagttgtattactgataaggaaaatggtcgtcccttattcctgcgaatgtgtagcttaattattcaggtttatttactggtaagtagctatttaaatatgtgattttacatattacaagggatatttgaggtattctttatgacttcatcaaatttaaataaaagctgaaacagttctgtatgcttctatagtggtcgttctgctttaccctttcttgtttatcatcaaatatttctctttggcaatctgaagagcataaaataaaaataaaatgcaaagagttcctgcattgtgctcatacaataacaattcacgcagtagagtactttcaagaaattcattcatttttacaagtgtatgttagtgatcctttgtggattgcatggctaacttgaatgacttacgctacttacttattgatcatgtgcttcatattaataacactgctatgcttttttagcatcccaaatactgtctatcatgaggcccccatcggaaattaaatactcccaaagtgttccagcttcacaagtacactcctcagcatcctttggatcaaatatagctcgtgatgcggatcatagcaagacagcttctaacatttcagtgatcaacagttcaaacagaactattggtgttaatatgaactctcgaatgtctcattgtgctacacaacttcgtgcatcagtgctggcttgtttaaatttagaaactctgcagccaaggaactcaatatgcactactcttcagagtgagttatcagggagtgcccatccaacttatgatcatcagacagtcatgtaagattttgtgtgcatatcttcagttatatcctagaagattgccttctggacaataaagtagtaatatctaacatgacaagtcgaataagaaaatgggtttactcgaattatgctttataggagaccaacaacttttgatagtctggaattggacatggtggataccccaacatctgatgtatccaatgcaaaagagcagagtcaaggttcaacaaggaaccatcaaactgaaagttctaaaggtactggaagctgtttcaattaatttcctttttgtggagttagagcaaaattgtgctttacttttagggttttttgccatccaagagtaaacgtacatatattggtctatacatggcagattctgcaccagctatgtgtactactagctcagaccctccatcgggtaaaggtgaaactgcagaccaggtttgcatcctatataacctttcttggaaaaagactgccgtttgtgaatttaaggtagtttcagattcatgagagcaatcaaattacttggtttttataactgtccacagctgcatattgttttgcatcataagatcatgctgtgagtactagcacctactgtttgattatactatgctaatcaatgactagttgactacatatgcatttgcagctcagttcagattacagagtggtggaagaaaaatgtggcagttacccctttttatctgcaggcgacctgacgttaacagatgatgattgcccttcgtttgatcttggcttctagcggaaggtacaactctattttatatcccatggtagcattggataacaataacttaacctaggttgttaaccacataacatcatctatcgctttgaagaatgtatttatttatgcaatataaattcacagcatcacatcggaaatacctgctgcctttttccccaacttataaagctataactataagtctataagctgggtcattgctgcttatggtggggaaagaggggcatgtcctagtcgtggaccaaccactgccggagttatatgtggtttagtcaaaccattggccagtttgcctgaatctaaacattggccagtttgcctgaacctcgaataggaagcaaccgcgcacacagctcaagacaacgattattttgtcaagttcactaaagatcaacgtgcagaagtttcaaaaagaaaaatgaaagcaattatatgcagagaaatcattgattcctgtgggtcactgggttttcctttgcttgcaaacattaacattacttaagattgcatcttaataagtttgctttgctttgctttgcatccagggtttcgttgagggattccttggccttcttaaactcaatctgttcactgcttaaggagaatggatggcgtgaaggcgcactctgcgttgtaagttgcaacaaaacaatgggcaggtaaaaaaagactaattcttgattagtggacaggatctggttcagcttaaggtagcagttttgggagtaaagtagtagttaagacgagttaggcagataaagattacaccgtacagtttatctttcctttaccttttctttttctttttctccttttttttttaaaaaaaagatatcgtttgcctttgtttggcacggtaacgtgtaaaaggtggttgctgtagtagtgtagtgtaaagagaacatcgagaattagattcttgtgtgggataaactacaaacaaagcatgttccatgctcttttttatgatttattgaagcctgaaggaccaggatgtacgctgaaaatcttcacttcaccaacaactggaactgggagtagaattgtaagttcgtgcatcatggcagcatccggattgctgaaaaagttgggcacttcaccgacgtagctgtctaacccatgtggccatattggattggacagctgaaagagatgtggggtcgttccgttgatagaaataatcgagaaagttcgaatgaatttactatgtgctctataaaagaatttacaagagatgaagagaaaaatggtctaggttagttcttgtgaaaatctacataggagtgtgatactaatttgatcctcaagttttctacaggttcacatctatctttggcgtttcgttttgtccaattggtcaattgggctcgctctcaagtttgcattcaattcaaaatgtagcacttggcaacatccaaaggtgctacttggccagccagccagccaacttcccaaatgcttaatcatggtatagaaaaggtctgttatgcgctcacctctcatgcataagcccaaaccacacacaataaagaaaaaaagaggaacgccacgtaaacgtaaacatgaggcatcgtagatttttatgacttttaataccgtgaagaaattattactatatatttttaatttttatgagttactccctctatgtctcaaccactttttttctctgtctcatgatataatgcgtgcatgcatgtatacattaactagcacctcgtactctaaatttgctcctcgtactccaaatttgctctgttttaaatcctctaacatcaacccccctcacattacttgcatgcatcaatgtgatctaaccgaggaagtgattaaattatttttttggtctttgtgttagtgatagttgtgcttcatattttggaatatagtactttcctagtagtgtagttgcctcttatatcattgagagttattctattttttatagttatttccctataacaatatcgttccttttaatatcgtgaaaagttacttcttatatcaagaaaaataatatagtgattacttcaaataagaaaatccatgtatataattatgaatattctctacattttacttatgaatttacttcatatagtttcttatttccaacttatccctatgtaattactttagcattattttatgaaaagttacttctcaactgagttacttttataatgtgagcaaattactattaaatatttaaaaataattaatattaaagtcgttttatcataccttttaagtagagtaagatggtttaaatggaatttataaataatacatggtttgaaatatataaaccatcaaaggtttgtattaagaaaaaatagattagtgatgttggttctatgtatcaaacctttaatttaactagtacaacccaattagccagtgacatatctggtcaacccactaacagattatactaacatttttggattggaaggagggcactagggttgtgccgtaagtttaaatagtgcacgcgaactaattaaatttcactataaatttgcaatatctcataaaattacttaatgtaaaattagtgtcccgattttaaaattatgacttatcactaacagacttatgatgtattggcaatgcatattacaatttgttttgggcttatttgatatccacctcttttaatgctggaacccaattaaactgttgtaactcaacttaaaaaaaaatggaatgggttaaaatgatttaaaatataactaaagagatggatcgagattcaagccgcttcataactttattctaaagttcactctcaaagttaaattgagaaatttgaataaccttatatagactcaaaccgtactcccccgcaaaaaaaaaaaaaaaaaaaactcaaaccgtactcttttggttcttactgtactctttaaaaaaaagttgactagtcactcagcacttcatcacagcatacagtactccctttctttttcctatgaaccatttgcttttcttcttagttcttacttccattgctttaggcggcagagagagaggggttcgagaaataaattccagtggctccctgctttgccacaacactcatcagtgggggttgaggtggctgcatcagcaaggaaacacctgtccccacctcaccagcgggagagaagcccacgtcactcccataaatggatgtggatatctcagattctcatcacccaaattgatccaggaagccacgggacggcacggatctttgccccctttcctggacaacctctccccctaaaaaaccaacaaaaaaaatgaaaaatgagtgagaaaatgagatgacacggcgaggagaagaacaaaaataaaaaatctgggagttgggagaggaagaaccggaccaaaaatccaatctttgtgggagaaaaaatggcgctttcaggggcggtgagcagcgcagaaacggcagcttaattggtctttcttgccaatttataaaaagttttgattttgggagtaattgaaatctttattactactattattattgctggatggattgtttcttctggtaggattgctgcttgctttgccttcacgtcattatccggagaggagcaaagatcccttctttattagctcctctcccttggcttcctctcttctccgtgttcttcttgtccgctttaggggttcgcttttctagattcagtctgtcagcggcgacggcgagggagctgcgagatccggccgtgagatggtggtgatccgaaggagtcatcgtcatcgtcgtcgggttggagcctcttcgtccaagaacctgccttgatcttgcagccttgttcaagcttccgagtcttttgctgatccaggtgaggtggcttttgccttcacctgtaaaattttagagaatcggatcatcgggaggagggagcgaggagaatcggagattcggaatctttcgattttgtctgacttgctcgagcatctcgggttcagttttcattttgcgtgcccatttggtccagtcaagtactttgaaatgttcctagttcgaagaattcgacctgtttctgtatttctgcatctgtgattcgtcccttacctcaaatcagtgaaatctgtcggagaattggataatcgtttaccgcctcaaatctggctgtaattagtagtgattgttttctttgccatgggcatttcatttcatttcatttatttcgacgttgcttgcatatctgagcatcatgtcttctcgttattgtgcttgtccgtattcattttatggttgtagattctttttgagcaaacagttcatgaatcttgatggatcggtcttcaaattttctagcgtggatgatgcatgcactttctgtcatgaaaacattgtaaaataggctgttaatactatcatttgttttctttagagcttctatggaagtagtgctgatgaacaactttttctgaggacattgacaaacaatttttctgatgtgcagggtgcagtttcttagcatgtgagtaatggcagctgctgaaacaagggctgcttggcagcgtgctgctaaccgctgccgggttcaagaggacgcaaagagagctccgaaactcggttgctgcccgccatctgggcaacagcatgagaccaacaatggaaatcaaacaaatccgcaagactgccatatccccaactttatgcctttaaactggaatgcaatgaactccaatctgccaaaagatacccaatggtggcttcagttgcagcccaattttgggtgccagaatgtgcttgctagcgaggacctgaattatatgtgtggggaagttgatgtaaagaaagtcgaaagtttcgcaccagtgtccaaacttgaggacatcaatcctaagaaaacagctgatccttttgagcccccatggatagtttcaacagcttttatgaaacaaacatatgagacaggttttgaagagctcaagagtcttcctgcctattctgaaatgaccctcaaatgcaggggaagtgccacctatcttcatgaggacaaagaacatatggacttcaaaacttttgatcctttgtatccaaagaaaccacagacggcatgctatgagatggatgcaccttggcaagaaaacaggaagtctcggccatggtggcaggtagctgaagcggatggtttggcttccgtagttgcagaaagtgaaatgcacaacgtaggcaaaaatgagctgccaagacccacccaacgtgctcatggttcaaaattgaacaaccatgaaaacaaggatgattatggaccttatactggcaaagaatcacctccagtgcagtatgacactatgctgtgcagctatagcatttcaagcaccaatgagacaaattcatctgatggtggaggctggcaacatcaaagaaatgatgcacgtgggtatgttatattctttcacaatcgctggaattcactatgatttgccggtgtcttccttcttggattcacgccgtcttaaattcttaatgatactagttattttaagaaagtggtatgtggctttttgtttggtcccaaacctagggaaatccggtctaactggccaatttagagggccaaacaggtgattacgtgataacaagtaggtgtgcttgttccttgtgaacagcccagtagacccacttttagaataccgatgttttgctttacaaggataaatcttatggcttattattttcacgtatcacattacgaactagttctgaaaatgaacaaacacaaatgttattccaattttgtatgtgtgaaactagttctgaaaatgagcaaacacaaattttattccgattttgtatgtatgaaattgtgtgaatcttttgattccttgttatgatccaaaattgaagtaatggtagtcatgcatgccttccatgtcgtgttatttctcatccctggaaagtcccagataccaatttgtttgtccaagcttcttcctggttatggtccatatattgacataatcgcattcggatgcaggggtacacaggattcttgtagttctgatgatcgcacaccaggcagcaagccgacatatcggagtgccgctgagaggacccagttgctggatgcactccgccattcacaaacacgcgcgagggaggctgagatggctgccaagaaagcttatgatgagaaagaccatgtcatcaagctattattccgtcaggcctctcatctctttgcgtgcaagcaatggctgaaaatgctgcagctggagaacatatgcctccagctcaggttgaaggaacaccagatagcagccatgttccctgaactcccctggatcatgctcaaagaaaaggtgacgccagggcaagaaaggaaggatggaacaaggaagaaaggaaggaagcagaacaaggacagccacttgcgcaaggctgtcgtgtttgcggtcggtgtaggcatcgttggtgctggactgcttctcggctggactctcgggtggctcttgcccaggttgtaagttccattatcatctaccaccatggctagattaacgcctagcgcgcacttcgatcgaataggtgatagataaagcttcaggtatgtgcttcatgatgttagaagaatgaagatcatattcttggagctcattcatatctgttctgttgttggtttggaagccttgctgatgatattttcatatcttcatgtacatataggatgaatttgctgtatatattttcagaaactgggtgcttctgtatgttgcatgcgtttgcccgaatgttgtacatatatggggtcagtggtggtggaactagggaaaaaaatccgtcgacatcaacaatgtattaagtataaaacttgtattttcagttgctggagtagccagctcttgtttgtataataaaaacttgtatttttagttgctggtttagacagctcttgtttgtattataaaggcctaggcacgcttgtgacactatgaatttccatttgccaaattggtcttttttcttgtcaaatcttggtcagctttccaagtgctgtaatcagcaagaatgtgatctgttatcctttgggatagaagtcaatatgcccagctgtcagctcgtgcatttgctactgaattttgcagtccagatatctcagacataagataaactcattcttggtaactcctaaaagaatttgttattacaggcttacagcttcgaaggtgctatcaattatgcatcaaaacttctaaaggttactgtgatttttggcatagcttccgatctaagatgttttagagctagcataactttggatctaaggttttttttttttttggagttggatatttccacctccacaaatccatagatttttcaatcggcaattacattgattacttctgaatgaaatatttattccatttttggatgaaatataatttttaagtgattataatttactccctccgtctcctaatataagggatttagacattttgcttgcattgtttgaccattcgttttattaaaaaaaaaattggaattattatttattttatttgacttacattattatccaaagtactttaagcacaacttttcgttttttatatttgcacaaattttttgaataagacgagtggtcaaacgttaaaaaaaaaatagtgaatatcccttatattaggggacggaggtagtaacatataaattttaaatctagatatggagctgtgataaatattgcctaataaagagaaacaagtgccacgtgatgccaaaggaaagctgatgtactccttttgtcccataaaaagacaaacctgagtttggataggctatctaagaataatctgaagaatattaaaatgtgtcacatctcatcttaaaatcctatcctgagtttgtattttatgggatggagggagaaagtcagcaaagagagcagtgttgcagcaaccagcaggtaatccgtacaagggaattcattagggaaattgtaacagcaataaacttaagggatctagagtcatctctatcggagcagcaacggcacaactgtgaattacataagttagcacagagatgaactagtgttacagctgaacagctcccaagtgtatgattactagtagtagtacttaattagatcttggcagtgtttttccagttctttacactattaagagtgcttagctaattgttccaatagatcttacttatccaggctccggcagccaaaagtgcacaaatgactcccaaattgtgatattacatccacaaggcctccatatccagcaacagctgccatctgcacaacaaaggtagtaaactcaggacaaatcggccagactccagaagtagggtgaaacagatacccaagtcatttcaaaatgagaatcaagagacagacagacatacccctgaagaatgtatggagacagaaaatgctgagtgaggagcacacttgatttgtgaaagaagagtcccattgatagagaaacgagagagcagaggttcagcaccgactgctaagatctgaatggtgaaaatggagtataagaaaacaaacagttgataattcctaaaccacaagagttgggaaacaatgcatccttcgtgctgctctattgtctatcgccagactcaacattgctttggtaaatctctaatagatgtgagcagacaataataaaaagctttccttgcaggaataataactagttggctgaagagtcactcttatatttgtttggaagcaaaagcttttgattttattctgtttctctccaacaataacatcacaaagcttcaaattttggcaaccatgtcataaatcatcaggaaataatttattgcattttctgtgcatatctgagagattatctgataataatttcatatccacacaattatgcaaactttcatttggcaaacaattatgcataaaaaaatttagaaagggcattggttaaatagataaatcatgcacttgtggaactatcatatgacttgttaatggaaataattgactaggggaacactaatttactacaggtatagcatttgttaaactcacaaagactaaagaatggaatgatccgtcctaaattttttgccagcccatctttgaaatacaagatgagccatttctaaccatgggcaattttactggtttgctaaactctagcttgaacatgacgaatagatagacttacttggtttctgtcaaacagcaaatcttgaacaggagcatggcaatccacattaaagatgcactcatttgaaagaaggctccaaactgatataccactagaagtaccacaagcctgggaaaaataggaccaagataataataactgtaaaatacatgatgcataacacattgttatatcagcttgaagtgcatcctaccagccagctttcacttgcatcaatggcaacacaactgacccatgacccctcaaaaatcttgtttttcaccggacgtataacctgagtgcactttccacttctgcaatctgcagtgcacaaagagcagaaataagagaatgcctttttatggatttccatgtagtgccaaatctttctaaacctgtctgaaggtaaactcataagagagaggataaattttgtgaatatgatgtgacctgtgaccagatcaccagatgtgaattaaagagtacaaaaagacaaatagctagttggtgctttttctttgcttgaatcaacgagcagatatacaaaatgaccagttagaacaggatgaacatgagaaggcacacttcaagtacaagacaaaattatcctatcaaaagcactgctcaccccagatacgggctgtgccatcctctgatcctgtaactacctgaaaaaggaaaggctctattaactaaaagttactacaaaatgaaggcaagacatctatgggaaaatggtattggactacatcagtacaataataacaaaccaacctggcggttcgcttcgcggactgcaatgctgtgcaaatagtcagtatgtcccttgaaggtcattttacatttaccactctcctgaaagaacaagacattgtaaaacctactatcagatattttctcaagcaggcacacagaaaatagaaaattatggaagcctgtgccacatgaatcataagaaatctgtagttccttccatgtagctcaggacttctatatattgcatttacctcaagaaaatacataccacatcccagcaataagcacatgcatccccggccgctgcataaacagatccttcctgttgcgaagaagaatgatgagaaagaataactgaataagatatctttttttaagcaagtaacaatatgcatcatttctatataatatacacgatgaacaaaaatgcacacaagagattattttgcttctttggatgaagtgaaaatgcagactttctggtgttgacctgtttgttaatcgcaatggcgttgttttcaggtattggagagcgagcaccccaaggacccctacaaaatcgaaaacaaaagctctgaaaagatggaggatgagagtgcaagtgcatatttctctagaataaacgatatgtcaaatgattatcagatgtatgtcctttttcacagaatacttactcatgctgagggttcaccaaatcaagtactggctccaaatgatcccctggaaagaaaagcaatgacaaagtaacctattaaacaacatgcattagccccacaaaaaaaacatgcactagagcactagaaaaggaaatgggacttgcaaaatgttttacatctttgttaaaaatttagccttttctttgtggggtgtgcgcaagcaagtacaggtagaacttctaggtaaagcacacaccaaactaattaaccaagtcaatcctagtaagaagtgagggttcttttgcagcaccttgcagagatagcggcacaaggcagctctgcatctcgtgccatctccatccccgaaggcgcccgtcatccccgccgctgccacaaccaacggatcacgtcgccaaatgtcatgccatgtcacctgaacaaaaacggccaccgagaagacgagcagcagcacagcaattcacctgaagagcagcggctgctgcgaatccgggtagaacctgacgtcgtaggccgggccactgtgcgcttggacgatgcagacgggatcaaccagagagaccgcggcatccgggtgggtctgaatccaatcaaatcaaaacaaaagatcgaacaccttagctgcgcacgaggacgcggcacatggagcgggtgtggggaacgaacgaacctgtggggtgggatgggaggaggaggaggagatgcaggaggagagggagaaggaggcgagggagccgtcgctggaggcggcggcgaggaggacgtcggggtcgtcgtcgtggtggtcgaagaagacggcgcggaagagggtgcggcaggagaggtcccgctcccgcaggatgccccgcctgtacgccgcctcgtcccacccccgcgcgtccatccccgccaacgccgccgccgccatctcgcctcgccgccgccgccgccgctgcttcggaagcgagagcgagtcgaggagtggggggaagagacagcggctggttgggctgggcctttagatcagaaaccaacggccagatctattcattattaaaaaatataatatgaaatccctatttgatttgtttttgtacagtattgtaataattatttgagggtacagacaaataaaataactgttataaagttttaaaaaataggttaaaacaatattctaataaatttatatttattttttttgtgatgagaagccaacgacgagatcttattcattgataaaataatatgaaatatctatttgagttgttgcttcgcgtaatgttgcgataattattcgagggaacaaacaaattaaataaatgttactccctccgtattttaatgtatgacgccgttgactttttaaccaacgtttgaccattcatcttattcaaattttttatacgaatataaaaatacttatatcatgcttaaagaacatttgatgataaatcaagtcacaataaaataaatgataattacataaattttttgaataagacgataggtcaaacgtttgtcaaaaattcaacggcgtcatacattaaaatacggatggagtataaagttaaaaaaaaatattagaacagtattctaagaaatttatacaaaaagttttaagaaaatcacaccgtttagagtcttgagaaaggatccttcgaaatagttccctcaaatcttatggataggaaaataacaggaatgatcaattagatgaagcgtttgaaaccacacaaatcaaaagagaggaatttttttcaagactctatactactaggtgtagcaacaccaacatttaactcaaaattttatttttcaaagaacatggggtttgaggtatcatatcgttcatatctcgcgtttctgtcttgtttcactaaggaaatgctgttattttgtgaagcatgttgaacccaaaccacaggcttagcataaggttataaaattgtacagcaattgactctctctttatttatgcacctcaaaagatttttgcatgtatggtagcaagtaaaataccatatcatgcaaaggactaagttcaacatacactaaaatcaaacactgaagaacagtaatactttcatgtcacacatgatacacactctgctcatatatatatcagtggtacaatgaaccattcaacagttacaactccatagtttggcaataataagaccagccgatggatatctcacaactcatccatggatctattaataactcatgtcaatgttttcacatcaagtgcagacagaggcaacagaacatctcaatcttcacttgtcagatcccttctttgggtggaaggcttcaacaatagcttcaatctcttccttggcacgctcaaacacatttggacctttaactctctcaactggtgtattctcatttatatcatcgcttgtaccatgagtttcattcttgtgggtctctattttgttcattgacaccttgctttcatcctttgagtccttatgcaggtctacacaattttgtaatggtgtgtatcataatcattagacaggaagataaggttaatcaatgcataaaagaatctgaccatcatgcatgaatatcacacacaaagagctgacaagtcattgttgatttttttttgtgtgctgcaaattcttcgaaggaattcaagcaaagtatttgtattcaaactatttttagggcatacatatctaaacttttatgcctgaaaggatttccagaaagtttcatgatttagctgcatcatgttttaaagtcggttggtggcatcaaatttgacaaacaattactgaaaaggatgtttttgcaataaaagggagaaaaatgaagatgctaatattcttgaacttgtgtttgtgttatctcagaaaaatcttgttacagaaaaccagactttttcaacaaagagaaataaattctgatatatgcccaatgcatgattaatgacccatcatattatacaaggaactcaatacacaaggtaaaaaacatcaagctaaaatttagcaattgtcaattgagtatgctgtagcgcataattgctagatcagattttgtactccctccgtttcacaatgtaagtcattctagcatttcccacattcatattgatattaatgaatctagacatatatatctatccagattcattaacatcaacatgaatatagaaaatgctagaatgacttacattgtaaaacgaaggaagtaggacataattactgaagaactacgtgtcggcctattaggcattgaagagcttaagcttgtgcgtttatcttatatgagctttgtgttttttggtcctgttgttaagcagctaaggtcgtgacttaggtgatgaggcaaaggatcgtgcgatactgtgatggactgatggtaacattaagcttagatgtgaattgtctctctgggtgctttgggcctagccgatgctcctctatcctatccttttttccatcttttctgccagatagtttaaaatcctactcttctttctggggataataaaaggtgctcagcatcttcacagaaattaaattacggaaaacaccgttggttcaaacaaattaccagcattatttccatggggactggaattgtgctccatcttatcatgaacagctccaacgagagcctcaacctcttccttggctcgttcaaacagattgggggccttaaccttgtccacagatgttttatgacttatatcgttgctcgttctgtgagtctccttgtcatgaactttatctttgttcatcacgcttttgattcacagtagaaagctgcctattccaagctccactctgcacaaaattccaacaagagcattcaggatttcagcccgtgataaacaacacaaaacctgatacttgccattcatccctacgcaggatccgtgcccgaaaaaaaaaaaggtaaatagcagaccatttgccttaatccaatcgagcgaaaatggtaaatacaccgtttgacatcatgcccaaataaaaagactttaatcatctttcctcaccgttctgcttgctaaatgttgcagcatccagccaaataatacactgggaacgttgcacagggcaactgtttttcggctgtcagtgctgaaccatcaaatcggcaatggcaagcaaaagaaaacataatgtacactcaatataatcagatcaccacagtattactctttttttttgttttttttttcgggagactgcagtctgcaggtagtactcttgatcgagagctcactgatccggaatcaacagcttcccaaatcgaagccctaactcctaatcctccccatccccagatcaggagaaccctacgcggatccctgccctgcgcggcgagtgctaaaacgatacgaactgctctctctctctctctctcgtcagatcccaaacctaactatggaaaaagaacatgtcgccggggtacacagaaagatatagttgcgcacctgcggctggctcccgccggcggcgcgtcgatccggcgatatcctcaccggaattgatgatgaaggagagagaggcgcggcggatggatggattgggtagttcgtggaatggaacccagacgatggagaagggaaagggaggaacggaatattcttgggccggcccaacacaaaagcccaatgtacccaaaactagcttaaagaggcccatgtggccctctgacatctactaggcccatatcggctttgaccccacctgtcaatgggatgggcgctgaacggacggaaaggtcggggactttctgtgcggttacgcggggcccacctgtcagcgtcgcccgtgtcgctccgtctccaaccccgccgcgcgcgacaagcgagcggccggtggccgagacgtcgtttgaccgtccccgattcgcccgccgccgccgccgccgcccgccgccacagcccgccggcgaaccgtggccgtatctctctctatcctctccggagatggccggcgcgggtgcgggtgcgggcgcgatcgccgctctcctgcgcgccgcgcacgtgccgccggcgccgcgcgcgcgctcgattcggggcctcgccgcggcgcgcgggctccctcctctcgtccgcgccacggcggcggccatcgcgccgtcatcgttctgcccttacctcccgcgcctcagctctggtgcgttgcctggcgtgaattgctgctgccgtatgacgtacatacagctcgcgcctcagctgttcgacgtaatgcctagctccttctgatgaattgctcccgtttcttccagctcgctccttctcctcctcaacatcgtgcagcgccggcgcgtccctcggtggcgcggtgtccacctcgccgtccgagcaggagaagcagcggcagcagtcggagctcatcttcctcggcacgggcaccagcgagggcatcccgcgtgtcagctgcctcaccaatccctccaagacctgcaccgtacggccaccctcttcattgcagcagcgcgatgtcgtttctatgtcatactttgtgttgattggttgctcaatgtcatttgctcactttcttctttgtcctttcctgcacgcaggtctgtaccaaggcagccgagccagggaatcggaacaggaggcgcaacacgtccatcctcctgcgccatgccacgccgtctggcacggcgaacatcctaattgacgctggcaagtaagtatgcgcctttggttgatctgggagtctgaaagtttgcttcatttctcttccattctgggttatcattcttgaattgaaaaagagtgagagagagtaatgagacaccactgtgtttttctctgcttcctctgctaggttcttctaccactctgcgctccagtggtttcctgcttatgggtattgaactgctgacgtgctccatatttgtttccgagaaatttagccttgttaaacgctagcttctgacattcagattgaggacaattgatgctgtgattattactcattctcatgcggatgcaatcggaggtttgcaaatacttttattgaagcaagcaactttattaatattgattgagacaacacaccatgctcgttttgctcttgagctttctaaaagaaataagaactcctttggtacaggccttgattgtcttcgcgattggacgaacaatgtccagcccaccatcccgatttatgtagcagaacgtgattatgaggttggtgctatgtttgtagttttgtttttgcttctctagaattgcagcctcagaaagtttcattcctaacgtagacaactgtcatgccaattgaaatgaaactcacaacttctctttatgtatgcaagattttaacaactgggccactggctcacttttctttctatgcttgtactatttgttcgctatcaggtgatgaagatgactcactactatttgattgacacaagtgtggttatacctggagctgcagtttcagcattgcaattcaacattattaaagaggaaccatttacagttcataaccttgaggtctgttgtctaaaataataatttatgtaagcaagaagtagacataaaccacacgctatcagcaataattagctcttcaatccgcaaagaaatttctttttctcaactcatttgactgcactgtaataatactttatactctatgtaggcaggtaataaaaggatacatttacttctatatccttatttttgtttactatcataacttaattaactgaccatgtctatactttgagttatttgaattccaatgttgttctgagttaaatgttagtaaatccgtcatgaacctattagttacatcctatgttctcaaaatatgttgttttggtcatgatctccggtagacacctgtgaccatcgatttgttggccaaaagtatgtaaactataaggtaagtaattttgaatgtgcctttttaaattgcatgtccaaacgaaattaatatgtttttaattatgtcagtttgcgctaagtgtactttcgagtgtaccctgtctaatttattttgctgaagatatgatttctgtatttttcaggtcattcctttgcctgtctggcatggtcagggttaccgctctcttggttttcgttttggtcgtgtatgctacataaggtagatcaaagtgcaaagctaattttttacaatatattctgttggttcaagttcaacacacatggtcttaatatctctgatgtacacagtgatgtcagtgatatacctaaagaaacctacaaacttctggaagactgtgaacttctaataatggtattgacgttataactttttctatatatatatgtgaattgttaaagcatgagattatgggattctcttgaagctgcatattttcttatgttacttagtgtttttattaactttttgtataactggatttaagcttgattttattataattatgtccaggatgctcttagacccgatcgttcttcttcaacacactttggattaccacgggtgggtagttagttctaatatatcaatcagctctagcttcttattgcttcactgtattccatggtgatatattcttcacttctgcaggcccttgaggaagttaggaaaatcaaaccaaagaaaacactgtttactggtaatcattttgaggctcgtttaatgcctttactgaattaacgctgctagacttcttcagtttaaactctatgtgcactttaacttttcatgttaatttataaaaacattaatcactctggaacagaatgcacagtttactatgagaaaaggtacattgttctattgcatgtttgagaaagcttatctgcctttctattgattggcagaatttaatctcagaaaggaaaaaaggggcaatatactaaaaaaatgatctccttagttaactgttcaataatttggtacttcatgtgcacaataagcatgatgagggtgtcctacaatcactcacgccgagcttgctgtttgttttccaatggtgtgtttgatattttctcctattgcttgtcacataaaagaagaaaatatctgtatagtaacttagatctaaatattcatgttggtcacttttcagaacctttcaatgtcagaagttaactattactattcatgttactccagtttattcagaactaaagcatcaaagttcggctacttatttcttgtttatggacatgataagaaaaggtcgtttaatttgatcgaatttcacatgatgtagcttttattgtttacatgatgttgctcttgatgacttgactgaatgatatcttcaggaatgatgcatttaatggatcacgagaaagtaaacaatgaacttgccaagttgatggagacagaggggcttgacatccagctgagctatgatggtctcagggtacctgtatggctctaatactattaattcttttaaacacacacgacatttttttgtcttctaggcacagctaggatatgtttacagattttctaaggtttcagttagtaaaattattattacaagatgtaatctgttgaactccttgctttgagcctttgcttttcttttattctcccttctctatagagggagcttatgtagcaaatatacatcttataatttcccaatgcaataaaatttccaattgattgtttttgaaacaatactttcctatctttctgttgcccccttaaacagattttctttatggctattattgcttgggttggatacgggtgtgagggactgaggctagggatccagctgctggcagggcttattccaggcttccagctgtgaaagagaggctctgaggcctttggaaatgagaaggggaatactagcatgaacttgtatatttctgcttccgcaatgaagggtatgggtcctcacttatatagatgaggttaacccctaacaagagaatctaatcaaataaccaaagtaatctcgtctcctaaccaaaccaactaagattttaatctccaatctgctattttcttccctcacttggaggtggccttgctgattcttgcgtgtggggtgtctctacttgctgctggctgctgccccagagacactagagcccgtaacagttgtatggataactggactctaatgtaggattagggaccataaaaggaagtcatcaggacttccttgaaatccagctgaaggaacagaaaacactggtgggggggggggggtcaataaaccatttgatctgcaatatcacatgacacaaatgattactgggtacagatgaaactcctagcttgtctttcttcggtgaatcacactagatcccagcaataattagtaatttttcttctctaggtcacacataacaaaaggctggtgtccaggaatcgattacactccagctgctcgacctagtcttccccttaggatcatcactccaaaatatctgagtatgaaatatgagggaagcaatttagtctttaagagtttaaagttagaatatcattaggtaaagactaaagaagttaattttttactgtgtttatgtacctgcccatcatcatgaccgtggcttgagggttcgtccctggtgatctagaaaatgttgagccatcgactacacggacgcctgaaactccaagcacacggtgttgctgatcaaccaccttccctacatggcatccaccatggtagtgccagatggttattactgtatccctgcaaaattgctctagggattctgtgtcatttgtatgcttgggtatcaagttcacattagcctgcacactcatattgagcactctttccattgaatgtccatcagtgttggcagacagttcagagaaacggtttgtcttcagtattcgttcaatggtcttgataccatagacgcaacgagtgagatcctgtggatgactgaagtagttgaaggtaaccgcagggttcttcttgacatcagtgtctatcagggcaagatgtcccgtagacagtggaccatcaatcttctcgaggataaaaccaccatggaatatctctttgggtagattaagtttggtatttgcatacttctgtgctttttccaggcttctttccttcggaggaattgtggacagctgtccaatctgtaccataggaatataatatgtattagaccaacaaggccaagtagggaacaaattgagacaacaatggaaactatgatggcagttattggagttgttgcaatgtagacaacacttattttttttaatctccaagacaagaagttcaattctgagatctgattcctagaaaatctaagcataaaacaatgacttataaatcagataagtattatttcttagaatatactattatatgcatatgcatattcacctgtaattaatgaattggtctaagttgtgtttgcaatgttgcaaaatgtgagttttgatagtttagactttagaatctgttttcctttttgaagtctgcagatctaagcagcagctttttcctgatgtttgtgatactgctttagacctattttatgcacaaaaagcttctcatgatgcaagtaagattgatgacatacctcagcggacatgattccatggtggcaatggatgctttctggtgactggccaaaaccactactggcctcaatgaacacaccagcttcagttattccaacagtctcaatcagggactggcgaggggggcttttcgtcggtatgaatatggagttcatggggttatcagccatccctttacccacatacttgttatggagaactacaggaattttatggctcctaaggtcattcttgggtccaatcccactgagcaatagcagctgggggctgccaattgcgccagcagagacaatgatttcactatcacagttgctgttgaggaatgcctggtggagtcctccattctcatcggtgaactgaactccggttgctcttggcttcagttgccctgcatcagaaatggtgtatctgaaatatggtacgtgattactgaacttactctttctattcatggcatataattctatataactctattttagaagataatacaacttgtaggagctttggccacacatgtgtaattatttacctctctgcgagttaaagactatcctgttcacactagcatgaagcagcacccttaggttgttagggtctccagctgcaagtaagtcggctgctgtgtggcggtagccagtctcatcaaagatggtgccaccaactttggtcccagaaacatggtcatatgtgtagccattgaaaggagatacacctgcttggagtagcccatcccttagtgcagcctgccaaggtgcgatcttaggccactggacgatcttgtcctccacccaagggaaggactcattcaccaggtcttcatcccagcctacctcctggatgaagctgtttgtttcaagaacaaaaacacatggtatacaagttattagcaatttaacatgtagttcaccaataacaatttaacatgtagttcaccaatatgaatatcaatatagaagtaaaattccttcttgaagactacgggattaagcttatcaattattgataccttttaagtcacattggcgtttctggtaatgagcaggtatatcactagggatgactgatgagcacgggtgtgtggggcccacccattgacctattgtaattcgattctgtacaaataattcgaatgcatatgtactaattggcccaaacttgaagtagcctcgagtctactagggttttagttatttagtgtcctttgcctagacaacttagttaccatgactgcaaagaaacaattatagccccatgtgattttgttttgttgtctctctctttttttttttcatcaatgtctcttttcaatctagtctgtttcagtaacatgtagttcatgactgcaagaagagcaaggaagtctttttattcactgagaaaaccacagcatgtgctgctgccagcgtagttaattatttgcaataccagactgaagcactttaatgcaaaccacttttgcaatctgcttattttctttatgttatcaactttctcactagtgctcatttgtatgcaagcactcaaagtacaacctttgctaattttacagctggattttatttcgttatatattgcagagctgcattgtgataaatctcaaagaaagcctgcattttgataaccataaactagaagtctagaatcataccaaccaaaatatgtagtcctagtgaaccgataatcatgtccaaatgcagtgctgggtacgttctagagtgagtgctagtaatgcaggtggtggttttatgcatttgtgtcttttggctggctcattttagtcgattagaacctatttgagctacactaattagtgtttgtttgtttccccgttttcccttttccatttggacgctggagaaaagaaacaagaggttgtagccagagaatcctaattggcagaaactttggtttcatggtaattgaatgctactattgagaacagtgaataatatttagtgttctgctgcacgtttcagcagacagctattactccacttgaagggtgaacaaaggtggctgcagtatgctagggtggcagcagtcaagcagatcttaccagttaccattagtaatttctactggcactatcactgctctgcatttaccctagagctgatgtttgttcatgtgaaagtgataggccatgtgttgcatatactgagagactacttggtatatttaatctacttatgctaacttcattttaggctctgctatttgtgcttgccctcttatggtaaagaatataatagtaaattatatctgaagtcttgatcatgattgagaccattctgcacttcggcagtaaaaaaaaaggttaaatttgcatgtgtgaactgtgaattctcttgcatatgtttgtgtgtatatattaatgctgaccattctgcacttcggcagtaaaaaaaaggttaaatttgcatgtgtgaactgtgaactctcttggctggtcactcgtagacggaagagaacaatcataatcaggtaagaatactgatacacaagatagcatccatatctgtgcaatgcaattgcttactttgagctggcccggctgtagaagccggcattgatgcaggtgccacctcccaacaccctcgctcgggcattgatgacgccgtcagtggagatgaaggcctgagacgccgagtccggcgccatattgctcaggccaatgtggaagttctccatgtaggagacgttgcggttgccatacggagaccctcccctctccagcaggagcaccttgtacttgagcgacaatgtcgccgccagggggcaaccggcggtgcccccgccgacgacaatgtagtcgtatgtctcgtggcgcatcgctgggaagctgctcgccttctggagggtagggagattccttaagctgaattgctggttgcctgagaaaacaaagtgttccataatgttgtcattgcctgaaaaagttttgctttgttctgctgtaagtttctcatgctataaccccctttttttttttgcatgacttcaataaaagctttcattatctaaaaacataacctgtttttgcatgttgataaatgagtgtatcaatctaattgatgctatgattactagggtctggacctcttggcagttggcattgtacctcctaggactggatgagaggtacgtcttgtggcattgtgttgactatttatttcctatccttcaatctctaaatattgaactctgaatgattagatgttctgctactctcaaatactagtggtgaggccaatgtggcgataaacaatgataggaaccaaagtgtcagataatggaagtgcacgtgataatgatattcttgcgagaaagaagctaagcaaaaactagcatatataactgcatttcaccattgcaagttcttcaatgggaaggtggaacagaaatgtacagaataaaggaggaatgcctgagaaacatgagatgagacagaatacagaatagaggaggaatgcctgagaaacatgagatgagacagaaccacaagagatgcgcaccttgggataaactgaaggagcagaggcaaaccatggcctggaagatgaatagcattctcttgctcaaagccattgagcctgagaaccacctgccaagctaaactctttccccttcttaggattttccttccctccaaaacaacggtggcaaaacctctctccctcccctgtttcctgatctccacctctcaagcttgctcactgcatttgagtaggtttatgtagagggcttggcattgggggattgatagcaataggctgctgtgtatatgcattaaagagagctcaccagctctagtaagtgctattcaatgcagagggagcactggcctggtacaactgggatttatggacttcatcaaccaaccaaccgtagcaaggctgctctgaaggtacccaccaccctcattacaagaatgacagtcgtatatctctttcctctatctattcatagaaaaatattttccttttccaatctttttgccaattggttaagccaacgtgttattagtattctaatattctattcctggtctgttccctccatttttcaaatataggctgtgtttagttcgtgtgccaaaattttttttaagtacacggacacacatttgaaatattaaacgtagactaataacaaaacaaattacagattccgtctgtaaactgtgagacgaatttattaagcctaattaatccgtcattagcaaatgtttactgtagcatcacattgtcaaatcatggcgtaattaggctcaaaagattcgtctcgcaatttacagtcggactgtgcaattgggttttttttttcgtcgacatttgatgctccatatatgtgtccaaacattttatgtgacggaaaagttagaagtttgaagaaaaaagttgaaatctaaacatggccatagatacattcttgttatttagtgcagatgcttccatctttaaataccagttgcagacttgcaggaaacatatggtgccatttttttatagcaactgcagaaattgttttgtgctgccatcttcttggaacctatatgctgacaaacatgctccaaattataattagttagaaatgtctctgatgtagattatccagctctcacggcctgtttggttggagggagttggtgatggggaataggagtttatgatatctgggagtttaagtctgtagtttggttggaagacttgggaattcgagggggtttgggatggggaattaaaaggtcgaattctcaccaatatcttacctgggagagacctgttaattcgtgagacttggagggaattcgacgtgaaaccaaacaagggacgagaactaaaaatgtaactcccatgaccaatcccaccatcaactccctccttaaaactcccattcctcttcccttctcttaccaaacagaccgtcagtgtttttatttcatttcatctagaaaaattagccaccatccctgaatagacaagcatagcaaagtttactgtaatgcaccgctcaaagttaccgtcttaccattaagattacttcttttatctgcacactgttccttgttaatgcgatgtgtatagctagaaacaaagcagagagctaagccaagctgaggttgaattgactaattgtgtggcctaccttgtcctatctggtctgtagggatttatattgctatcgctcaaatatatcatttatgggttgatggccatactaaatacacttaacaataataaatgctatgtgctacctttagttatggagtacattacattacattgcttgagactcgtcatgatcaacatacagtgtgcaaaactgttctttgtttttttataagacctcttttaggacttacaaagctgttattgaacctttcatgtccattaggcggtactcacttgtgagcaccaggaaaagcaattagacctccatataaattttgaactggaaagcaagcgagcaaaatttattaccaccatcaactgcctgtgtatatttggcagaaaacaattgatgcacaagaaaagagtgaagtgttaactattacatctgccccaacattactaggctgtcctcttttcgttcccctgcaaccatggagcttgtgagtaaagaaaaataaaacactgagcgttcgtcaactacactatgatgcttttcttttcctgcatccctggaactcacaggtttactacaagagtgaaacctaaagcagaactatagctaatctcaagctgcaacgtgtcgcacacttttcatttccctcacaaggatataactcttttgttgcttatttgtctgcagattggaagaaagggacctatgcctctcaagcactttaaggagagggagagccaaggacaatatgacctgtgaagaaccagaaagagccttcacatcacacggttacatctggatcgaaaagagacgccctaacaacctactcgcaggcaacctgggattatttaaaggtaacacgagctagcgttaaatcagtttctacacacccgttttcacctgttgtcacagactcagtgtcacacaccaagcgtgtgtatgcatgtagatataacacaacttgcatgggtgaatcttttggtcgccatgcagcctacattgatgctgccggaaaattaggtgagtgggagatatatgatgacactgtgcatcatcttgatttgcagggctgtctgagctgccgaagcagagtggtgcacctaggggtcacaagactcacatccttgtccgggcagttcgctgatcgccggacggctccttaattttctcaacagaagcctttaatctgtattcaaatggctctaaatggatccgcagccaaacatttccaagatacaatcgtaactctattgggtggattctggaatctcgatgaaatggagttagatctgggagaagaatcagtactggaactatgtcaaatggggcaacctgaccagtgactagtgaccactgctacgagctggaacctgttaaatttccatgcccatccatccatatgatatatttcccactcaccaccagtttttctgaacctgatgcaattatgcaagtaatcaagcaatcaacccaccggtgaagatgttggtcaatgactgaaactaggaggctaaggttatgtcatcaagatgctccatctccctggaatcccagcattttcatcctctaccatttcaatacaaccacatggaaattgtgctagaatcatcatcatcaccatgaaacaaaggtacatttcctccttttgaaaagcagtgatactgaatttttcagcacttaaatacaccactttggatcctaagattggcgtcgacacccttaactcctgtggggtaaatcacaaccccctccctgccattggattgaatggttcatgcaacacaataggactacatgagtgctacaggtgaccccctcatccccaaagaaagttctagttctcgcaaggttccaagttcatcacctagccattgtgttcacccacttcccttgctccccttcatccggtccaaccttagtcgtgaatgcatgcacgtagttacatgtacgaacatctatgttatgaagatcgtagatgtcatcgtggcgccctaatccacttggcaggtgcggtttactacacccacatggcagtgactgttcacgacgattttcctagaatagttgcttgtactgtgaggagaacttgcaaatgtaaatactgctggcagcacacagttaggagagatgttagctgtgccatacggtgtgcgcttaaatgagaagggcagaaggtcacatggtagcgtatttaccagctgtgtcccagcactgtccgtctgctgctgcccattggtgatgcaaccatggccatgtttgtgtgatcccttgagctcaaatgcttcgtactgtgattatcaaaccatctaatactaatcaaagttgtttttgtagatgccactatatcgtctcacctctcttgtcctttcttttttgttgttaggaaaaatggggcgatcttgctactgtttcaagtttaaggcggcggcagatcagcgcagtcctcctgtctcttcacagatgattggctggaaaaacaaattctgcatctcatctggtggttgcgtctcaacggagctgacgtgatggtctgacaaagatgtttcaaaccataaattagtcactgacaaagcctgcttctgttgttcgccgaaattcttttagaagactcaggccctgtttagatgggactaaaacttttaagtccctattacatcggatgtttgaaaattaattataaatattaaacgtagactattaataaaacccatccataatcttggactaatttgcgagacgaatctaatgagcctaattaatccatgattagcctatgtgatgctacagtaaatattctctaattatagattaattaggcttaaaaaatttgtctcgtgaattagcttttatttatgtaattagttttgtaagtagtctatatttaatactctaaattagtgtctaaagacagggactaaagttaagtccctggatctaaacaccacctcagtttgattactgaatagtagtgattgattttggtcatttggggcgccgtctgcatgttccatcctgcctactggtaaagattagtgatggtaatacaaaggagtacatatgttcaatgttcatagcaatcctctacaattgtcctttcagatacacaaatttgaactgaatgtgattttgtgaaatgtgaaaaggagaatggtgaaaatacgaaacaatttcgaccaatcctaagggacgtatcactggtgaatgatgttcaaaatttatgttgggatgatccaccaccgcatgtgccttcctgcagaaactccatatctaatttagcgaagttttatgcaatacacccttactcccttaggtccatgaagtgaaatggccaagggggaaaggttttaacaagggagatgaaatggtggggatatgatggaggtttagatcatacttgcaatccagctagagcaaatgcaagtgatgatgttggcctagtctaagagggcactacagtgaagatctagctcaaggatcaatgttgtgggacatgttgggggatctagcctagatgtgtctcacaatgaaggtcatgagtgtatatatccttaaccaccacaatgtgtgttgcatggcatgggagcctttgtcctccctagtgccaacaccatcgttgcctccttcattttggtgatgatggggtagttgtagctcatggttacccgcctccgggtttggtcatgtggtacttccattccctacactcatttgatttgcccctcccctgccttttgtgagagaccaacactcagaacaaaacccagagatgcatgtattgtgcaatggtgtgcagaaggtagtaactgggaatcaataatgttgttacgcatcatcctcaccaaaactcaatggcatcgccaattcaccatcaccacaatccgacttcttagttttcttaatcctgtgtttaaaaggagcctttttggtcttattgtgacacattttcgtggtggagtcaggagagagctcctattgactgtcagtagttatgagagcatctccaagagctccctaatatcagcttcaaaagataaattttaggaatctagaaaacaggtctccaagagatgcccaaagatggtaccaatatttacccacacctaaaaccagaactaatctgaaccaattttgggcacctccatgcactcccaattgatgaaatcgccggaggtttttgccactcgtgccttttcttcccctgtcgtgcactgccgcgagatgcccgagccatgcctgcagacttgtcgatgccctcgtcatcccctaccgcagctgttaggcacgcgcaagatcaccctgctgcacaacatagctgagccgctagcgcgcaattggttggtagcgcctaacgccgatctcccttttatcagaaaaatggaaagacaaacggttgaagcagatctacttgagatgatgtggcatgttttaaaatgattggaaaccaaatttaggggcactcttggagtagaaggtgatatttgggcccaatttcttttgggatggtcccaatccaagaattttaggagttaaatttttggatgctcttggagatgctctcagtggtaaattttcggcaacaaagctgaggtattccatgatgaaacttatgatttttttttttgccacacgatcaaatccattttcatatcacaaatttaattagctaaagacttgcatgcatatttcaatgaccgaacttataactacataaactccaaactacaccaaacagaaacgatcacaataatgttccaatagtgcaattaattcagctcaccaaggatgtctttttctctctttgaggtcccaaccactaacttctccagggtgtacattaccgttttcaaggtgaaaactgatccctttcggtttaccgaaaaccaagcgaatactactttcgtaggctctatttgaaaaccggcttaaggctagtctcaacacaagacactaaatatagttttcataaacttctcatcatcaagaaactagtactagacactactcttttaatgcaaacactattttttcatacttaaatttaatgctacttatttcacatgatgttttggatgttgtgtagaaaccatgtcttagggcacccgcaatggttatctataggctctctacaagagatctatgtcagcatattttcctacttggaagagattaaatgaagagagagagcaaagctatctactaacctggagatagtctataaagaaaaacgaggcaatgaattagatagctatagatacccatgtagacataccattaaagtggtttactattaatctagtctattgctgatatgtacatggtagcaccttactttaccattgtgggtgctcttatgcaagacctggtttccttatctttcctcatttattcacttgtcacattattttttatactaggtagcagcttatttaatactatggacaccatactagtctttgggttggaaatggtctaaagcaatcggttttcaccttgaaaactgatccgtgtcggtttaccgaaaatcgagcgaataccacttttgtcagctttatttgaaaaccagctaaaagcgatcggttttcacaaaacagacccctaacattttgatgaaaaccggttagaatcgcgaattctgctcccaagctaatccattttgatcccccatcgcattgtcctcgctcgtacggaaaagagaatcaagatatgaaaagtttgaaacagaactggaaatttatttgctctttgatggccgattccgatgtgcaactgttcgtgcggtggatacatactgcatgccatgtcaaccacggaattcaattaaactcactcgtcgaatgatgttgaaattgaattgaattgaatgtcgatcggtcaacatcatgtgttaattggaacgcgtacgtacgtagatacatctcctactatcgcattattgttcttttgatcagaaccggacaatgccagtcatctgcacggctactatcagatgtataaagacaacgtatatgtacacacagtacatgtgtcgtcacgcaccgccttatggaattaattaaactaacttaattaaaagcagtccataataaaagatttagtatattcaaaattacttgtaagcatatgcatgggtggctagtaagttgcacatgtatggaggacttgtacagttgtataattgtatgtgtcttatgaaaaatttgacagattaacttgtagcctgatagactgccttctttttagttgaagaaaaaggtcacaaattgaaagatgtgaaggggctaaatgatctattgtatgtgtctatggcgtgtaaaatgtgaagacaatggtttttttttaaaaggagaattttgagtgggtcttgtgccaagtgaaacctttcttgcagtactttgcatatcacattttttttattatacaaaagatgcccataaacatatatacatataactcacatacctaaatgcgctgtctacacatacacatagtaaaaagacacaggtcacgagttggtcatataaggatgagttcaaacctacatgctgtgaaactttctttccggcaaaaaaaaatagcaatggattagcgcaagaataattatgtattggcttaaaaaactttaaaaataaattaatatgattgtttaaagccatttttctatatttttttaaacaacacagctttcagcagtaggaaatatgcgcgtgaaaaatgagagagtagaagttaggaaaatatagtcgagaacacacgctaagattgtttataaggccatttcccaatgaacgatgccatttttatgtttctaaagatgccacataaacaacaagacatttaattaataattgaaacagcgcccatactgcaatgcatggttttatttttgttgtttcatagctagcatagtagcatatgcaagagacaaactgtattggtaaaagtgtagaaattgtttcatctagataaaactcatttcatctctcacttcattaatttcttactacatcatcaaaaaatactggcatatgtcaccctgtttagaataaaaattctattgggaggggcccaaacctaaagtcgtgtacttctaaacataatatgggccgtactatgttttgggccactcacgaagcccagcaaaaagaacgcgtcctaccttgaggcccaacttagtaacgcagatccagaattccagaggcctcttcgcttcacccaaaaacccaaaccccaccatggccgccgccgctgcctcgccgtctccggcgacgccgccgcggatcctcctcgccggcgacgcgaacggccgcctccaccagctcttcaagcgcgtcacctcggtaacctcctcctccgccgccgccgcgtcctcccctcccatctcgtcgtatcctctcaccggctgccgtcggcacaggtgaaccagtcgacggggccgttccacgcgctgctctgcgtcgggcagttcttctcccccgatgccggcgacggggatggcggcggcggcggggaggtcgcggactacctggagggacgcgccgccgtgcccatcccgacctacttcaccggggactacggccccgcggcgcctcgccttctcgcgaaggccgcgtccagcgcccgaggcttctcccccggaggcatccagatatgccccaacctcttctggctcagaggcagcgcccgcttcaccctccatggtttctctcttcgtctttccatttctcaattgtgttggactaatttgtttcattaacttaggcgtaaatactgtgctcatagatgagtagctttacatctccaatgtctgaagtaaaatgttaaacctgttcaattgcagcatcttttcttttgaagctgataaaatattccatgcgagctattgtagaaatgggctggaaatgggatcatcgaaacaaatgcttgctttagcaattccatttattggattttctcacctttcgttaggtttatctgtcgtttacttgtcgggaaggaaagggccaggagggcctggctgctacagccaggatgatgttgatgcactacgggctcttgccgaagagccggggattgttgatttgtttttgacatatccttttttctttctatggcattattatttcttagctgcttgtgttaaactgaggtgttgtcgtacatgaattctcaaagtatcaagtttggtgctgagttcccttgacgataatgagattgcactaacgaatggcctgctggagtggtgaatggagttgatacttctaatgcaccttctcagatatcggatcctcatggatatgatcctgtagttgctgaattggttgctgagattaagccacggtttggtttctgaattcatattttctatatccctccttgaagaagaaagtagtgttggtggtagtaattcagattttagagttcaaatccattgcactgatgttctccgggagtaacgaaaactgtaattttgtgataaaactgctgctaaatctgtagttttgtgatactatgccttaactctatagttttgagataaatgtgatgctaaatctatagttttgttatacacctccttaaatttgtagttttgcagtagtttggtcaaggtatttgtagttttgtgaaattcacacgaagaaccttccatatgacgttttattctcttttaggcttttagccttctaacaacaaattcacgaattaacattaaaggccaaacatgactgaattgccatgtatatatgtggtgtgtgagttaattctgaaatcagtgtgtgtatcacagtcaaatgccccttgtaacacaaaaggtgaaggacttcaatgcagaaattacatttatttctttgaacaatatgaagacatgcataattttcttttatccaagcaaatacactagtattaagctagtagtttaaatgttgactagactaactgaaagcataatcacggaatatgtttacatttatataagtctataagatacaatgccaaccaaaagtataccgaatttgtaacaaaagtctgtttcctgcagatatcatattgcaggttctaaaggtgtattctatgcaagggaaccatatgtgagtgattccgctgcacatgttacccgttttattggacttgctaatgttggaaacaaagagaagcaggtacatctatatttggccaaatcaacttagttcttcaaacatagtttctggttataattctactacattttcttgtattttgttcataatttagtatacatattaagttctagtactccctccgtttcacaatgtaagactttctagaattgcccacatacatatagatgtaatgaatctaaacacatacatatgt

SEQ ID NO: 5644 - DNA, 24988 bp, Oryza sativa
cgcagccgcagctgagaaaatgacagcgaacacacctattagatgtatttggtcaagacacgtagggataactcatatatagggataactcatatatatgtataattagtgatagataattaaagggctatgcattgggtccaggcgtctaggtataactattcaataattggatcatactttgcgttttactatgcaatatatgaatatatatgaataaagtattaaaaatgatggatagacatgtagaaatattataaaaatcatgtgttggattaatagtcagtaataatgggtgcacgagccccctctgtactggagctggaaacattacatttggaatccaagaattatatcttatatacccactaaatagcaattctgttttttttttcgagccaaggaaataatatttctctccttttttgggaactatgtaaatgtcactttactgaatttttatttgtggttcgaatagaattcagagatggagttttacaatgacacatttaattttagaaaaattacaatgaagtcatttaattttaccacttaagtattaatccaacaagcaaaatagttcttaattagtggggaagtcatgtggcggtagagttatgggtgtataatttcactccaccaggtttaaatcccagtgtctagaagtattacacacataagtgggtttttaacataaatttagtgagataagatatgtatagttgttttatttttataaaaaagatcgttgttatacttcaagctttcaagctctgccactcaatccaagtatagagtagacatatctgctgggtcaaatatggcaaattaagcgaaacaaaacgagtaacatttgagaatgaccagaacgaatatataactttacataataaatagatacatacatgtagataaagaacaataacactagtggattaatccgttcgatcacaaatatatatcatttaactttttttaaaaaaattgaggaagtacgaagaaaatagaaaaaaaatacatgttacttgatggaatataaaaactcaacccaactttttagaatactaaagtttattttcattttttattttcaaaatggtaacttaaggcaacttatcatttttcaagtgtgtaaaatccattgcgggcgcaccgccactcgacctacgcgttgaaggcggtggcagcgcagcagggtagcggtgggcgcatgcattccaggggttgtcggcatcgggtgcagagtcacggagcgcacgccagacgttactgcaagccttgaagccggtgccgaaggcaagcatccagaggcggtcaccggcacggacgcgacgcttggcctcaaagtaggcgagctcgtagaagacgaggctgctcgacgtgttgccgaacctatgcagtgtggcgcgcgccggctctacgacctgtggcccaaacgccatcagcttcaccaccgcgtcaatcaccgccttcccgccggagtggatgcacatgtgctcgaacgcgcgttggaaatctggcacaatcgccgccacggcctttgggttcccggcgacatatgcgcgcgccacccgccacacgtacctgcgtcatgcaccccaattcatcactgaattagtagcaaaataactataagttaaccaataaattaaattaatcattaattatgtgtttgctggctcggcagctacctactctatcccacagaaaagagttcattcatagcaattcccgctcaaatgaaccgtggtgagaaaagactaatgtgcccctcgtcagtacacttaaccacattttctagaggctcgaaataaatacaaatgtgaaatgtcttaatctgattggtttttttaacacagtggctaaattcggcatctgcttgaagctataaccccgtagcctaatcggtactactccctttattccaaaatataagacacaaccacttttctatcacgtcttatgccattcccaacccaaaacactagatatgatttccataaactccacatcatcaagaaactagtactagacactactcttccaatgcaaacactaccattccatacttaaatttaatgctccttattacacatgatgtcttgtatgttgtgtagaaactatgtcttatgcaagacatagtttccttctctttcctcatttattcacttgccacatcatttttcatcctaggtggcaccttatttaatgctatggacactatcctagccattgagttgggaatggcctaatataaaacgtgcatgcatgtatacattaactagcatctcttggtcctataaaattaatttgttttaaatcttatatcattaagcctcacaatcatattacttgtatgtattaaggtgatccaatcaagaaggtgattaaatgttttcttgatcttgtgttataagtggttatgtgttatattttttatattttgatatagagggagtactctcttagcataaagtttctgtgggacaaattttacaggataaagtctgtgggatggaaggagtatgattctcgaagacaaaaaaaaccaatgctgtacatgtggggcgtgtggtattaaatgtgcacagaaatggcataccacgtagcactgtataccaattaaaagtttgagattgtacctaaatttgtactacagtgcatcaattaattcgtcctgataaactagtgaaaaaatatacttgctctatcctaaaatataagaatttttaggtagatgcatgagatatattctagtactacgaatttaaacgaagctgtccagattcatagtacttaaaaatatgctcatccacctaaaatcccttatattttggaacgggggagtaaggtaacatagcaaaaaaaaataaaattcacttattaagggggaaaagattgacgatctgtctagggagtgactagccatttaaggatagatctaactatccacaggagaagtccgtggagttgtctattttaaatcaagatcataccaaatctacgatatatcacaaccatgaaaagtgatctggctttaacagcaaaatagaataacactgtgtaaaaatgggtaaaatctgatgtagttaatgtgaaaaaaacgattggtgctaggcgagaactaattaaagaccatggctcagtttctataattgggactacctatacatttgtcgacaaatttttcccccaaaatttgatagatgtaattacagtacaatcgtagtgtaattacactgtaacttgcatgtaactacagtgtaacttatatgtaagtttcacgtagatctattacaagatttgttttggtaaggaagaaaaaaaatcatagcacacacatatatgaaagaatttgttcccacgacctccattttaccgaaataacatgttacagagagatttttgaaagttacatataagttacactatagttatagtgtaattacatgcaagttacagtgtaattacactacgattgtactgtaattacatctgtcaaatttttggggaaaaatttatcgacaaatatatagcaaaatcgctataattttatatgcatgtcttgagagttgaccgatttgatttataaatattttggatttttggttctaaagacgggagccagtgataatttaatggggaggggactgtttctagagatgacaagtacaattaaagcatcaaaactcgttacatactccctcgtcaaaaaaaaaaaatactcatgagtttgaatccgttcggattttttgttacggagggtgtatataattgtagagtacaaacaactttaaatgtgctcatcagagaacaagttgtcgtcctataatagtaacatctaatcaaataaaactaactttaactgaaatatctcttcgagattatataaaataagatattgtaaaaaataagtagttcaaatgcatgggaaaggtcactgaaaaattttgttgccaaaatatttggataatattgcattgttaaaaaaacaacgtcaaatatatggtactaaaatttatcaatttattgaccaaagtgataatgttaacttttagtttcacctcctgtactgttcaataactgacagtgatgactgttctatccaaactttaatcaataatagtttttgttttattttgtttatatgttaaaacttgtatatacgttggagagccccaagtatttataaatgcattgttggaagaatagtgatcgaattgtatattttagtcgatgcttaatcatgtactgaagtgattttgtacacatttataagttggtttgtctaagttgtagaataattatttatatttgcaaatataacttgattagctatgagaacatatcctatgcacacaagattcccgtgcacactccatacaaaccaactagcaaatgtcacagaaaattctagaaaaaattagacacatacttccaagagtattacaccaacatgttaaatcttatcttcaaatttattatattttaactgtaaaaagaagataaaattctgacatatttttaccctaacaattggtagattttttatttttatgggtaaaatataatgaattacgagactttgcagatatgtataatactattaaaaaattgccatttttttctagaatattttgtgacatttgctagttgatgtacatggagtgcgcacgaaaaaattatgtgcataggatatattcccttagctatagcacatcttcacgggcaatatcataaacatagaatattgttctccttgattatttcgtaaactcgttcgcatcttagatctacacacctcagggaattgaaaaataatatactgcctccatcataaatggagttactttaattagtatatacgtaaagcttggtttattatatatatttttatctcaaaattatacatgtacttttcttacaaaattaaagcttcttcaaatcaaaattttcgtatgtcgtcgttatagcaatgttacaagcatgagaaaatttcatgtgcatcactgagagttcacctaattgctcttctatgttttcgagttttgctcattctcttacaaactcttaaattttagtttggattctgccatgatcttttcgttagttgaacgttttgtcctttgctatgaagaaacaaataaataaatatagaaatttgttggatggaactattatatttatgaatttattatgcgttatatcatttgaatactactctcttcgtcaaaaaaaactcaacctgtgatctctcctagaacagcattctaggagaatttggacatcacatcttctctaggttgagtttcttctctaggttaagtttttttcttgagagagggattactcattttaagagtgtagtaccacataagctctgtttttcagctcagatatttgatatgttgcagcaaaaagagcaaattttcatgtccatttaaggcgtctgaaatctgtgaaagcctgaacgcaatcaaaggctgcatgcttcgttcagctagccattatggcggcgaagagcaaaggagagagagagagagagagagagagagagagagagacctgacctgaggagctcggagacggggaggacgtgcggcgcgagcgtggcgatgtgctggcggaggcccgcgccggcgacgcggacgaggtccttggtgagcgcgacgccgacgttcccctcctcgtcctccatctgcacggcggcgttgtacgccgcgtcgtcgccgccgtggtgcgtccgcagcgtgcgcaccagctcgtacttggcgtcgccgcgccgcgccgccacgtcggtcaccagcgccgccgcgctgcccacccggaagatgcagtttgtcaccagcatgtgcttgttctcgccgaagtaccagttcaggctcatgttctccgtcaccaccaccagcgcgtacccgccccgccgcgacacccgcagcgccctcgccgccatgtcgatccccaccgtgccggcgctgcaccccatcccggcgaggctgtacgtcctcgtccccggcggcatcccgaaccgccgcacgatcatcgacgccagcgacggcgccggcgagaacatggagcaggcgacgacgacgaacccgacgtcgcgcgggcgcacgtcggacttcgccagcaggtgcgccaccgtggcaaacagcccctcctccgcctcctgcaccgcgaacgcctgcgtcttctggaactcgccggagaagatgaagggcggcgcgtacgtctcctggccgaggccggacttgcggtagatgagccgcatgaagtcggcggtgtcgtcggagtagtggcggcagcgctggccgaagtactcgcacacctccaggttcaccttccggtccacgtccgggaggtggcagctgtagttcagcaggtacaccggccgccgccgccgccgcagcacgacggccaccacgaagaggagcgccgacgcgacgagtggcactagggcgtgtgccgagagggagcgcagcgacgtcaccagcgacgccgccatggatgaggacatggtggtggtggtggcggccatgctcggagaagcaagctagctagaagctagaggtgtgtgttgcactacctagctaggggaagtgagagtagctgcactatttataggggtcaagaattttttttactactgtagcttattattactccctccgttccataatataatactccctctgtcccgttatatttgacactgtagttcattttaaaaggagtctaaatgtttgacgtcgtagtacaatcagaaaaaccgtttccatctttatccctctgtcatcctccactggtcgctagcctgctgagtgtctacctccgccacctgaggatgaggctgctaggggaacggcgccgtgacatcggccgatgatccgccgccgctgatgccttcctgcgccatcttcttccatggcgtgaggaatttccgccgcctacccaccccaccattcatggtcgcagcttgtcgtggcggtgagcttaggcaacgacttcaggagtgggagcagcggcgcaggaggaggactcgccagtgtcttggggatgctggggcttgaaagaacgtcactggtgccacagcggcgtcgggagagagcgtctgcggcttaggagaatggcgccgccgacggctctggcaaggaggggtggcggcggcggctccggcgagtacaggtggcggcgacagcgtttaccggctcgagaggaatgccgccggtgccgcagcagtgttgggggagggtgccggcggctccgaccaattgggatggcggcggtagcggcggcgcttttgttttcttccgatgatgaagccgatgcgggatctccctcctccggggtgcttggagcaggaggagggcctcgccgacgtcttaggggtgagccccggcggctggcgcggcggccggcgtttccggtgttaggggtggagacgcctctttcttccagtgttggggatttctcccgcgtgtatcacgcattcacgtgttgacgaggagaaggcacataggcaaatatgtactttcatagcttccttaattttcacaagcctgttagaaacgacaaacattacaggacagacggagtataatgcacaactattttttttaacgtttcataatataaggcatggataaatgcatgacattaactagcacctcttttctattaaattattattatttaaatccttcattctcaagatttttaattctattgggtacatgctttatatttatttgggtgatccaaacaataaggtaataataaatatttcttggtctttagattaagagtggttgagtctggtattttggaatggagggaattatgtttgacaactatagtatgggtgaaaacgggacgggtattttccactcgtctgcataacccaaggctggtgagaaggatataggagactatacaaattcgaattcaaaaaatttttatagggttagagtacttcaagagttgaatcagcccgtatatcccatattatcaaacatatgcatatcgattaattattattttacgagctcacaagtaatattgcataattttccttgatgtattagcatttaacacttttttatcttcaaactctcgtttatttgccaggttagttagatactgccttcgatcccttgcatttcttttttaaggcaaccttcctatttatttaattaattaagggacccctcatatatccgttccctatccaattcggaggaaaaaaatatgggatatgatagaatgtaggatgggtcatatgttattagcactatctatacccaattctaaatttgaattaaaaataagggttaggatataagaatactatgatccgaacgtcttcgacccaacttcagcccctaaaaatagggattttttatttgtcaaacaactgattttttttcttatctatatcaattacctttgggactagctaagtttatgatgtcacatttttttaaaaaaaggtcaaatcaaacattgtaaattacccatatttaaattgttgttacactataaatttgaaaatataaatacactgtaaatgtcagtaattaaattgtattttttaatacacactatatatataaaagaagtataggtactcggtataagaaataagatatatagaaacatactatcgtataagagagatagcaattgatatcacataagggaagaagtgactaaaatggtaaaaagaaacagtaaggctgacatatttttcgagaaacgtaacactagatcactaccaacaactcacactacttatgtatatttttttattgaggtgaagcaaataatgtctaaaagaaaaaaaaacttttgtgctaaattcttaccggtatgaaactgaaaattatgaattacagaagcataataatacgtccagaaaacaaaaaaaaaacaaagaaagtaaaaaaaatgtgcttcattatactgaagttgttgttttttctatatattgtgaaagtttagtaaataagctcgtacaaatttaggtgacagataaataagtagaaatcaggctgctgataaataccaaaactgtttaatattagcaaatggatggtctgcgcaggaaagacagcaagagatttgtagaaccctgacgaccgtaaggacggattaaaaagaaaaaagtccgccgatgtcatggatgacccattaatgttaatgttattcaacatatgaaattatgttctatgtatatgtagagtgttttcatcctttgaggggatatctactcgatatctactcattttatgcatgtcacataaataatcactagataaattgaagaaaactgacaagatatattaatatgaaatatatcactatacaaatatgcaagttgaaatttaacatgtatgtgttgtaacaagaataagaaatatagttgtgaatgtacgataattatttttaatttaatttgttctttttttttgcatattttagaagttaaatttggtcttacatgtttgtggagtgatatattttatattaatttatactactatttttttcagattttttattgttatttagatgacatgtaagtaatgagggacatcttctcaagcgatgaaaatccatatctgtatgcgtaataaatagattttaccgaagattgtagaggaggcgaggcagcaaaccgaatccaaaattaatgtcgtgctttcctgctttatcatatacttgaaaaattcctgtgtgttacaacgggtggatgctattttaatcttattattatcgttatacagtttagctaaaataaaattcactgtgtgaattcgtttgaaattttttttaagaaaataatgagccgcaattaggagttcgactttcatctcaagttagcgtacggagttttttaaaagagatttcttatacgacttcttttgtatttccaaaagcaaatgagtttaaaatctaatttaaacacggatttgtatttccaaaagcgaactattttaaaaaccggctcaaatacggataacgtactaaagtaccgacaaaaatatattcaatttttataatagtaaaaataatgtaatcttcttgcctttcttttaaaaaaatagcgttgtgccgtggatagtccttgcctccttggtgggcatgcatcatcgacattgataataaggcaacggagaggatgctcgtaggtaaaggaggtgtactgagtactgtgccggtgaatgggcagcttggtttatgagggttagttactgtgatggtcaggataggcacagtcgtacagatcggatgaaatatggaccgttatatattcatcgaaggaccacaaatctatctgtatttttgatagaaactagaatattgatttgcaaccatattgaaatgtatatgtcgaaatgtatggaaatgttgcattttcatttgtgagttaacatacgcatcttcacccataattccatatgcattttcatttgcgagttaacatatgcatctttgcgagttatagaagtagatttctaaaggcgatctgttggaactagagcttatttgaaaagttactacatttgcatccactgatttattgcggaataaagtgtaccggtttatcctaaacttatacgagtatgtcatccagatacctaaactttcaaattatatctccggatgcttaaacttgtcttgggtatcatataggtctaaacgggcgtcaacctactctgtgcacttacatggcatgccacatcaacacctatgtgtcagtggaacctacatagctacatgtcattcacattataaaatataaagttaaaaacattttggtatccctatcccccctaatcttatgatttattatttttttaagaaaaaatggttggtttttcctagtagaaggacgcccaatgatggttcagctatgccagcagtgagagaggcggtgaagcagcgaggggaggctggttccacggtccttgagcaacaaagaacccaatctgtggcttctccccacgcgcgtggcaacggcggtggcgttagcagtaactcccagtaactcccatgacctaggctttgaggagggggtggtgagcatcatggtatcgagatgaagcggatggaggcagcggcttcgcacaaggtggtgtagaacaacgcatgatgtgtggtcaaaatagggtggcagcgaggaggggtggctccggcgagatctggaggtggttaggttggaaaagtttgatattttcgctcggattttataccacggatgtcgttttcattatgcaacaaactttgttgtcaaagttatttgctatgtgatctttatgcattatagcttaggctgtgcatatttttaaaccacttaggtggatcataggtggatatatattatttatccttgactatatgcttaatttgtttaattaaacacattgtcaggggctacacctaattaggtacatctaattgatacacctaggtatatttttttttctaatcttttaaattttcagcccttcaaagcttgttgaattggtaaaggcactcagtagactaaggcagagatgattgaagcactcggttcgatttgatacgttcgagagaagattatcttatcgactataaaggtctcaggggctatttatgaagattatgggtactatgcatctgcgcacacggctgggctatcggactggttataggggatagatcatgtatatggaatatgtaaaggattgggactcaggtattacgtttacttgtgtatcgaggaaacgacttatagtgctggttcggcaagattttaaagtagttgtaggagatttcaacgggattgggttgaatctctattttgtaaacatatctcctccgcctatataaagaggacagcgtgtgtcccttgagagcataaccacaatccaaattgtcggatcaatgcaacaataggcagattcaatccctaaatagaagtaaggtattacttctcatcaagaaggtctgaacctgtataaacccttgtcttatcacccatccactttagatactttgcgcaacctttttttttatgttaccaagttctagttcgataattttgaaggtccagaaaactagataccctattcaatttaagataacttagaccattctcaacccaagacactagacataattttcataaattccacatcatcaagaaactagtactaaacactaccctcccaatgcaaacaccactattccataattaaatttaatgctacttatctcacatgatgtcttggatgttgtgtagaaaccatgtctcatgcaagacatggtttccttctctttccttatttattcacttgccacatcatttttcatcttaggtgacagcttatttaatactatggacatcatcctagtcattgggttgggaatggccttatacacttcgctcttgacagctctcgcccccgtacgtgccgattagccacaccggtcgccgctctcgttctcctcaccgttgtccccctcctaccaaatttagtggatagccagtacaagcatttgatgcaaagaaataatcgtacgtttcatccatgcattcacatgggcacgggggtgaacgtggcaatcgggggttcaattctcgatcctccttcattaaacatgatgactgtaccgtactgttgcttgcgccatactactgaatcatgcaatgctcattaattaaacaaaccaaacaacaatccatcactaaaccggctgtaggggccttcctaacattgggctatttggatgtaggataggcagcggcagggtgggctctcagatctagtcccacgtcacacggattcgtttctctctgcatgtcgtatggatttgtttcgcttgtgttatggtatgttactgtatctaggagaaactttatagccaatacgtggtttagttggtaggtatcttactgttagagcttcaatccgttctagacacaaaccagtacacccttgatatgtttgacagcttgatcaaatattgatggggagtaacaaacatcaaaaaaattgtaaatgtgcaagggaaagacaatgcgacgtgtccctttttgtgttattatcgggcatgattttgaatgcatagagtagtggttattcaaactacggatgctaaattaaacagagacaatgggttgaacaataactatgctactctttcagccgttcatttgaggttttcattgtttgctagctcatttgttaaacataggtcaacccctactaaataattatttttttgtgagaccctctttatattgcaggtggaccataactgctccagctgtagaaattgtttacacggggtcggttcaagggccgcattcgaaaattcgacttacttttgcaggcgggcaaaatgcattttcgcatgtgggcctcttaaatacctgcctacgagtctaaccttcctactctcttccctctcaatatcttcaaaattttaagtcttcattcttatctcctcaccttctctctcccacttactcctggatcccaatgacaggctcgagctggcgttggcaatggcgggagcagtggcgggaggcttctactccatcatgcatacatgctcattaattaaacaaccaaacaataatccatatcactaaaaccggctgtaggggaacattgggctatatgaatggaggataggcagcagggtgggttctcagatctagcctcacgtcacacggatttgtttctctgcacgtcgtatggtttttgtttcactcgtattatggtatgttattgtacctaggagaaacattatagctaatagtggtttagttggtagattgttgttggagattaattcaatccactccagataggaaccagtacaccaatatgcatgtttgacagcttgataaaacattaattgatagatagtaacaaacaatatcaacaaaatttgtgaatgtgcgagggaaagacaatgcctttttgggttattgttgggcatgattttgaacgcatagagtagttacattcaaactacggatgctttagccaatgcaaacacttaacaaattaaacagagacaatgagttgaaaaataactatgctaatccttgagccgttcatttgaagctttgatcgtctgctagctcattggttaaccgtaggtcaaccactactaaataattgatttttttacgagaccctttttagactgtaggtggaccataacggctctctgcaaaaatcgtttacgcggggtcggttcgtgggccacatacaaaagtccgacttattgcaggcggcaaaatgcatttttgcacgtgggtctcttaaagacctgcctacgagtctaaccttcctactctcttccctctcaacatcttcaaaattttaagtcttcatccatatctcctcaccttttctctctcacttcctcctggatcccgacgacaggctcgggcaagcattggtgatgacgagcgcggcgcggtgggtggtggatctggaggtggggaggcacagtggtagcggatctagcggtgggaaggcgcagagtggtggcagcctcagcgatgacctcgggggtcgggaggcgcggaggcggtggccctggtgacgacgaccggctgcagactgcggcgacgatgatgatgagctgctgggctttggcgacggtgatgaagagcagcggcgatggtgacgatgagcggtggcggatgggggttttggggaatttttttttcacgaattttatttttgcgtgcagacgacataatcacccccataaaatagcaatttccgcatatacttttggttggacggccggctcaaccgcttggataaatgggctcttaccgcatgaaaaatattttttttataaatgagcctgaggttctaattggaatcatctgaccacgctgctagtaacttcgaaacattaccaaaacatccaataaaatataaaccaacacaaattaatcaatcatacgatcgactgtttggatgggacttaaaaaattttcgctatcacatcagatgtttgaacactaattagaagtattaaacgtagactattgttaaaagtcattccataaccctggattaattcacgagactaatctattgagcctaattaatacatgattagtctatgtgatgctacagtaaatatgtgctaattatagattaattaagcttaaaaaaatatcacgtgaattagcttttatttatgtaattagttttataaataatctatatttaatactttaaattaatattaaatattctatgtgacaggaactaaagttagtctcgggatcaaacaccacctgaagctagctgtagtagtctagtctggagtctggaccatattgcagagagagcaagatgatcactgctgctttctgcgtctctctgcgtcagtgccggccggttgccggcacggccgccgagggcaggcactcatatcgttgcagcgacgatgaccgatcgaccagcgagctgcagtacgtgcgggggcgtgcacggccgcgcgctagctgccactgtcgagcgtcgccccgttccaacctcatcggagtacatagctagtgggatttgaagttggctcagagaggtagtacgtactatatgcacactgctataaaagttggcatatgcaattcaacccattgccatattgcagccatagcgaaccagaaaacgaccttacagtcactgccggacaaaccatctttcatctttcatgtgttggatagaaatcacaataattccggttgaatcaaaaaccgggactaaaaactatttttagtcctggggtataagttcagaggtatttttttatctgtagtcccggttaatgagattatttttagtcccggttcattcattgtcaggatatggcaagcccccctaatatctttagtcccgattggtgtcaacaattgggactaaagattaaaaaaatcacgcataggaaggggagagagaaaaatttcagagattccctcctctcatctttatcttcttctatcttttccctcctctcatccttatctctttctctccctcacatcctctatcttttcctcccctccttcccttgccgactttccctctccgtctaacctcacattagcgggcaacaaccggaggcgttggcggcgcgtggtgcccagcgcggccgtcgtggagggcggcggcgtggcctcatgggggccctgccattgtaaagggcggcggccggtggcgtagcctccgctatgcgtgcaacggttgaggcagaggcggaagcgggacaccccgcgtcgtcggcgttctggatgagctcctgcagcgtggttgtgccctccgggtagttggcaagcacggagggcgggcggccaatggcgtggccacgcggagggcggcgcccagagcggcggtcgccggtgtgaccgtcgtggagcagaaaaggtagaagaataggggttgctttttagttgtttttgtgaatgattttctgatgtaattttgtggatgattttgtgatgtttttgtaaatgtggatgattttgttgttgaatttttaaatgtggatgattttgttattgaatttgtggatgattctgtgaatgaggacggtttgaaatcaatattcaagtagcaaaaaaagaaaagaaaatctttagtcccggttggtaacacccaaccaggattaaagatggatcttttgtcccaggtatttgaaccgggactaaagatcagatctttaaccctgtaactgggagtacaaatgctttctctaggagtgagtacttttggagaaggaagagatcctgtgcaatccctactttactccttcaatccttgaaaactcaattagcttatcagattcattgttttagaataaatcacattatcctaggttgagttttcttttactagcaaaaatgcccatgcgttgcaacgggtaaaaaaattctaatgataatatatgtttttcatgcataatcatgtcaatgatgtttctattttaataagcggcttgtttattataaacagtgtttttttccttgcacgattttctcaaaccatttttcagaaatggcgcatttctttctaaaagttttttcctagcatgttttgtttctttttttactgatgaagaaaaccatatttttctccttttttttgcttttcttttctcgtgtgtttttttgcatgttttctcgcatgttgtttttgcttgtttttttcgaatgcttttttcttttttccaatacaagagaatatatgacgaaataaagccatgtagtagatggcaaaaaatcaatgatcctatccgattcaagcgtccatcaatttagcttttttctgacaattttttcaaagcgatttgttttttaatagaccttgtttttttttgtgcagttttttaaagcattttttttagaaatggtgcgttttttcagacaagtttttcctcgcatgtttttttaaaatatattttaccgacgatggaaataatttttctcgcgcgttttttattttttttattgaagatggaaaacctttttagcgtgttttttttgcttttttctgacttttgcctcacgcattttttttgaactgttttattttctcgtgcattttttcttttaaaatagttagattagattagagatagagaagagatatatactggttagaaatcggattttgtttcaccacttttttagggaatcggacgaactcttttagatattttttagatttttttttggcctttataggaataagactttttttcagtttataaaggaatcggatctagcatttttttcaccactttttttgccttttatataaatcagattttttccgttcggatctacagtttttttcgccacttaggggaaaaagacttttgttgttgttgttgtttttctttattttcttttttgtgcggcttttctttttctttttatgcacatttctgcctttgttctctctcttttattatttttttaacaaaaacgaccttaagtaccttattgcaagattatagggactcaaatgcaaatataaaaattacagggactctaatgcaaaagtacaaaccaaaaataaaatacatataaaaatggaatgctctcgacacgtaggttccgtttttgcaaacagattttcaatccggcacatcaatttttttcaccaatgtagagtttggaatcggacatattttttttcatcctctttttaccgcgttgacagagtcggattcgtttttcttttaacttattttcgccctttttttggatcggaccgattcggttttcttttcttttttcggtttttattcgcctgggtttttttggatcggacatttttttcgcccggttttattgacgtttggtttttcttttctttttctggtttttttcgcccggtttttttggatcggatagattcggtttttttcgcccggtttttttaacggacgatggaagcacctcttactttttaagtagtagagaagagagagtatgtagggaattcaggtggttgtaacttgtaaggtttcattaatgttggatcgagtgaattagcagtacagatccatactacagcggttttacataattattaacaactactttgaaacgcaggattaaaaaaacatagaaatgtagtttggttgtcatgcttggttgaataactttaagggaaatcgatagacctcgtttggtagcatctaaggaaaaccatagaaataacctctttaggacttaaagaagagcaaagaaatgatagacctcctgtcagttttcatgcaaagtttccatgaaatgagtgaatattcaaggatttttgtggaaactaaccctttggttcaaagggccaagtagatttaagaaccaacatcttaaggttctaggaataaaaaaaaaagaagacaactcaatccatcagctcaattcaaagcctatgcatcaagcagctccctatcacccccagaccatcccatactcaagaacaccttcatgattcagccacataccaccatcgatccatccaacaacaacatcccctgcacaaatcaccattgatccatctaacaacaacattccccgcacaaattacaatagatccatctagcaacaacatcccctaacccccccccccccttttaccccactaccaccaccaacacacacaaacacaaataacagaaattgattcacaaatctcggcacaaatgaatagttccatcactcaatttagacttcaattagaagtcccctgttgtggagtaatctgcacctcaccgtcgttctggttggatccagtggccaccactccaggccagtgaatagaagaggcggttgtcgccatgccgtgccatgatggggagaggagtgataggagacgggagatggtgaacgaaggggatggagagacggagggaaaacgctccatgagcactagccgtcatcggctttgctcggctcccggtaaaagtgccggcttttctaaaactggcacttttatctcaagtataggtgccggcttattaaaaattgacacttatattgttgagaaaatttcttgtgtacccctaaaactttacaaaatccctaatatgtccctaagttttgctcatccccttgcgtacctcccaaatattagtttgggccccttccatatccttttcattagttgaccattaaattcttagtaaaatttccattttaccctttggtacgaagaaacatataaattggcggagtataaaaatttattgtataagaattttatattatgattttattatgtgagatactatttacaacaaaatttatttttagatatgacataaagtactagcatttattgtttaattattaaaaaattatataagaagtatttttttgttgattatagcacaacatatttggtgtataagacaaatctatttatatgctacataaacaatttttaataaataataaacaaatattaattttatggcatatttataaataaattttcataaataatatcctgcataacaagctcataaatacaatagtctcatataacaaatttctaccatccaataatatacttcataaatatatatgtttctaacgaatactatattccataaatatatatatgttttttcatacccaagagcaaaatagacttttagactttttataggaatttaatgtttaactcacggtcaactaaagagtatgaaagggatcctaactaaaattcgaaattacataaagaaatgaccaaataactccatgatatatataaagaattagataaaagttttagggatacataggaattttctcaatacagttaactgatgaatagttggtccctttcacttttggtgggtgtcgatttatgatcatggttgtgtttctgtacctctggctaaggtggctagttaattggctactcgtacttctatagctctaagatgacataccctagaatggccacttcatgactcttgccacttgccataagggtacaagcgactacccgcgaaaacccacttataggctaaactaatctacgaacttacttattttgacttatatgtaggttcgtgggtgacccacttgaacctctaacttgccatacttctttcagctgctagcccaacaagtagcctgtggatttgtactacctactgcatgtagtacataccatgggacatgaatggtggcaacagattcctgtttgggcagctcgatctatccatgcaagggagaagggaccaaccagtatgcgtgagaacggtgtggtaattttcgaccgtaccactgccgtttacgtaaaaataatatagtttaaatttttttagcatatataaagtttagtttttttttatttctgttggcgtcgcattgaagttgatcgtcaatgaacagttaaatttataaatataaataattttgatcacgatgatattgttttcgtaataataataatatatatcgttttcgaccgttttcatccacccaatagggatctggctagtaggaatttcgatatgaaacatttcaattcccgcttcaagaaaattaccgtcacttccaataggggatgttgtaactcaaaccagacaccttatacttggtatcaaaattttaatagggtagtaaaacatgtaatagaaaggggaatatgattttttgcctatcattctaattaaaggcgtgcatgcatacggtgaaggattcattgcgctcccaactgtctggaggtctggaccatgcctgtaaatgttaaagctggaagtaagtataggcactaacttctgtgaggccaaaacccagatctaggcatctctactgttggagaaaatacaaaccaaaactggatatctctgagagctggaacacatgcatctacttgtaggccttattgcaatattttttctgttgggttggcatcagatgttatgcaataaatgttggacctatagaagtatataaataggctcactgctaaataacgaacgtagctcaactggttaggttctttatggtgaaaccaactcaccttgtcggttaagttttagatttgatatggatgcttgcatttatggttaattattcttccaatggtaggcaataacatacccactgatagcgaggtgcttgtgccgacttcatcaatatcaagataaaccgacccagtcttctggaggtgctaatagatgtatggatacgtgatgagtgtgtgtgcgttatgagggccgcatttacattgtgtttataaaaaaatgtaaataggctcactgctaacaagaacttaagtaagtttagagtaaattgcacccacagtacaacaacttggcaggtgggtgcgatatagtgaaagaacttgagaattgaacgtccgagtgcaacataatgacaagtgggtgcgttctactataagaacttgacaatttaatattttggtgcatcaacttggctaagcatatgctagctgagtttttttcacgatgtaaatatgccattacacaatattcctacggatattaccttataatattgaatttaatctttaagaattatactgcacatacaatttacatccaattacctttaagattttttttattttcttcaccttctcaaatatcaaccaaaatataataatttctacatccagtttaattgactttaagttattagttattaggataaaaatataaacatgcttatacaaatccacgctagtatattgtcaaaataagtacttaaaaaattgaatttatataaaaaaatgctctaaataattaagttgtcacgtaacttcttaatttattgtatcaaaatcgtacctaccttacaagttgttgcatttatacgatcacttataatagttttatactaaattgcaccttcctaccaagttgttatactagaacgctcatttctcaatttatggcaccaaattacacccacatgccaaggttgttgcatcgtgggtgcaatttactcgtaagtttatttatccattttaaactaaatcgtagcactactgcaaaacatcaaatagggaccagcctcgtaggtgcagatttatctaaaaccggcacctatgagacgtcgtccaccctcccaacctctcaagcaggcctagaaaaagcaggtataacttcttacccaataataggaatacaatgatttataccagtactaataatagtatggctagtaggaattaaaaccggcactaataataagaattcattttattttataccattgagtttactttaatccaatgatttatcatcgactttatcccctctaaaatacaccattgattttatcgattttttttacaatatactgtcggagtggatagttttttttaaaaaaaaaagtaaaatatcctttaatagagcaattgatttacagaagtttaaagaaaatatgaaaactttatgtagactccttacacaatatataagtgtatgtatatttcaagatttttaatttacatatattatttttttctgaaaatatattttatgttttatatgctaatggaatactttttttatgttgatgttcttttatctaaataatctttcatatgctataaaaatatttttccactacggctatcttttgtgtatgtgattcctttttccatatgctacataaaaatagttttttttaaagaaaagcatatacaaaatcttaaaatacacacacaaacttctatacagtatacaccctctattccatattgatcatccatataagtctttttttatcaagacaaaaacagcttaactttttttttgtatttcatttaatgtaagtatgtagtgggaaaaaaatcaagaaacatataaaatataactcccccgcatgcacaagaaaccagtgttttacttcccctaatgcttgcatgcatgcatgcatgcatgtagactcaatttgcatgtataaaaacaataatgcttcacgtcaaataaaaacgcaagggttatatgatgatcaacaagaacggaggaagtattatttaaggagactacgcaaaaactttcatatattttttcaaaaattctaatgggtcaattaattgccaagtattcaaggacattttaagcttttttttaaaaaagtatttacttcactggcatattgtattgtaaaggaagataaagtcgatcgtaaatcgttaaactagagtaaattaaatcaatgacatactccgtaggacatattctctcattatcccaatccacacccctctcctcagtgagtccacacccttcctgaattatccgccgccactctctcgatccccaccacttcgcctacatgcgtcaccctcccttctcctcccccacctttaccggatctaccaatgacatcgtattttccaggtgtcatcaagtccagcaagattatccacaccaggcctcctaaactacatgacctcctttgtgttataaaaactagctctgatatatgtagacctcaatagctgacgtagaagatccaatcttaatgacgatgccaaggtatgaaaattttttaacgaggtttagcctacacttgtatccccgatacactgattatagatgctctttctcgatccagcgtaattacagagtattaggatatcagtgatcctcgactagttaggccgccaacagataggggtgaaaatagggcgggtattttccgtccacccacccggccacattatttcgggacaaattcgggtcaaaaattcgggtacctaggactttttacggatattgggtccgaatacgggtcttttgtggatacgagatcgggttcgggaacataatatctgacggatacggattatccggcaaaaaatccgggtattacccggataaatattcggatattacccgtattacgtttctgtgaggcaaaaaaatctcagaatgaattcaaaggtctgatagcttgtaatgctgtataatgcctctaatttggtagtgcctaattattaagcttgtttttatgcacctgttacttaaaaatatatcccctcgtacaaaattttcttatagttgctcaatagctgtaggtttaattgtttaaactacagctttgttagggtactgacagttgtggcttgtaggatacctggcctgtgtgctcgctgttcaagtaccggaactctggtgcttactgaaccggtttcaacattcagcgatggtgatcagcctttatctacgccaagaacagagacgtgcccaaattgttcgggtgcaggaaaggtaaattagccttctgcacaatgatgtattgtattatgtattggttctactatgatgtattgcaccctatttattttctaaagtcttaatggcccaatataattatattatagatatatgggattgttaaatggttcttgtctacttcctccgttttataatgtaagactttctagcattgaccatattcata

SEQ ID NO: 5645 - DNA, 1185 bp, Oryza sativa
taaatcggagctaagatgaattagttatgaatttttaaagattaaatcggattacaacacttaaatcggtttaaattgaattatgacgcaataatgaattatttttgaaaaggaaaagaggatttattgcgtcagcgggctagggtttggtggaccgggcgcacgggcgacggttcacgcgaacggacggccgagattgatccgatccaaatcggacggccgagatcgaacgagtccacggcggctcacgggagaggggcttgatgacgccagcgatgacgtcaccgacggcggcggcggctcggcaaagaagacggctcgggcggcggacactcgccggcgaacggcggcactaggacgcaaacggaggacaccaacgggtagcggacggcacggcgaactcaccgacgaccaaggcgacggcggacgaccaacggacggcgacggcgacgaggaggaagcggcggctaccttcggcttgacgacggcgacgatgctccggcggtctccgacggcagcgaaggggcggacgaggacggcggcgacttggcgatgacgacggcggccttcccgagtgacggcgacggctggaacgacggcggcgcacggctggagcggcggcggcgacagcgaagctagggcgcacggcgctaggacgactccggcgacgagaggcgaaggcgagggtggcggcgagaagagaagagcacggggatccttttaaaggggctcggaggcggtggcgaaggcccacggcgacggcaacggcgaaggaaaccttcgggaagaacgaatccgagacgaactcgaatccaactcattccaaaccgattgagccaaagattccaaaggagaaaaggtagaggagatcatttcccctctattgattcggccggagaaggaaaggaacggccggattggaaaggaaacagcggcggcggctcggcggcgcgaaactagggtttcggcccgaggaagacgacgggcctgacaggtgggacccacctgtcagcggctgcgagggcgcgcgcgcgcgcgggcggctgcagactgggccggactgggccgagaagagagagaaggcggttttgggccgactttcggcccaaagccaaaagaagactttttaaaactttttcaatttaaattatttcttaaatgcaattccatttattaaaaatactt

SEQ ID NO: 5646 - DNA, 26043 bp, Oryza sativa
taaatgtatttctatatggactctagtctcctattctaatattctttattttttagttccgaattttagctatttctaaattgtatttctatatggactctgttttttctttttctccgattaatgtgagaatttctaggccatgagagcgaacgtggaggctcctttttctatggactctattctcctcttctaatattcctttttttttaattccgaatttcagttatttcctaattgtatttctatatggactctagtctcctcttctaatattccttatttttaattccgaatttcagttatttcctaattgtatttctatatggactctagtctcctcttctaatattccttattttttgattccgaattttagctatttctaaattgtatttctataaggactctgttttttcttttttagttatttcctaattgtatttctatatggactctagtctcctcttctaatattccttatttttaattccgaatttcagttatttcctaaatgtatttctatatggactctagtctcctcttctaatattctttattttttaattccaaattttagctatttctaaattgtatttctatatggactctgttttttctttttctccgattaatgtgagaatttctaggccatgagagcgaacgtggaggctcctttttctattcctttaataatataatagattatctcatgtctgatttggacttgtacaaacctgaggatataaatatgaagggacctctagagtcttagtccaggcagatgaatacaatcatatttcggcgcatcgtcaccctagccatagtttcgatgggttcttaccctccagcagggctgcatcggttaagtttgatctccagcgaagggataagccctgtcatcctggtaatcgtatcggtacaattagaattttcccgtatttcgcttgatattctgactagtctttatagtcgtcggtttatctttgatataccaacttttgctaaggctgtatcgcttcgatctcttggttcgatatggtatatccatcacgtttacatagatctatctattacattgttgctaataagtttaattctactaaatcaataagtttaatgtactgttcattggagttttaaccgatgagttatcattattcaaagcttcaattagcagacatatcggcttagttagccgatatacatttaaatctacatgtattagacattaagccaatgtatgttttaatcattggacctgcatctatcatattacactatatctatcagtattggttgatttattcattggttcaattattcatatcatcatggttagttgcatgataaaactaactaacacgctttgagcctaacttttatgacctacattagacttaagcaaatctcttacacctctgtgagttggacaaaatttgtggcaacaaaaaaattgaattcccattgaaattcttagcgataattaaatcggaaagattgaaactccacaggtagacttcctaaaaattgtaatttgattttctatctttcagatgcacaatttatttttcatttatgtacaattttgaaattttcaactacaaccattttcaaatttttgcaccgatgggcgatatctttctcgaggtcagcaatgaaaaaaaaagtggaatttgtgtggtgccaagcacgagggtaccagttatgctttggtcagcaacaagaaattagtaacactctaaaagtcataggagcactggtgcatgccaaactttgtgtggagattatgggtatcccatatctacacggcgatggtatttggattgggtaccggatacttaatgtagatagaatatcttatctgtatttcgggtttgtttcttaacttgtgtatcaaggaaacaccctgagatttagtcggttacgactgtattttacttgtatcttcatattccgttaagaatatagattatcttttgtaatccggactccttcccatatataaggggggtcctggcgcctctaggggcatatgttgattttctccaaatcatacaatcaataatacactcggcggattcatccccggacaggagtagggtattacttcttttataagaaggcctgaacctgtataaatcctttgtctccaaacccatacacttttctagcttgatagccacccccttttattattgccgaaatctagtttcgacagttggcgcgccaggtaggggtagcgtcaagcttttcgccgatcagtgcaatgggtcctttctccggcatcgacgacctcgtcttcccacccgggcagacgtttcggttcggcagcctcgacttcgtcaccaacaacttcggcaagatttctctccttgactcggaatcggaccagtcgggagagaaccggatctcagtcccgtttggattcccaaacgcgggtgaaacctacttcaagaccatctcaatcgagtcggcttcaaaccactcggctgagatcgcatcttctccaacgacaccagatcaagatgatggggcttacccaccagtcctgatgaagctccccgacgatttagcggccgtctccacctcgacagggtcttcatcccgtaggcctaggcggaagtcggctccaacaccgattccgcctagcttcagggaagtcggcgtcatcctccagccactcggcacggtttcgacggatcagctagatgactacaacagctctcccaccgtcgactcacgtcctactgacatcgtggagtacgacgaatttagctctcgctacaacgacttcgacgactacgacgacttcgacggaagcctagatgacaactacacccctctctactttggcgttttcatggccaataatgagacggaggagcaacgccaagcccgggagactgaagaacgtcgccgactggaggaggagcatcaagcacgagaacaagaacggctacggcgtgagcagcaggaccgtgagcggatcgccaaggaggctgaagatcgacgtcagcgagctttggaagcagggcgccgagcgcgtgatctcatcggccaacaagacgtcgaagggacaccggttttccgcacccctcaacagaatgcggttgccgcgatcaccctcctcgacaccctcctcaaccaaaacgagctcaatcgttccgaccacgtcgtcaacatcttgaaccagacgaagaccatgatcgcggcttcggtcccagttaactccgaaagcgtccacacgccgactggcagccgagtcccccacttccgatctcatgactaccgtcatccaagcctcagcatcaccggcgcaggatccaaccgcaggagcaggggtcacgacgagcggtctgttcactcacctcccgaccttcatagggagcgccgagtggaacggcctcgctcaccacctcgtcgccgccccatcgatcttcgcgacacaatcatacagcgccgagcagctcgaggctaccatcactcaccggaccgccacgacgacgaccttgacggagtagcagccttcaccgacgacctgcgtcgagtggattggccagccggcttcaaaccgactggaatagagaagtatgacggcaccactaaccccgaatcgtggcttaccgtctacggtctcgcaatccgcgcagcaggaggagacaacaaggccatggcgaactatttaccggtggctttagcagattccgcccgatcttggctccatggattgccccgtggtacgatcggatcttgggctgaattacgcgaccacttcatcgccaacttccaaggcaccttcgagcgtcctggcacacaatatgatctttacaacgttatccagaaatccggagaatcccttcgagagtatatccgacgattttctgaacaacgtaacaagatctccgacatcaccgatgacgtcatcatcgccgcattcaccaaagggattcgccacgaagaattggtcggcaaatttgggcgcaaacctcccagaacagtcaagctcatgttcgaaaaagccaacgagtacgccaaagccgaagacgccgtcaccgcatcgaagcagtcgggtcccagttggaagccgaaaaatacgccggctacgggaggaggtggaagtaacaatcataaggaccgcaagcgtaagcctgaggaacttgttgcaaccgccgctcactcttctcgacagcgttcgcgcgttaacaccttcgacaagatcatgaactcccaatgcccgcatcatccaaactccaaccacgtggccaaagagtgcttcatctacaagcagttcgcggagcagtacaccaagtctactcggaagaactccgacgaggaacaaagcacgtcaaggaagaaggacgacggcgacaccccggctggatttcaagaccaccgcaaggagctcaaccatatcttcggcggccccctggcttatgagtctaaacggaagcagaagttgactgaacgggagatcaatgctgttcagcccgacacgccccagtatcttcgatggtcagagattgcaatcaagtttgaccgctcggatcatcctgaccgagtggtccacccggggcggtaccccctggtactagacccagtggtccgtaatgtcaagcttcgcaggaccctcattgatggtggcagtgcactcaatatcctcttcgccaagaccctggatgatatgcagattcctcgctccgagctaaaaccaagcaatgcgccttttcacggagtaattccaggattatccgcaactccactcggccagatcaccctcccagtcacttttggcactcgggaaaatttccgcacagagaatatcagctttgaagtcgccgatttcgagacagcataccatgccatactcggacgcccggcgttagccaagttcatggccgtcccgcactacacttacatgatgatgaagatgcctggtccccgtggagtcctatccctacggagcgacatcaagcaagccgtcacatgcgacaaggagagttgcgacatggcccaaacccgcgagatggcgtctgcccaagaggaaatccgactggctgcaaccacggtgagcgaaggagaagtgcccgctgccaagatttcaaaaagtggagaaaccgaagccgagactaaaaagattcccttagacccttctgatcctaccaaaactgctgtaataggcgccgagttagattgtaaataggaaagcgcgctcatcacctttcttcaaaataataaagatatctttgcgtggaaaccttcggatatgcccggtattcccagagaggtgattgagcactccttacatgtcaaagaagacgccaagcctattaaacaacgactccgccgatttgcacaagacaggaaggatgcgatcaaggaggagttaaccaagctgttagcagcaggcttcatcaaagaagtccttcatcccgactggctggcaaacccggttctagttcggaagaaaacagggcaatggcgcatgtgtgttgattataccgacctcaacaagtcttgtcccaaagatccttttgggttgcctcgcattgaccaggtagttgactcaaccgccggctgtgagcttctcagttttttggactgctactcggggtatcatcagatccgactgaaggaatccgactgcttgaagacttcattcatcacgccttttggtgcatactgctacgtcaccatgccgtttggattaaaaaatgcgggagcaacttatcaacgtatgattcagagatgcttctcaacacaaattggccgcaacgttgaagcctatgtggatgatgtagtcgtcaagaccaagcaaaaggatgatttgatctcggatctagaagaaacctttgcaagcatccgtgctttcaggatgaaattgaatcctgaaaagtgcaccttcggagtaccgtcagggaagctgcttggttttatggtgtctcataggggcatccaagccaacccggagaaagttactgctatcctcaacatgaaaccgccaagcacccagaaagatgttcagaagctgactggatgcatggcggcgctcagccgattcgtttcaagactcggcgagcgggggatgcccttcttcaagctactgaagaaaacagataatttccaatggggacccgaagcacagaaggccttcgaagatttcaaacaactcctcaccaagccgccggtcttagcttcaccacacccgcaggagccgttgttgctgtatgtatcagccacctcccaggtcgtgagcacagtcttggttgtcgagcgtgaggaagaaggtcatgtccagaaagttcagcgaccaatctacttcgtcagcgaggtcctggccgactccaaaacgaggtaccctcaggttcagaagctgttatatggtattttaattactaccaggaagctgtctcattactttcaaggtcacccggtaacggtggtcacatcgtttccactcggcgatgtactgcacaaccgcgaagcaaatgggcggattgctaagtgggctttggagttgatgtccttggacatatcattcaagcctcgcacttcaatcaagtctcaagcgttagctgattttgtcgccgagtggaccgagtaccaagaggatacccccgtggagaaaatagagcactggaccatgcattttgacgggtcaaaaagactttcgggcactggagctggagtggttttaatttccccaactggagaaagattaagctatgtgctttggatacacttttcggcgtcccacaacgtcgccgagtatgaagccctccttcatgggctacggattgcaatttccctagggataaagcgtttaatagttcgaggcgattcacagctggttgttaaccaagttatgaaagagtggtcctgcattgacgacaacatgatggcatatcgacaagaggtacgcaaattggaagacaaatttgacggactcgagctcagtcacgttcttcgacacaacaatgaagccgccgacagacttgccaattttggatccaagcgtgaggcggcgccctcagatgttttcgtcgaacacctttatacaccgacagtacctcacaaagatgctactcaagttgtgggcacccatgacgtagctatggttgaagccgactggcgagagcccttcatacgatttttaacttctcaagagctccctcaagataaagatgaagccgagcggatttcaaggcggagcaaactttatgttatgcatgaatctgagttatacaagaaaagcccttcaggaatcctgcaacgctgtgtatctttagaggaagggagacaattgctgaaagacatacattctgggatatgcggaaaccatgctgctgcacgcaccattgtcggcaaagcttaccggcagggttttttctggcctactgcagtgtccgacgccgacaaaattgtgcgcacatgtgaaggttgccaatttttcgccagacaaattcatctaccagctcaagcgttgcaaacaatcccgctgtcttggccgtttgcggtttgggggctcgacatggttggcccgtttaaaaaggcagtcggcggttacacgcatctctttgtggccattgataaattttccaagtggattgaagctaaaccggttgtcacaatcacagcagataatgctcgcgatttcttcatcaacattgtgcacagattcggagtacccaatcggatcatcactgataatggcacacaattcaccggcggagttttcaaagacttttgtgaagactttggaatcaagatttgctatgcctcagtagcacacccaatgagcaatggacaggtggagagggccaacggcatgatacttcaggggattaaagctcgagtttttgaccggcttaaaccctatgccggcaaatgggtgtcacagttaccatcagtactttggtctttgcgtactacgcccagtcgggccacaggccagtcaccttttttccttgtctacggggcagaagcaatgttgccgagtgaagtcgagttcgaatctttgcgcttccgtaatttccgagaagaacgctatgaagaagaccgagtggacgacttgcaccgactggaagaggtccgcgaagcagctttgattcagtcagctcggtacttacaagggttgcgacgttatcataatcgcaatgttcgatctcgtgcctttctagtcggcgacctggttttacggaaaattcaaaccacacgagatcggcacaagttatctcctctatgggaagggccatttattatctctgaagttacccggccaggttcatatcgacttaagcgcgaagacggcactctcgtcgacaattcttggaacattgaacatcttcgtcgtttctacgcttaactttatcattgtatttccctattttgactgtcaaacatcaagttttctccttgaagttgtcagtcgggggctatcatcataataatggagtgtgattttttatcaattcagtttgcttacttggtttatcattgccttgtttggtttttctacttagtttgcgaggactgaaagtttttaatagcttctttgggttttaggctcaacaaagcttagcaaaaacttttaagaaatcaaaaacttcgcaagaatcatcaagcacagcataaatacaccagtatcgtacaaattgagcctccatgtattacattcaaactcagtcagaatcagtcctttcatcatcagagtcttcattactcggttggaggtcgttgttgcgaaattgctctacaacatcgctcgcaattttgtcagccgcattttgcgcactgctgataagatcaagggcagcttcttcacttgtcccgtctgcaaatccatcaatggtgtcgacttcaattctcgggtacaaggattttgtcatcgccaaggccatgccagctcccatacttccagctttcttgatattcttgaaatatacttccggagcaacactcagcttgtcaaatatttcggttgcgtcgaatgcactcggaccaccattattgaggaacatggcttggataattggtgcagcggcattggcgacgttatcccttgctccttcaagcctcttgatcttaccaaccaagacgtcaaattgggcttgcgattttattttgcgatctacaaaacacatttatgatgaggatttattgcattataaagagagaagctcagattgtctgctagcggtaccttcaacttcctttaaggctgagtccctttgcgcagccagttctgtcttgtctctctccagggcttcaatttgcttcgccatctgttccatcctggcggcttgcgctgtttgaaattcagatggttgaggatgcaattatgacagcataaatcaatggaacagatctggatgattaccttttgatgaaccactcagctcgaagttggagtcctggagctgtgcaattctttcccttaattccttctccgttttcttggcatactccttggcctcgtgtagctgttccctaacggattcaagagttcccaaatgtggaaccagcttttctaaggttgtagtcttggcctcattacgaagatggattctctgcacggtggttcatggattagtttgctaacaagaaaacaaagttattaaaggcagtcacccggaggacttacatttacaatacgagtggcttctccgagcgctttcttcagctggcacacttcttcatcttctttttgacggtttatgactataccggcggcttgtgagttctcgtcccaccatttgatcaagataggaggacgagagtcgtcggttgcctttatgcgagggatttcctctccgtcatcacctgatggtcctgatgcgtttccaagacattagacggatatactgaggttatttaaatcgccgttgtttgagaagacaactaacctgaagatgtacttagctgagcgtgaggtgatctttgttctttacctgaagacccagctatcgagtcgttaccagcctctggtccttgcgaagtcgtcgtctgcgcttctacttcggggatctcttgatcagggcctgcgtccgactggtttccagtcgggggctcttgagttgttgccgtttcagttgttgccgactggtttccagtcggcggcaggtcactcggattggtcctatcgcccgaagtatgggcgccagtcggctggccttcagcagtcggctggttttcagcagtcggctcggggtccttggatatattttgctctgtcatggcaggatcggggtcttttccagatggatctatatcagatggtttcctgcagagtgttgtttcaatattcagcattattttcatcggaaaacattccgaagcggaatcataccgagaggtctgatacctggaagatgttctgatctttggcattgcacggccagccagttttttcctgggcatggtacgctttgggggtttattaggcgagcccttatccccagatttatcatcgtcgccttcatcgtcatcaagtaccagcttcctcttgcgaggacctgtttgaccagtcaatttggaggtctgaggttgcggatctggtctgatcgttggccctccacctccctgagcggtgtgttggcgaggagaccggcgctgagtgactggtggatctgacttcatcaatgcatattcctgaccaagatgcctccatagttagtcaactcagcatgaagataaaattatgttctgatcacggtttgagggtttccgatgcatacctgtggaggcggattgaatgcattatatggcacaactggcagttggtgagagtagttgactacaattgcatttgagaagattttatacatcctctccttcatgattttgaaatccagggaatctggttcttcacggttgggatcatgtttgccgtcgaactcgaatgctgtgcgggatctttccttgattggcgccagtcggcattttatgaagtgccgagtgatttgctctccctgtaagccttgttctttaagatttaacatacgatccaacaactccaaggcttgtactgcttcatctccgattggaagagagttccaagtatcttggtacactggaggaagacaagagtacccgggaagagcaggctcgggattctgaacatagaaccagttcgcatgccatcctttgttcgaagtcttgaagggcatcgagaaatatttttggctcagagttcctcttagttggaatcctgcccccccgactacacaaggtttgttcttgtttggttggggcttgaggaagaagatccggcggaatagggcaaagtgaggtttgatccccaaaaaggcttcacaagcatggacgaaattggcgatatgcactatggaattcgggtttaggtgatgcaagctgattccatagaaattcaagatcccacggaaaaattttgaggtcggaagagcaaagccgccgtagaagaaatgcgagaagaccacaatctcatgagtatccggagacgggaaagcctcaccgtgcgctggtcgccacccgatgatctccttggcagggagaacgccgtgcgccaccatctccttaagattctcctccgttacgtcggatgacgcccattggccttcgaagctttctctctcttccgccattggtttcgctcaaatgtgctgatttgattcgagggatggcttgggagaggtgagggattgaggcggtggatcacgggaaggattttgatgcacttttcgaaggtggatttggccggagttgtgaaccctagttcgccggcgcaactttgcactgtagcagggagtggggaaaatggcgagagttccggcggggaagacgaagcgtcgcttggatatcggatttttcagttaagggtatcggaggtgctaatgggcctaggcctgaacagtacttcagcccaatacttttaacagcgtggcccattgtgttccttagggacttaggcatattttgctttggcaatattatgcgcacaacagtgttgcccaatgctgatgaaatcctttttatgcggtcatataattctttggaattattgcaatgcaaattaaaaaggtgcccgacagaaaggcgttatgctgtttttgcgagcttttttaggctacaaaagctgtttgggattaactaggaatgacttgtttttattatagtcatttccttggcgtcttatatgcctgtttttatggtaaatagtcatggcctaggctattcgacttatttattaccataatctttataatacttgatgggtaatctttggagtttttatattcggatgcctgtcgagtgtgttcattcgtgaaccttttagagtgtaaaccactcagatttcttttattgtggctaaaaagcagtcggctagcatgcctatttaggcgccgcgtacgcttttgtcatataatgcacgattgtgttattattttgtctttcaactatatgtttagtttgttaactaatcacatagttgggggctacacctaattaggtgcatctattcgatgcaccatattctttatcttttcgccctttacagtcttcgtcttcgctactcggcaggccttggcatgaataatttgaagcactcggattactatctttgagaaggctatgatggtcgactgcaaaggactcgggggctactgtggagattatgggtatcccatatctacacggcgatggtatttggattgggtaccggatacttaatgtagatagaatatcttatctgtatttcgggtttgtttcttaacttgtgtatcaaggaaacaccctgagatttagtcggttacgactgtattttacttgtatcttcatattccgttaagaatatagattatcttttgtaatccggactccttcccatatataaggggggtcctggcgcctctaggggcatatgttgattttctccaaatcatacaatcaataatacactcggcggattcatccccggacaggagtagggtattacttcttttataagaaggcctgaacctgtataaatcctttgtctccaaacccatacacttttctagcttgatagccacccccttttattattgccgaaatctagtttcgacactttgatatggagattagaaagcaactgatttgtaacaatagtctggaactaatgaagtgtgtagagagaagaggacaagaggatggtgcaaaagggacaaaatgaattgagtaagcctttgcccaattccaaaggtgagcgtgaataaccctagtacaaaagcgattttcgtatgcggtcaaaagcgattttcgtgtgtagatcttccaaccgtctgtaaggaagtgtccgtaaaaatcacgcggaaatcagatttttcacgtgcgggatggttatgtcgaccgcacgcaaaaataaaaaacccaaaaagaaaactaaccctaaagctgccgctgccgccctccttgcggtcgccgtctccgtcgtcgtagccggattcgccgcctccccaccgtccgagccggccggccgcccaccgccaccgccagatccgagcgaggggctgccgcctccgccggatccgagcgggggcggttgtccgccgctgcgcgcacgccgccgagccacgtggtgccgcctgctgcgcccgccgccgagccgcgcgcgggagtgagagagaggtgagagaggatagagaggtgaaagagtgagatagaatagaaagaataagtatgaggatgggtggataaggataaaattttgaagtgtcgaggagggaaagaggaggaagaatagacttgtaggcaggtctttaagagatccgtacgtgaaaataagctttcgcgtgcggtcctcttaagggtcagcacgtgaaaatgaaatgccgatttttacgtgcggacgtgaaaatggtatgtctatgatctaaatagctcattgtccagaaaaatcatttctttactggtggcagtacgcagctccaagcctccaacgtccaaatgcataggtaatcgatcgatctccttcccttaaaaaaaaataattgatcgatctcccaagtccaagcatggtcggcgtgagcttagcgctggtatacgtgaaacactgaactcctacatcgtaagctagaatgactaacacgtcggctgggttactctgcttcatctctaccacacatacgtggcatgcgaccatgctccatttttgtgtgcaacacgttttatttggctcgacgtacttctggtgtcggacggaccacgcgcgcggccgaattatctacaacggtgtcgcagggtcgtagccctgggaacggccgtccaccctctgttaccttttcagccgcacccgttccctcagctagacgcgcggcacttcgctgggacacgttcctcaccatctttttactgaggcaccgagccgggagacacattgcgagggtgagtgtcccttggccaccactcctacacctagagttcctcttccaccccttgcctcgtcgtcgtcctcacgactcgtgagagggcggcggcgctaggaccggcggtggaggtgacgccgggggttggcggcgtgccagaactgggagagagaggcggtgaagaggaggttcgtcggcgacggcgacgatgagctctgtcggcgacggctggaggaagagaggggagcgggaggagggcaactgggtgctgccctcgccggcgagccgccccgttgctgcccgaggccagatctagcaagcccagactggatccggccaccccgccgccactcctctcgcgtggtcgctgcttgccgccactgctcgatgtcgggggaaagggaggcaccgctgccactccgctgcactgctcgatgccaccgccgtcattcgtcgcgccgctcaacgccgcgcgccgtccgccgccgcgacctgcgaccaccctgtgcgccactcgctgtgtggagggagagagagaggcaacgacgagtggaaggagagttgcggagtcggtggcgggcgcgacggaggcggcgacaggtagagggagaggggcggagtcgccagagagggagaggggcagagttggcagagagagagaggggcgagcggcgatctggatgacgtggctggggtggatgattttctcgagggcatcggtgggctggtgggaggggtatggaagtaatttgtcatctatggtctttttggctgtgacacctgtcttggaccctagattttaaagagtctatccaaagacactctccattggaagataattatcgtagagagtgctctcaggtagtgagggtatttaaaaatggcttatattatagatgcccttaatattcccaacaaacatacaaacgttactacgtacgtacactgctttcatactctcaacggtcacacgtcacgacctgagaaaggatcgatctggcagtaaaagtacgaaaccgacggatgaaattgtcaacgcgaaggctagcactgtcaatgcacagtcgcacacaacaacaacatatcgacactgggtgtgtttaggctgtcaatgcacagtcgcacacaacaacaacatatcgacactgggtgtgtttaggctgtgtttagttcacaccaaaattaaaagtttagttgaaattggaataatgtgatggaaaagtttaaagtttgtgtgtgtaggaaagttttgatgtgatggaaaagttggaagtttgaagaactattttggaactaaacacggcattagttccacgctaaaattgaaagtttgaagaaaaaaattgaaagtttagggctgtgtttagtttctgaaattgaggagaagtttggggaaagttggtagtttggaaaaaaagttgagagcttatgtgagtaggaaagttttggatgtgatgtgatttaatggaaagttgggagtttgggggaagtttagtgtgaacttatgtatgtagaaaagttttgatgtgatggaaaagttaaaagtttgaagaaaaaagttagtaactagacacggtgactgttcgaagccacataaacatagtagtactagtacgtactctctctgtctcaaaatataagtattttttagacttcgacacagtcttcgaaatgttagtttgaccaacaatatctttaaaaataaaatattttaaataaaaatgattatatagtatgatatttttttaatgataaatctagtaacatcaattttacattattgatctcttttacttttttaaagttaaaaatatttgactttatactatgctaaaaatgtttatattttaaaacagagggagtaccaaacttattgaggaaaaaaatgtttcccaaattaaagcctcggtatatatcgattctgcccccgtctttacatacacgcatgcttgttacgacaacaaattggcaacagcctattttgacgctaaaacagcctcactggcaactagcaaccatggccgttaataggagcaggccggaatgactccggtaataggttataggtaggcaggtggagtagtggtgttttgtactccctgggtaaaaaaaaaaaaataaatgatgtgatatattctagtacaataaatctgaacaaatatatttagattcgttgtaatataatatatcatatctagtatagattggttttttatatgatggagtacacgggttgtcactaaaggaataaaaacagcggccgtggggctgtcgcacagtcgcaggagagactgtactagtgctcgcgagcagattgagcggggagggaggccgcagaggtgggcaccgtgtaggcggcggcggcggagtaacggctgggcttatgtcagaaaagcccagcccagccaggaagcaaatttgcaaaaggaataagtctattttgtcttcctcatctgttgctcttggttgaacttgaattctatctcaaaaccacaaaaccgggtataacacctccactaattttaaaaaccggtccaaattgactccttaagtggtttcgaaagcggttttggtgacatagcaagttgacttggtctaagtgtgttgacgtggcagcccattatcgaaagagttaaatatagaagtgggtagccccatatttcagcgacacgcatgtctgatgtttctcctcccttctctttatttcccctgcattttctgactccaatggcgatggtgagctcttccatcaatttgcccctatcccatgtctccaaaaacgacaattcgctggagtgaagcttgcccagcggaaagcaatacacggaaggaggaggacttgccccatactacgcttccatccgggagctcatgaccaatctgataagaacaccaaaaaaaagtcatgaacatcacatgaatatggcaaattaggatagttgctgagaagtgagaagcttaatgcatgttctgttagtgttcttactccctattcggccagaagaagagtggtcgagccaaaagacaccgccggggcgaagcatcaggtagacgccgtaatggtggggctctgcgccgccgcctgcttcggtttgtacccgtcgaaaaactgcgtggtgtagtcgttaccgtcgaaatcgctgaggacgaacgacgacttggacaggtatgacttgcacgggaaggaaatataatggttagtgaggtggtcggagttaatggaggctcggcgccggcagcgaggtgggaagtggtggtagagttacatgagacacagatggagggcatgagctgctggaactactggatgcgggtgttgaggggcccgttgttcccgatcttgtcgccgatgccgagggactagaaaatccatggtggtgacgccgatgatcgccatggtcgcgcctcgccagaagtcgaagccgcccctgggcagaagcggcagcctaaacttctccgcaaggtcgtcctcggcgccgagagaagagaggagagagagaggcgaggaagaagaagagatgagatagaggtcgctgacacgtaggtcccatttgctgactcagcgagtcaagtcaactgtggtcaacctatcacatcagcaaaaattgcttcccaaaccgctaaaggaggtgatttgcactggtttttaatgatggaggaggtgttgtatctggttttatggttgagggaggcgattcaaccatgggcaagagatgaggaaggcaaaatggacttattcctttgcgaaacacaactaagacccaagagtaaatctagaaaggaataagtctactttgactccctcaattacagcacccatcttatttgtatcctcaattgaaataccatatatcttgacctcttactatgaaaagtggtgaagattgacttcctgagtgattttgagggtgcttttttcgctgactcaacatgtgagacccacttcagcgtcgacttctgtcttttctttcctccctctccctgtccctacaaaatcacacggcgactttaggcgaagcggtggcggcgtggcctcgaggtggagcgcggccaaatactaagggcctgtttggcacagctccagctccagctccacccctcctggagctggagctcagccaaacagtttcagctccaccaaaactgggagtggagttgggtggagctctctcacaaaatgtactagagttgtggagctgggtttaggcagctccacaactccactccagactcaactcctggagttatatataggagttggagctgtaccaaacaggccctaagcggtgtagcttaggagatcaaaatcatcacccacttcaccaggtcggcgacaccggcaccaaattgaacggagagcagagggagccataacccaggcctgcgtcgtcgaccgtgccgtgcaacagccctgcgacgatgacaacaaggcccgcgccgacctccgcaagcagtgccactgccaccgtctccatgcagtacgtgctgcatgtaagggtcaccactcgcgtgcaatctgaagaaaccaaatgccaaagacaagcagctcggtcgcttcaacatctcaaaagctaacgcatagacaaaacgaaggaagcaagaggatgggacaaagtcgaacatatctgcccgtggtgagccgccttggtggcattgaaggccctcctcacgaactcgtcgatatagtgttggaatataaagtgaattgttcatcttttcctatcagattaagctcttgggttgaattggttagcgcatgcaacttaatatggtatcagagctagaaaactcgagttcgaatcctggttggtacgcaattaaacaaaaattacagctcacttctattccacactaaggcttaagggaggctcgtgtaagggagagtgttagaatataaagtgaattgtccgtctttccccatcagcttgagctttttatttgaactatttagtgcatgcaactcgatacatcgcgcatttgatcgcataggatatcatcggcgccgacgccatcgcctacccgctggagaggaaggggtgatgatggaaagaagaggatgacatatgggcccacacgccaactcactcggttagactaggtcaatgatccacgtcagtgaaaaaccaccaccaaaaccactaagggagctattttacaggttttaaaagttggataacctatttggtattttggttcaaggaaataaatcagattgcatctgtattgagggacttaatgtggacttattccattcggaaatcatgtaaagaggtcatcattaggggaagcccatatgtaaaagttatgctgggctgttactcagacacgtaacccaagaattcagacttgcaatttcaataatttattcatgtcaaaattgcttttcggtgaaaaatgcttttatggatagagatattctccaaaatacaaattgatcccattgtcatataataaaaaaatgaaaaaaatataagtactttaaaattagagtgaaaatacactattgataactgatactccctccatcccaaaatataagaatatagtaccggataggacattttctagtactatgaatctggacagtctgtttgtctggattcatagtactataaaatatcacatctagttttagattcttatattgtgggacagagggagtaccaaaacttgcaacttggtgtaatttattcaattcgttttgcaaattacttaaacgagtcacctgtttaatttgtcgtctttttattacttctctagaaacactgaagtttgctatgcccatcagaactttcagacttgcaatctcaataatttcaggtaacaattgctaccgtcataaatatgttactctctccattttatatttttctaaatttagcaacatttaaaatataaaattagtttcattaaacttagcattgaatatattttaacaacatgtttgttttgtgttggaaaagctactatatttttctataagtttgattaaatttaagtaagtttaactagagaaaaaaataaaaacaacttataatatgaaatagagaaagaatatattttattaagaaaaaaccacacaatattcatgtatccaatctaatcttcttctctcttttttttgaaaaaaaatataattgatgaatgtaatctcgaaaatttgacctgatgtatgcctaaagatatttttacgatcactggtacatatatacccaaatttatttatctttttgttcgaatttcgtgtcgatgtgtttcgcctttatacatgcattaatttgaaagggactacagtaaatcattttcagaaaaaaaataacgattgcccaataattgtgtttctactgaaaaaaaaatagtacggccttctcttattcattatacatgactctactgaaaaaaaaattaaaaagcgcagttcatcccaaaattgctatctgtatatcctccgttcatatttctctggatcctgatgaaagagagttctgaatatccggttcttagaaaattctaaaaaaaagggcatataatcagctccaactgatcaaccacgccatggtgtttcaattgcttctggatgacacatctttccataattccatcgatcatattcgcgcgtgttcttactcctctgcttttcgcttcgccttgctagaactagaagggaacgctagctatctagaacaactagaactagatcggtcaaaaaaaaaaaaagagataaacccaaccaagagagatcgactagaaggtctaataacccgtttactttagaacgaagcagtgcgagcaccgatcagcaagaaaaacccccatgagccattgtttactcagttgacactggctagctggcgtccaccagctgaactagaagccgcagtgctacggaatgtgaagcaacttcctcctgccggctgccgctgcagtgcgcttcttgatccgcaaggcgctcggtctaggtcttcgtctacgtctagaaggaaaactacttgcgtgacatgaaacacatccccggaatatactattactccattgacaaaataagaacgggtaatataattaaaagattgtggtgtagtcttcagagaaggaaaagaaaattaaagattgtgatgtgtttcccgtatttctactggtaggagtacgacccatggaaggttctgtctagtatggcgaggtgggaccctcgccgttttgtcaaagctcgcctactactttatccactcagttgagccagctgctcctatagaatatttcagtttgtcggatttgccggagttttgttggctaaacaggtcaattcgaaaaattctagcgtcagtcctggcgcaacaacgatccatgctcctcgtctttggctgtttggcacggactggtaggtagaatggtagatggatgcaacttgcacagatcaaatgggaggcaaaacaccaagtgcatcaattctaatcaattactccatattttaatgtatgacgtcattgattttttaatcaatgtttgattattcgtcttatttaaaatttttatgtaaatattaaaaaatatatgtcatgtttaaaaaacatttgataataaatcaagtcatgataaaataaatgatagtaacataaatcttttaaataagatgaatggtaaaatattcataaaaagtcaatggcgtcatatgttaaaatacaaagggagtatatatcaaccagtagctagtttggccgcacgcggtaggttagtttctccccccataaaacattactaccacttctagttcactaattgctgtatctaatcacgtgggcaggggaatttgtctcgattttagtctcattttttaaaaccaaattcgttttcttagtttcaactactagtaacatgtctatccttgctaggtctccactgaccaattgggtgtactcgcccatccgcaaaaacacacaaccaccaacgcttctggattgctgccctttttttcttcctgagacgatcgtgacattattgcctggtcgggtctagaattccaacttcctagttattactagtcgggtagtcaaatgcattgcatctgagacgaactggcgcaagacattccatgcacgctcgcacgcgtgacaggtttatgatacggcctaactgcttaccggagcatcagtcacctgataaacggaatcggcgagaaaagcatggaattatccaccacctccgccgccgcgacagaccggcgccggaggggtgagtggtgggtgcgagtggggtggtgtaaccgtgcaagcgactatccggcggcgatatgatggcctaatccccctactaaacccatgtggactgatggcgatcgattgatctgtgacaagagatacatgccgaatccattaatcaggtttgtgtgatcggtttggactggtgcctcagaatcgcttggtttggttggacaaacagaagcgacaacggggtactttttgtgcaatttggtgctgcgcttcctttctgaattgatgctatagtgggtgacgaatttctattgtacagtattgtttgaacaagttatgcgtgtaaaacggtttggagaggaaggggaggtcacatgtctcgattatctatattactctagaagattaaattggtagtgaaaattaatgagtagcggatctgttaattactactcaataattaacatggggatcacgaagttggtgaatgttgtgctaccacctattcctaccatgagttgacattttttttaattgcacacaagatataagagcaaaaggaccaccaccacacaagcacgtcacactcacacatctgctaacacatgctcaaaagacgaaaaacaacggcatatccttgatcacactaaattcttataaaaaaacgtactcacttgtgtataatgtttatgaacatcaagatttaaactttaatagatggagtcaatgtacccataatcccatcttccggtgcttcccctatgagttgacatttaggatccactaaataatgcaccatccatttccaaagctgtggaggatgggtggaatcatattcaacctgctccttaaacacatgggtatttagttagtaggattgtaggaacataagaaaacaataatcagcattgtgttagagttattgattggctatagatgaagttaaagaaatttatgcttatattaaatttgttgttccaaacttgtaatagtgtttcggagagtcccttgttgatatggacaaattgtagagagaatagttgactctgtttttatatgtgccctcatatattcaatgttattgctaaaagaaactttccacccacatattgaccacatttgttttaactagagaagggatttacattttatatatataactagttgactatgcttttatatatgcccttgtatattcaatgttattgttaataaaaatctttccacccacatattataaaaatagatcgtgagccaattattcaatatatagctcacaaaaataagctaggttgtccaatctatatagaataagtgataatttttaagatttttatttaagtacatcttttaaaaattgaaaatagtttcattcttaattaaacctcaatgccatgtcactcaaaaactgctttgaatttggtcaaacattgaaattgaatggcgtaatgcttaggggcctagggctgaatactgtccggtctttcaagtttatggatgaatttaacttaggactttcattgaagtttagagatgtcaaatattgttttttttccttttcattactagaattgtagtcctgggacaaagttttttacacatttctgatatctacaaaccattttgttttcataacagcattgagattttgtatgttgtctccccgcaaaaaaaaaaaaaaaagaagagattttgtatgttgtcgtctcagcggagtgtcaatcctcttacacacaccattaagagtaacacccagagtatcatctaaaaccacaactccaagaagaaaagaacaacagacataccacaacgaacagaacataccatagttgtgaacacctcctacaaggagcgttcttttcccggccttttaaaaaataaaaagggacaccacaacagaacagaagtccttgacattctttgttattccaaccttctggttatcaattttttttctttgaaatgaacagcacaagatagttcgagtttcacgtattaatacagcaggagaaaaatataaatatgtaattctagaagaccatagacagggaaaaaaagagaaaagaacaaccacaccgcgcgtctataacacccgctacgagagcgaaactggagatcttcgagacgacacctccaagagacgacacctccaagaagagaatgacaacacaagatttttacctgaagaaagtaattgggagcaacaagaaaatgcaacaacaccccaagagaaaagcagcatcggcaggcgtcgtcgcccaaattttcgtccttcccaagaactaaagtcctgcacactccgcagccaccaccatcgaaaaccttcaacgcatggctaccgcatgggcgccacgacgccagccgatcgttaagggggagctcgactctcgacacgctccagctccatccgcgcagttgggttggatggggagagggtgagagagaagaaaggatcccctctcccccacactagcctgcccgacgcggccatcttttgtcagcaaaggcgacgtcgcaagaggacaaaagcctagattggggcccatgaaggaccgcggctcccccttaacagaacaagcgccgactccgccatgatcctgttgtccgcgtcacctcgggccactagaccgtttcgctggcgccttgccaccctccgtcacagtgctcccgccatccaaaacgtcgcggcactagaacatccaccgaagcacgatgctcttacccctgatccggtggaggggatagggtcttgtccggggagaggccgaacacccaacacgcgccaaaattaccatgtccagcgccagcatatatttgataatcctggtatccatgatagtttatagttaaaaaaacaataaaaaattactcaaaaatatttttttaatttatctgaacttggtgggattactaggcatttatcattatctcaccccagtaagccagagtgctgtgcggaaccagcgttaaagaaaagcacgctgattacacacctgatctagccatatcttgatccataacattcattcatattttttttcctttggtctatgtaaaacacagagcgagagagagagagagtgtgtgtggattatatcaatgtaagacatattaaccacttagattatgaaataaggactgttaaacaaagggattatactgactagtttagagtgtgaaacatatgtgtgtgtgtgtgtggtactactatctttgagttaattaattttaaggatctgctctgattggaggattgggacaatagtcaatatttaagatatggtagcatgttaccaaattaatcaagctggtgcatagtcaatgaataagatttaacatgaaagcgatactaatagctgggaggtgtacttcaggaatagccctccggaatcttgctatttaagagtattaaacgtagattattgacaaaactcaggccataacccctaggctatttt

SEQ ID NO: 5647 - DNA, 10828 bp, Oryza sativa
tctaccaaattttataattggcataagggagaaattaaattatcactttgcacgggttgcttactgtagtaacttcttttagatgcatgcatataggactggtttggtttgagatctaaattaggcttaccaatatttatcaatttcaatagtatttagtgtctatttggtttgaagccaaattttggcatgcctaaaaaataggccatttcaatagtgaacttaggctattttggcttcaatccaaacacaactttgctttaccaaaattagtcatgctaaaacttgccaaaatttagtattgacaaaatttagtaagatgtatttaggccacaaaccaaaccaacccatagttacctgaacaatggcgacgtgcaggagcgtcccgcggagtccgatggcgattgacgcggcggccatgacggcagggcccgcgaggaagcggacggccatggagacgacggcggctgatttgccacacgcgatgatgctgggctgcagcgccatgaacaatcctggccacgagacagtttgacagcgttagctcgagcgcgggccagtgggcaccagtgcgtgtgaagagggattaattgcggagcaatgcggtgtagggctacgggaagacatgagcacaaggggcgtgggcacccacccaggctaaacatggccatccccaggcctgcgtccgagagaatggagatggacttctcgacgattgctggcatggagacgtgccacctgtgacccatgaacacattgcccgttggttagctcccggaacagtaaatatcaacatcattagccactagagatgataaaataacaacaggtgtgctcttatgatgattagtagtagtagtagatgcaggttactccaaaggaaacggggccaatcgttcatggttccttgcttggaaacgctattgtgtgactgtgtttggtagactggctcgacgacgaccagtgctcgcgcgccgtgcaaattctgcctttttcagctcctacagttcgcgattggtgccgaccgggcccgcggcggtggtccgtgccggcgggaaactcactcacctcgtcggcccaccaccgccgtttggggatccgtaaaaaagctgcttttcggttattcccaccgccacggcacgtacgcccccgggcagtttcggtgcttcctagcctaccgcctacgcgctacccactccctctggcttcgccgagaataatatcgctctcgcgcttatcatcaccaacaccatcgcggtcctcgatcctcgccgaacttgtcgtctctgtcgagtgaaatcaccttatcacccgaactaacttaggcagtagaaaaaatgagtaattgcacaggtcacgtgaaaaaggtaggttaatcttcggagagagggaaaaagaaaaaacggcgtaccggaaggcgacgagggaccaggcgaggccgaggaggctggagtaagtgttggggttgcggatgagcttgcgccacaccattatgaggatgaggcgtgtcatcacgctcgccggcggcatttggtactgccccgcgcccgcggcgccgccgccggcgttcggtccgtcgacgtcgacgaccttcgggtgcagctccgccgtcgagctcgaccccatcttcgtcagcccgtcaggcaaggccgcctcctcgtctactgcctcggcgccgtccaccgtcttgccgcctccgaagctgaagttctctccgccgccgccgccacccaatgccactgcgccgtactcctcgtgctctgaaaatgtagaaaatttgggaaggtctatgtttagagttgcacatggagcccgtgattaagtgacagtactactactgcggcattaatgtcgggacggacctttgcctgagccgttgttctgcggcaggtcggcggggatgaccatgtggatttccttggcgccgacgtcgagagcgccgccgccgccgccgccactgaacacaggcaggccgctgacttctgagacgggagacgcgctcgagctccacacgaacatgtggagctccttggcatcgtggttgagtgcccccgtggtcgttgccggtggtttcggcggccgtgccgagtgctcgtcgaagttggactgcctcggggttgggccccgcgacgattgcagcgagtagagctcggaggcgccgaagctcgagccgcgcaccgcagcgggcgtcgggggcggtggcccgccgccgaccatggcgaagaagtcggcgtggttgaagttggagccccgcggggttgggttccgcgacgagctaagcgagtagatctccgctcccgtcaggttcgacggccgcggcgtgaccagcagcgaccgccgcgacaccgaggaccggcgcacggtgacgtgcagccgcccgtccgccgccacctcggcctccgtctccgcgtggccgccctccagcgacaccacgtccgggtcgacgtgcagggacacgatggacgccgccgtgtccgggaactggtcggcgatcagcatccgcgcggcgcggaactcgaagaggaagagcatcagcgtgtaccagatgatgcactggagcacgacgatctggaccatgagcgagccggagtatggcccgtacatggcgatcagcagcgggatccccatgacgagcgtgttgggcagcgtggagagggagaagagcgtgatggaccagtccagccgcggcgcgccggtccgcgaggggaggcgcgaccacgcggcgagccccgccaggacgagcagcttctgcagcgtgtccgccgccaggaagcggaggttcatggcgtacgggtcgttggtggagatgaagtggaaggacaggagcggcacggcgaagatggcgacgaagcggttgatgccggagcactggtccggcgtgaagatgccccaccaccgcaccgacccgtacgccaggaacatcgccacgtacagcggcaccaccgccgccatcaccgtgtagaagtcgtgcccggatatcatctcctcagcctatctcaatccaacgcgcccggcggtggatcgagtgcctgagcgagctagaactagctagttatacatgcaggagcggccgagtggagtggcttcttgctaactcggagaactcggggtcagccacttataggctgcgtccaagtccaacgagcacagagttgaggagcggtctacattctcccgtcatccaggctccagggtggattttactgtaaaaacatgagagattttgaatgcgcgatcgtgactgacccaccagtgggcgtgtgcttcataagaaacgatcaatgtttcgctcggaggtgcaaattaagcccgtagttcatgcgcgcacatgtacaagctagcgttgtgatacacaatgcaatgggtaccgggggtatatagattgcatcttggcgatggatttgcatcactggatgcgaatagagtcatagaggcattgctgctctgaagatagatttgcattgctccgtgaaaccgatcgattgatcttatcggttatgtacgtggtgggctttttccgtgactatgcaagctgatgatcgagcgcgcgtacgggatactgcagaagttgtactgttggtttggtaccactgtctgcacttatccggctctcacggtgccccgaccgtccatgaatgtttggactcgagaacactagctactccagctagcagctactccctccgtactatattttgggacggatgtagtacaacaatacgtgtgaaagactagtgttccaatatgcaaataacagtagctcggtattgttgaagtactatagcaacaaatcaacaaagattggattagttaaactattgaaattgcgcattttagtgtcttcttggtttatacatgaacaagtgctatacaaccgaatggcgaatggtaaactcgtgcaagatcgaggggatgttccctcatataaatttttctttcaatttcgatataaatagttatgaaagattttttaaaaaattgacaatataaagtataatgatatctatcagtccaaaaaaaaacaagtttaaattcgacttacacattgagaaaaaaagtgacaaattcatatatgaacattatattatgctactattcatatgttggatttgtctcccttttttatatctcgatgtgtgagttgagtttagataaaaaaatttatggagttgtatagatatgttgtatgagtgttatcatatttttttaaaaagaaattcataaccgtttggatggtttttaattaaacgaacaaggcaatatcctcttgaggcatcaaaatagtctcccgcaagattacagaggtttgtctatggatcgccttcttgagagggccaacgaggtacattcttttgtgttgaatggctgaacggttaaatagctgaatgatttgcgaattactttagggcacaaatggatatatttagtatcataaagctgcatactggatttaaaactttttttatgaaatatatgtatgaattttttttacaaaaattgtaatgtttaagagcatgatcgagaagcgtggagtgtggacatccatccctcattctattccttaaaaaaataacaaggcaggctggttgctagcttgcatgaaagagaatgtggccgattgacttggggaagaactctattttaatgtattgcaaaagattgcgcttggctagtgatgattgcttaatcatatgctaagatgtacttatctccgttttcgtgggacaaaattttaaaatcttaataattcattaatatacaaaactttttatattaaaaaatatcaatagaattgtcatgaaatatattttcacattgatatagttttatttcgaataaacacctaattaacaaaaaaaatgtattaaaaactatttgatgtccaaaataccaaggaaaaaggaatatagggacaagggagagagtatgtacgtggtacattgtcacacccagattatgcactgccgtacaacaacacatgacaagggcgtgctgtaggaaaacggcgtaaaccgctccctacgagaccaagataccaataccaatcacatgacacaacattggtactcacagaaacacttatgaatcattgtgatccttaatttaagtggaaggaagcagcaacgacagctgcggacccaaggactaactcccaacaccacatgcaagcaacggttgtgaaccaagatgaaacctaattttcatttcacttcaactttacctttagagcagagagaactatatatgcatagagcaagggtgggtatttacgtacttaacaagcctgggaaacttaggtgttttatgcaaacttttaagggatgctggctattttgcaattgggtttgttttaagggttaattgggcccataccactacaaatatgacactttagataaatgtcactattattcacgatatcggctatgtgccactgcaatttggggaaattgtaaacggtggcactccgtcatgttttccgtcctcaatgtgggatccacatatcagttccatgttcctccatccgcctcttcttttttccgcacgtccggttgaggctaacgaagatttttgacggaaaacgcgacagagtggcacggttcaatttccccaaattccagtggcacgtagccgatatcatgaatagtagtggtatttatctaaaatggcatatttgtagtggcatggatacaattaacccttgttttaaagctttgaataatataagtgtttgcttttccacaacagagaaagacaaagtctactgactttccaagtttgcacaagtagcagagttggcctcaaagcgagtttcctgagccattccatttcagtactcctagagtcccatagttcaagacatccatttactttcatggacttcctaagtcccctgtctccctgatagccatttatttccagcccaagcatcacgtttcccaaaccacaacaatgtttcacaaagcacaatataaacaaaaactatgctaaggaatcacttcacatccgcccatgacccttctacacagtcgtttgaacaactagttaactctatagaggggtacactttacccccaagctgacgctactaactgggtcacacaacctgtgcagaacatccacatatgatgactttgaggctttcatgataaggcattttgaaagatgacacaaggttacctcatgccaactaaaggggtccttggactaacaacaggctagatcctagaccatgctagcaaggaatcccaagggttctcctcgacaccacctcgacgatgcagtccattggtattcaaggcttccctggcctagctagttccttagccgggagtgttccacttaacccatgtggtcgtacttacatgttcggatgtagtttaaaggatagtccttacgagcaaccaccaatgcatctcgcccaataatgaccctgtgtcgcgagttttctcataaactcatattctttcgcaggcactaacccacgtgtcagatttttcaaagctttttagaaacaagtttcacccaagttgttctcagatttaaagattgagggctaccgtcaatattcttacaaggttgcacaaataccaacatacaacaaaggtggttacaagggaacatgatatagctattatgaaggaaagataaaatgcaacagggttaggtaggcatatcattccatcttgtagacgaggcgaaacatttgcaagtgcacgccaattgacgcataatcaatttacaaacaacaaacttaagttcaaatatgggcacaatgtaacgccccgatttttgttcggaattaaaaatcatttaataatgcatttcctagaaattaaataaaaagttaagcaatttatccaagtgaattattgggagaattaaaattttccctttaaaaatcattggccgggaatattttgtagtattctttgtgccctaaaatactctctgaaatttcccgcgaatttttggagctcatgaaataattttaaaagcaccaagttcattttaaccaactaaataaaaagaaaaacaattaaaatctccctttctctctttgggccattttcggcccaagtcttccttccctcccgcggcccgcgcgcctcctccctctctcgggccggctcccttctcccttggcccgcttgcaaaagtctgttttgcgtccctccttctctcccttcgccgacaggtgggaccggcggtcccacctgtcagctcctcctcctacctctcgccggccaaccccaaccgccattgccgcccacgtcgccgcaaaatccggcgccctctcgcacccgagctcgcatccaatgacgtgggcacgatcccctgcacgtcctccaccattttcctcgctcgtcccacaaaaaccggcgccggccgagccgccatcaccccgcgtcggcgccccacttccccggcggttgccgccccgactccgcctctcccgtgctcgatccggcctcccctcccctatagaaacattccccgcatctccctctccattttccccttgtttcccgagcccggcactctctccctcgctctccccacgccgctcccgcgcgccgccacacttcggcgaactccggccgccgtttcccgtcgctagggtcgccgccgcactgctccgccgccaccgccagctttgccaccgcccgggcaagctcagccaccgctccatttcccctctccacctccgtagcgccgtagccacgtgaaccacctctcttcgccgccgccgccgactccagccgcgtcgcgccgccgcttcggtcgacgccgacccgcgccgttgcctccctcagctccgcaaggacgaggaggacctcggccgccgcccctcttcgccggaaatccgccggagctcctccttcctcggttgtcggtgagatccttctcatattgtcgcggtcggccgtcgttaccggtcaccccgcatcggtcctcccctccccaactccctcttctccttctgaaggtcaagggcgaccccgtccgccctccgtcctcgcaagccgccatcgggcaatcgtcgtcgctgtcatcttcctccgcgccggctgccgcttccggtgaggacctctcctcccttccttttttttcccgtccccctttcttgccgacctccgcctcttggggtgcgtcgcggtcgccgtgcgcgctgctgtcctccggccgcccgccgccgttccacgtcgccggctgctgccgccggtggccgcatgccgccgccacgccttggctcggccgggccggcttcgtgccgcgcctgtgcccctggctgccgctcccctcggccgcccgatcggctcaggccgatctaggccgtccacgtggtggacgcgcacccgaggccacgtgtggaccatgtccaccgtgcgccctccccctttgactcgctgacgtgtggggcccgcgtgtcggcgccggccgccccttgctgacgtcagcgaggtccttttcctttgtaaaaataaataataattgcgcaataattcgttaataattctagaaattcatataaatggctcaaaacttctaaaattcatatctaattcattcgaactccgaattgagccattcaacttgcaaaattcatctaaaattgagctctacatgtttgtttagtttttatgtactgttttcttggtttttattagagttttttctcgttttgcgtgccagcgtgtagaatccgtcgtttcggaagttcgcggtcgcaaggataagagttcggaagattgtttgaagaagcaaggcaagtcacacattccccttgagcatgttgttcccaatttataaatgttttaccgtttgcaaataaatatgcatgttttgctaattacatgggatcagggtttacctatctgctcgcttgtgccatgtttacttgatatctgtcctttgtcaaccgtgggtaataaatcgcctagcttgtgttactttgatgacctagctagaactatatgcttagccatgcttaattaccactagctcagtcaatgggataattgcagtattagacattctagtatcttgttgagccgcgtgctcgagacatctggccatgttttatggtcgtaattatccaactaaaatgcgactgaatggtgggctgtgggtgcatggttttgtgagtcgcacccatggcaattaaggaccggttcacgggaaaccctggaagacttacagcgcttgccacaagcgggagtgggtaactgcttgatctgaagtatagctcgaccctttcctaggcaccggtggcgagggtgggcgtgatggagttgggttggccggggtgtccggttgtccagctgccggattcaccgcggcgcaagaggggaccgcccactgccttttgaggggtgggggtgaaaccttagcgtggtgtggatggttaggggaaggttatgcgaagggtctcgtcacaatcactcgacatggtgacgtgtgcatcatgggcacatgatgacgcggtgacatgtcggtgggttgtgtcttgtgggtacagttgtgcacctctggccagagtaaaactattcgaatagccgtgcccgcggttatgggcgattgaccagattcaccgtgattagtctcacacttaataaatcgacccaatacactgtagttcaggtgggttggttgggcctgttcaacgtggtgtagcgttgatcagtggagatttaatgttactttaattactcaacagttttactgttttgctcaataaaatgttttacaactgcctttatgcaaatagccagaaacccctccttgtatccccttgcatgtctgcatcgttggtgtggcttgctgagtacggtggttgtactcagccttgctattattcccccttttcagaagtgtagtgcttctgagctgaagatggagttagaggaccaaggctcagaccccagttgagttttgcctgtggagtggagctgaagccccgctaggatcgcctttttccgctgctgctgcttttgtttcggtgcgaggactaagtgcctcttctgtaagtattttacgctttatttacgtttggaactgtttattacttgtcgttttgtgtaccctggctggtcctggacagggatttaatacacaaaatagtctggaaatttgggctaaatttctgggcgtgacacacaatatgttcaaaggtgatttgcgttgctaaggggcttcacaaatcttctcgaaaccactttcgaacgatttttcgacggcccaaattatacgcaaacagttgaaacctacacaaagatcaagaaaaagacatacttaggactagtaatagtgacattttgatatgtcacaattttagagaactacgggaggtggaaggagtcgaccagagctagagatatggattttgaaagtttaattcattttctagaacattggaaataatttattggattttcataaaggaatattcttaggaatattctagacagttcacttacaagtggggcccacgtaactagtgagagggatgcctagaagcatatccacgagcttcattttttaagaaaaataaattaaatccagcctttagctcgtgttcttccatgaaaaaatattacaaaagatcagcattaacattacacatcatgatggtgtaaaagttaacattgtttagatggaaaaatatttaaagcattttttttctaaatctccatccgtagttagcaatatttgcataattgtagtatcacgactgcaatatgccatgcacaatatttctttgttctatcactcttttgcatgtatatggctagaaacagagccaatatgtctcctaaataggacc

SEQ ID NO: 5648 - DNA, 27347 bp, Oryza sativa
catgacacgactgcttcagaaagatgtgaagtacaagtggtcgaaagaatgtgaacagagttttcaagagttgaaaagtcgcttaatatcagctcctattttgattttgcctgatccaaagaagggtttccaggtgtattgcgatgcatccaaacttgggttagggttgtgttctgatgcaagatgggaaggtggttgcctatgcctctcgacagttacgtccgcatgagaagaactaccctactcatgatattgagttagctgcagtcgttcatgcattgaagatttggcgtcattatcttttcggtactcgtacagaagtgtacaccgatcacaagagtttaaagtatatctttactcagccggatctgaacatgagacaacggagatggttggaattaattaaggattatgacatgggaattcattatcatccgggaaaggctaatgttgtagcagacgctcttagcagaaaaggctattgcaatgttacagaaggacgacagttgccattggaattatgcaaggaatttgaaagattaaatttgggaattgtcggtagaggtttcgttgcagccttagaagcgaagcccactctaattgatcaggttagagaagcccaaattaatgatcctgatattcaagagatcaagaagaatatgagaagaggaaaagctattggtttcttggaggatgagcacggaactgtatggttgggtgagagaatctgtgtccccgacaacaaagatttaaaggatgcaattctgaaagaagctcatgatactttatactccattcaccctggtagtactaagatgtaccaggatcttaaggaaagattttggtgggcaagtatgaagcgtgaaatcgcagaatacgtagcagtatgtgatgtttgtcagcgagtcaaggcagaacatcagaaacccgccgggttgttgcagcctttgaagattcctgaatggaaatgggaagaaattggtatggattttattactggtttacccagaacgtcatcaggccatgactctatttgggtgatagtcgatagacttaccaaagtggctcattttattccggtaaagacaacttattccggaagtcgcttagcggaattgtatatggcaaggattgtgtgtttgcatggcgtccctaagaaaatagtgtctgatcgaggcagtcagtttacttcaaatttttggaagaaacttcaagaagagatgggttctaagctgaactttagtactgcttatcatccgcagacagacggacaaactgaaagggtgaatcaaattttggaagacatgttgagagcttgtgctctagatttcggtggaagttgggataagaatctaccttatgcagaattttcatacaacaacagttatcaagctagtctacagatggctccttacgaagcactgtatggtcggaagtgccgcactccgcttttgtgggatcaaacgggagaacgtcaggttttcggaacggatatcctaagggaagcagaagaaaaggtaaagatcattcaagaaagattgcgtgtggctcagtctcgtcataagagttatgccgacaatcgccgcagagatttgagttttgaagagggagattatgtgtatcttcgtgtcacgcctcttcgaggagttcatcgttttcataccaaaggagaaaattggcaccgcgttttgtgggaccttataagattgtcagtagaagaggagaggttgcttatcagttagagttacctcaatctttggcaggagtccataatgtgttccatgtgtcgcaattgaaaaagtgtttaagggtacctaccgaagaagctaatattgagcagatagaagtccaagaggatttgacttatgttgagaaaccaatccgtatcctggaaacaagtgagagaagaaccaggaatcgagttatccgcttttgcaaagtccagtggagtaatcactcggaagaagaatcaacttgggaacgagaagatgaattgaagtcagctcatccgtatctgtttgtcagttcttccgaatctcgaggacgagattctgtttaaggggggtaggtttgtcacatcctgaaaattcaaaatatataaattgttgtttaaatggaatttctagaatttattttaaaagtcttgaaaagaaaatctaagtttaattaataaattccaatataaaaagtggccagataaaatttcattaaatactttgcttaattctataattcctagatttttctgggatttatttgagctaaggaagtatttttaataaatggaattgcatttaagaaataatttaaattgaaaaagttttaaaaagtcttcttttggctttgggccgaaagtcggcccaaaaccgccttctctctcttctcggcccagtccggcccagtccgcagccgcccgcgcgcgcgcgcgccctcgcagccgctgacaggtgggtcccacctgtcaggcccgtcgtcttcctcgggccgaaaccctagtttcgcgccgccgagccgccgccgctgtttcctttccaatccggccgttcctttccttctccggccgaatcaatagaggggaaatgatctccgggatctcctctaccttttctcctttggaatctttggctcaatcggtttggaatgagttggattcgagttcgtctcggattcgttcttcccgaaggtttccttcgccgttgccgtcgccgtgggccttcgccaccgcctccgagcccctttaaaaggatccccgtgctcttctcttctcgccgccaccctcgccttcgcctctcgtcgccggagtcgtcctagcgccgtgcgccctagcttcgctgtcgccgccgccgctccagccgtgcgccgccgtcgttccagccgtcgccgtcactcgggaaggccgccgtcgtcatcgccaagtcgccgccgtcctcgtccgccccttcgctgccgtcggagaccgccggagcatcgtcgccgtcgtcaagccgaaggtagccgccgcttcctcctcgtcgccgtcgccgtccgttggtcgtccgccgtcgccttggtcgtcggtgagttcgccgtgccgtccgctacccgttggtgtcctccgtttgcgtcctagtgccgccgttcgccggcgagtgtccgccgcccgagccgtcttctttgccgagccgccgccgccgtcggtgacgtcatcgctggcgtcatcaagcccctctcccgtgagccgccgtggactcgttcgatctcggccgtccgatttggatcggatcaatctcggccgtccgttcgcgtgaaccgtcgcccgtgcgcccggtccaccaaaccctagcccgctgacgcaataaatcctcttttccttttcaaaaataattcattattgcgtcataattcaatttaaaccgatttaagtgttttaatccgatttaatctttaaaaattcataactaattcatcttagctccgatttagttggttcaagtctctaaatttttctaaaattgagatctacacattaaaaatatccacatgtactgttcatgcttgtttttgtgctgttttggtgattttgcttctttttgcttagattccgtcgtttccggagagtccgtttttgcagaagaagagtttgaagagttccaaggccagcaaggcaagtcacacagatcccaaacaaccctttgagcatgttgatcctatttaaagctattgtttctattcaactattgcatctattttcgaatgtcattgggtggaattgacctattctttgttatggcccttttgtacattgattaccttattccttgataccttgggttatattaatttgactagttgagctttatttatattggttcaactagatattagatataattgcttagccctgcttagaaacattagtacacttatgggataactaatgattcactattatttcatgatggcttattgatagttcacgatggtcaatcgtgattagttaattaattaatgtgccaactaaaacctggtaatggtgggttgtgagcacatggttttgatggtcgtgctcatggcaattaaggaccggttcacgagtttcggttgtgaaacatttatcgtgccaaccacaagccagcatgggcaacggctttatcttttgtatagcatggttcattgcggggcaccagactgagaagtggcggagataagcccacgggggtcgctggggagtccatgccttgtttataagggggtgattatgatccaggaaggtgcgctgcagtgaattgtgttatgcgaggggtattgtcacaactcctttccgagataccgtggtggtattgaggcacatggtgacatgatgtggggttgtgtcttgtgggtacagtggtacacctctgatcagagtaaaactattcgaatagccgtgcccgcggttatgggcgggtctaacaatgtctttcgtgattagtctcacacctctcatcattataaaagatgctataactggtaataatttgattagctcctggtttggaatggtacattcctggtttggagatagaactgtgcagccggggtggttgttcagaatggttgggcctatacaacagggtatgttgtatagcgttggattaatattgcttaattattacttaactgttttatcaaattctcaaatgtttgctaaatgctgcttttgcaaatggaaccctattatgccatcctttgttatcctgtgcacttgcatatttgctgcgtggcttgctgagtatgtcatatactcaccttgcaatcattcatcagaggaagagttctacaatgaggctgatggtgtggaggattaggtgtagccttggtcaagctgcctgtggagtggagccgtctgcgccgtttatttaatttccgctgcttagaactttattgattgagaggaactatctacctctgtaatgacattctattcgcttatcaattagagtaatatttgtactctattatcaatttgttattgtgtgcctcggctgattcctggacgagggttcacacacatgtaagcgtttggaattttggatagaaattccgggcgtgacaagttggtatcagagcctctttgaccttaggttatgccaaatggttacccatagaagccctctgaaaaatattggaaaagtagaactgttctcctccctttctcttttaattaaaccaaactaatggcacatgcacttcttaaatctcttttaatggttctcattcgaaaatttattccagtgttattagtactgtacatctattactgtactaatggctcatttaccagcaaaagttttacaatactgttttatttaatcttgctgcaataaaataaatttagtatgttgattttataactttcttttgaaacctgttgttaaaaagtacaaaatttgtgaccttgtttccaactatttcaaattatctcgcaaagcttggtttactttatttacttcccttctactttgatttctaaaccttattcaaattaatccaaaaacttgtgctattaattggatagatgtcttaactccctcctttcacttgtctttagatgccgtgttacaagcctgagtacctgtttggtgttgagggttttgtccaggagttgcgtacgatgtcctttgtcattggatttgggactgcccctttttatgcccagattcgtcatgatcgtcatgaagagaagtgccgagtcaaagtcaccatgaacagtaatagtgaagatatcccctcagcgatgttcgaagctggaggaagaaactacatccatgcatgtcaggaagtggcaaggatcgccataggagagctccgtgatagctacagtgatcaattggccgacactgagtatcgctaccatcctcgtcaaccacagggaagtgaccgtggcagttaccttgagactgaaggaattgagaatgatgctactacaaggcatttggttgagatgctgtgggctatggatgaaagtcgtgcggagactgtgttagcagctcaagatcgtgaagaccggaatcgtggtaagatttgcaagctagaagacaaggtggatcgtttggagaaggaattagccgcattgaagggagaagcaccgccgcagaaggccaggattcgtctcaccgcaaggaagagagctttgtttgtccctcgttatcaattggcgccaaagatccgcgtggtggagaaagaagttgccccagcaaatcctcccgtcatcattataagtagtgatgaagaagaagaacccaagcgcaacaattccaagtttgagtgggtagctatcaaagatgaggaagatgagccgaacgagcctttaatcgacctcctatgctcggaagaactagagtgacttgttaagtcgttgtcttagatcgttgtgttagtttgcttgttttaagtttgtttgtgtgtgtgggtcttgcatgttatttacatcagtggtgggatgtaagtgcatgcgtttgtttgcttctgagtgttaggaagttggtgagtttagtggtgtgagagtcttcagtttgtaataatgaaactcagttaagatcaataaaagttaaagtaattctctgtcctaagtagtttcccccgttttctcttcttatcctgtccatgccagatggtgaacactcgcagcaacgggaatggtcctaacctcaacaaccccaataacaacaacaatggagagaatccaacccttgctcaagttcttgctcaacagactcagttaatgcacatgatgatgcagcaatttcagaatcagcaaaaccaagggaataatcatgcacctccacagaacaagttagcagaatttcttcgtgtgaggccgcctgttttctctagtaccactaatcctgttgaagctagtgattggctgcatgccatagagaagaagttggatttacttcagtgtactgatcaggagaaggtctcatttgcatcacatcagttgcatggccctgcctctgaatggtgggatcacttccgccttaacaggactactgctgaacctatcacttggcttgaattcaccgctgctttccggaagacgcatataccatcgggagtagtgtctctcaagaagaaggagttcaggtcgcttactcagggatctcgctctgttacggagtatctgcacgaattcaatcgtcttgctcgttatgctccggaagatgtgcgcaatgatgaagagcgccaggagaagtttttgggaggacttaatgatgagctttcttacccactcatggttggagattatcctgatttccagaaattagtggataaggctattcgtcaggaggacaagtacaatcgcatggagcagaagaaacgtcggattgctcaattcaagacacaacagggaaataatcagaagccgcgtcttactttaggaccccagtctatgccacagggaggttcttcgtctgttgttcgtccgcaacgtcagttcttcaacaacaatgctggcaacaacatccgtaatcaagctccacgtcctgttgcagctccagcacagcaacaacctgccaagagggagcaaggcaacaagcccgtggtgtgtttcaactgtggagatccaggacattatgctgacaagtgtccgaagccccgacgcgtgaaggttgtccctgcccagaataactctgctgtaccagcatccaaggctcgtgtaaatcatgtcgctactgcagaagctcaagatgctccagatgtgattttgggtacgttccttgttaactcagttcctgcaacagtacttttcgattctggtgctacacattcattcttatctatgagttttgcgggaaatcatgggatggaagtagaagatcttagacgtcctttgatggttagtaccccaagtaatcaagcactctctttgcaacgtagcccctctgtcagaatagaaattcaaggagtaccatttctggccaatcttatcttgttagaatccaaggaccttgatgtcatcctagggatggactggttagccagacataaaggtgtgatagactgtgccaacagaaaagtaactctcaacagctatgatggtcgagttgtaactgttcatgcattgtcatctgagtctttaaggtcaagactgaaccagataactttggaaaagattcctatagtccgggagtatcctgatgtgttcccagatgatttacctggtatgccgcctaaaagggatatagagttcagaatagatttggtacctggaacaactccgatccataagagaccttatcgaatggcagccaatgagttggcagaagttaagaggcaagtagatgatttgcttcagaaaggatacatcagaccgagttcatcaccatggggagctccggttatttttgtggaaaagaaagatcatacccagaggatgtgtgtggactatcgtgcactaaacgatgtgacaatcaagaataagtatccgctgcccagaattgatgatttgtttgatcagcttaaaggagccactgttttctccaagatagatcttcgatcagggtatcatcagttgagaatcaaagaggaagatatacctaagacagcttttaccactaggtatgggttgttcgaatgtactgttatgtcttttggacttaccaatgcccctgctttcttcatgaacttgatgaataaggtgtttatggaatacttagacaagttcgtggtggtctttattgatgatattcttatctactctcgaaccaaagaagagcatgaggaacatcttcgccttgcattggagaagctacgagaacatcaactgtatgctaagtttagcaagtgtgaattttggttgtccgaagtgaaattccttggtcacgtcatctcagccggaggagttgccgtcgatcctagtaacgtggaatccgtaaccaactggaaacaaccaaagacagtttcagagatccgcagtttcctaggccttgcaggatattatcggaggtttatagagaatttttccaagattgctaagcccatgacacgactgcttcagaaagatgtgaagtacaagtggtcggaagaatgtgaacagagttttcaagagttgaaaagtcgcttaatatcagctcctattttgattttgcctgatccaaagaagggtttccaggtgtattgcgatgcatccaaacttgggttaggttgtgttctgatgcaagatgggaaggtggttgcctatgcctctcgacagttacgtccgcatgagaagaactaccctactcatgatattgagttagctgcagtcgttcatgcattgaagatttggcgtcattatcttttcggtactcgtacagaagtgtacaccgatcacaagagtttaaagtatatctttactcagccggatctgaacatgagacaacggagatggttggaattaattaaggattatgacatgggaattcattatcatccgggaaaggctaatgttgtagcagacgctcttagcagaaaaggctattgcaatgttacagaaggacgacagttgccattggaattatgcaaggaatttgaaagattaaatttgggaattgtcggtagaggtttcgttgcagccttagaagcgaagcccactctaattgatcaggttagagaagcccaaattaatgatcctgatattcaagagatcaagaagaatatgagaagaggaaaagctattggtttcttggaggatgagcacggaactgtatggttgggtgagagaatctgtgtccccgacaacaaagatttaaaggatgcaattctgaaagaagctcatgatactttatactccattcaccctggtagtactaagatgtaccaggatcttaaggaaagattttggtgggcaagtatgaagcgtgaaatcgcagaatacgtagcagtatgtgatgtttgtcagcgagtcaaggcagaacatcagaaacccgccgggttgttgcagcctttgaagattcctgaatggaaatgggaagaaattggtatggattttattactggtttacccagaacgtcatcaggccatgactctatttgggtgatagtcgatagacttaccaaagtggctcattttattccggtaaagacaacttattccggaagtcgcttagcggaattgtatatggcaaggattgtgtgtttgcatggcgtccctaagaaaatagtgtctgatcgaggcagtcagtttacttcaaatttttggaagaaacttcaagaagagatgggttctaagctgaactttagtactgcttatcatccgcagacagacggacaaactgaaagggtgaatcaaattttggaagacatgttgagagcttgtgctctagatttcggtggaagttgggataagaatctaccttatgcagaattttcatacaacaacagttatcaagctagtctacagatggctccttacgaagcactgtatggtcggaagtgccgcactccgcttttgtgggatcaaacgggagaacgtcaggttttcggaacggatatcctaagggaagcagaagaaaaggtaaagatcattcaagaaagattgcgtgtggctcagtctcgtcataagagttatgccgacaatcgccgcagagatttgagttttgaagagggagattatgtgtatcttcgtgtcacgcctcttcgaggagttcatcgttttcataccaaaggaaaattggcaccgcgttttgtgggaccttataagattgtcagtagaagaggagaggttgcttatcagttagagttacctcaatctttggcaggagtccataatgtgttccatgtgtcgcaattgaaaaagtgtttaagggtacctaccgaagaagctaatattgagcagatagaagtccaagaggatttgacttatgttgagaaaccaatccgtatcctggaaacaagtgagagaagaaccaggaatcgagttatccgcttttgcaaagtccagtggagtaatcactcggaagaagaatcaacttgggaacgagaagatgaattgaagtcagctcatccgtatctgtttgtcagttcttccgaatctcgaggacgagattctgtttaaggggggtaggtttgtcacatcctgaaaattcaaaatatataaattgttgtttaaatggaatttctagaatttattttaaaagtcttgaaaagaaaatctaagtttaattaataaattccaatataaaaagtggccagataaaatttcattaaatactttgcttaattctataattcctagatttttctgggatttatttgagctaaggaagtatttttaataaatggaattgcatttaagaaataatttaaattgaaaaagttttaaaaagtcttcttttggctttgggccgaaagtcggcccaaaaccgccttctctctcttctcggcccagtccggcccagtctgcagccgcccgcgcgcgcgcgcgccctcgcagccgctgacaggtgggtcccacctgtcaggcccgtcgtcttcctcgggccgaaaccctagtttcgcgccgccgagccgccgccgctgtttcctttccaatccggccgttcctttccttctccggccgaatcaatagaggggaaatgatctcctctaccttttctcctttggaatctttggctcaatcggtttggaatgagttggattcgagttcgtctcggattcgttcttcccgaaggtttccttcgccgttgccgtcgccgtgggccttcgccaccgcctccgagcccctttaaaaggatccccgtgctcttctcttctcgccgccaccctcgccttcgcttctcgtcgccggagtcgtcctagcgccgtgcgccctagcttcgctgtcgccgccgccgctccagccgtgcgccgtcgccgtcactcgggaaggccgccgtcgtcatcgccaagtcgccgccgtcctcgtccgccccttcgctgccgtcggagaccgccggagcatcgtcgccgtcgtcaagccgaaggtagccgccgcttcctcctcgtcgccgtcgccgtctgttggtcgtccgccgtcgccttggtcgtcggtgagttcgccgtgccgtccgctacccgttggtgtcctccgtttgcgtcctagtgccgccgttcgccggcgagtgtccgccgcccgagccgtcttctttgccgagccgccgccgccgtcggtgacgtcatcgctggcgtcatcaagcccctctcccgtgagccgccgtggactcgttcgatctcggccgtccgatttggatcggatcaatctcggccgtccgttcgcgtgaaccgtcgcccgtgcgcccggtccaccaaaccctagcccgctgacgcaataaatcctcttttccttttcaaaaataattcattattgcgtcataattcaatttaaaccgatttaagtgttttaatccgatttaatctttaaaaattcataactaattcatcttagctccgatttagttggttcaagtctctaaatttttctaaaattgagatctacacattaaaaatatccacatgtactgttcatgcttgtttttgtgctgttttggtgattttgcttctttttgcttagattccgtcgtttccggagagtccgtttttgcagaagaagagtttgaagagttccaaggccagcaaggcaagtcacacagatcccaaacaaccctttgagcatgttgatcctatttaaagctattgtttctattcaactattgcatctattttcgaatgtcattgggtggaattgacctattctttgttatggcccttttgtacattgattaccttattccttgataccttgggttatattaatttgactagttgagctttatttatattggttcaactagatattagatataattgcttagccctgcttagaaacattagtacacttatgggataactaatgattcactattatttcatgatggcttattgatagttcacgatggtcaatcgtgattagttaattaattaatgtgccaactaaaacctggtaatggtgggttgtgagcacatggttttgatggtcgtgctcatggcaattaaggaccggttcacgagtttcggttgtgaaacatttatcgtgccaaccacaagccagcatgggcaacggctttatcttttgtatagcatggttcattgcggggcaccagactgagaagtggcggagataagcccacgggggtcgctggggagtccatgccttgtttataagggggtgattatgatccaggaaggtgcgctgcagtgaattgtgttatgcgaggggtattgtcacaactcctttccgagataccgtggtggtattgaggcacatggtgacatgatgtggggttgtgtcttgtgggtacagtggtacacctctgatcagagtaaaactattcgaatagccgtgcccgcggttatgggcgggtctaacaatgtctttcgtgattagtctcacacctctcatcattataaaagatgctataactggtaataatttgattagctcctggtttggaatggtacattcctggtttggagatagaactgtgcagccggggtggttgttcagaatggttgggcctatacaacagggtatgttgtatagcgttggattaatattgcttaattattacttaactgttttatcaaattctcaaatgtttgctaaatgctgcttttgcaaatggaaccctattatgccatcctttgttatcctgtgcacttgcatatttgctgcgtggcttgctgagtatgtcatatactcaccttgcaatcattcatcagaggaagagttctacaatgaggctgatggtgtggaggattaggtgtagccttggtcaagctgcctgtggagtggagccgtctgcgccgtttatttaatttccgctgcttagaactttattgattgagaggaactatctacctttgtaatgacattctattcgcttatcaattagagtaatatttgtactctattatcaatttgttattgtgtgcctcggctgattcctggacgagggttcacacacatgtaagcgtttggaattttggatagaaattccgagcgtgacaccgatgcatggaggaagaggggcagagcccgtgccatctggctcacggaggatggctggcgccccggctggtgacgggcacaagcacctggctccagcggcaaggccctccagggcaccgatcggcgatgacgacgtccagtgcggcgtccaacggcgaagagcccctctgtctccacactcgcccacgctgtcgcctttggcttccgcttctgggttggtgccggcctcccctcccgcgtcgcagctgccgccgccgtcgcctctccgccaccacgctcgcctgccaatgccgccttgctctaccgccgccctccctttctcctgtgtctccgccgccgcgtccctgccgcagtatcgccggccggccgtcgacctcctcaccccggcgacctcctccccatcgtcggccgacctgcccagtgcagagagaagagtgagagagagagataggggagggggagggggaggaaaggagaggaagggagaggctggcctactgacatggcatcctgacatgtggagctcacgtgggtcccatgctaactcaatcgccacgtcggacaaaaccagggttaaaatcgccgagggatctagtttgaactggttttgtaagttgggggatgtattgtatcgggtttcacggttaggggacgattttgtaactcgattacaagttgagagaacttcggtgtactttttttccttcgcgtaatgaggaggtggcctgaccaggtgtggatgcggattggagggtccatcccgcgagctggtggaagtggaaccgtggaagtgagatagcaacggatgtacacctatcggaatcatgaaatagctatggtcatagccgttattttgcactaaaacttgaaacgggaattgtgctgttagaacttgtgtttttattttaaaaaagggtgccattctttacataattaaccttaacaataattcctcaaaacctgaggttttgtgaaattcactctaaatattacggagtactgtatgtaagaatttaattccaagatagaatcgactaacttgtgcgtgctctctaaatattacggagtatgcacgctctctttctaagtttgctcgcctttctcgttgcgtgcaagttttgcatcaacacgtagaacgacaatgagctaaactagcttgcctcggcagcttgcatataatttgaattagttttgtgctatcgaccaaaatcaccaacgtaaatcaccaatttcgactaacgcgtgaacggaatcgaatctcgacagtacgttccaagttcctagacaagctggagagtctccactttgtgttcatatggactctccactttagctgtgtttgttcatgctaaaatttaaagtttggttgtaattggaatatatgatgaaaaagttgtaagtttgtgtgtgtaggaaaattttgatatgatgaaaaaattgaaagtttgaagaaaaactttacatctaaacacggcctttgtgttcattggactcttgctcaaaacacgtaagacaaatcgaaccagaaagcaatttgttcgttttgtgtggacggcatctgaatctcacggaagttaattaggaatatataattcgatcagggagttgcatctagggtgaataaggatatattattattctgttcgatgttcgtgtgcgccaaaatttccgaagtggactggaaggctccaaatcaaaccctcaatgtgtaactacaattttattccgagtaattttcctcttttttttcccttcagatgtacaagaaatctgcgtatcattatagtcatctcataaacacccactaaagcaaagttaaaaacatgagaacttgtcaaagaaaaaaaggtactacgaccagcaacctgtacaaacatatattcaaggtcaaatactagtaaggcctttggtctaccattctttgagtacttttgatttcagctaacttcaatattatgatcaagtactacaaaactacaaagattttaacacatggcaaataagcgtattatggtcctaaggtttttacaaactacaccgtataatcaaatgtttttcttatcccaccatgcttatgatttatgaaattaatccaaaacatctacaatatgagagttttaatcatctaacttaagtgtttttatttttttttcaatagtagtagttaaattgattaatggtgtggttttgtgtaactcagtgctaaacatatgtggatttgtacaacgccgaactacgatactccccagtcccaaattataagacgccccctttttttttagaaaaatcaaactcggtatattttttactaatgattatactaaccatatatttatgttaagtattatgcatgttatattactagattcaaattttaaagtattttcacgtgatggtaatttcatattcattgaaaatacaaaatataataaattaatggttaaagtatatcattgaaaaaccatgtaaaaaattataggccttataatttgggacagagaaagtagattagtttttgtgaagttctactcatttctttcacttgatcataatcttatggcacgcaagctatatagataagaggttccaactcaagaaatctgaaaccacattatgcacacccagcttgttatacataggaataaaagcgacaccaattttgttacaactggcacagcccaccttaatcgtataagaaaatgggctgcagttgggcttgtcctgatgagctgcattggcgtggtttggccctgttgttcaccaggaaatactacatgcaggcatgaagcaaccactacgaaaaaacaagatcatctgccgcaaaacgcactcatactcgcatggttttctcatgtgttagcatccatattctccgaagtgtgcgtatctgactcgacgaataatggaactcaactatttccaatagcaaactcacgtccggtaactctgcaaacctagcaagcatccaattctgtaaaagctcccccgttgcatcgtgccatcacttgcctggacaagcaacaataatacaggggcgcctttattcctgcacatctaggatttgtactctgcacacttgagagagatcttgcatatctagcacgaaggcctataaataccttgttgccatccgtttccagttcatcatcaacaacacagctgcttaagagcttctgagccttatcccagggtcaggacagaacagagcagagaagcatcagaagaatggcttctctgaaggccgtgaaacctgccggacttgccaaggagccggctgccaagctcagtgagacggcgacgaagcccgcggccgccaagggcggcgtcaagaaggctgagcagaagccccgggagcccaagaagaaggtatagtactgcagctgatccaaatccaacttgatgttggtaatcttgctgttgttttcttggcagcgtctcttcttcgtgttgatttagtcatttggctattttcatgtgaaatcaggtgaagagcagcaagccggcggcagccaaaaactgatagtggcaacaggagagatggagatagtacgagggtctccatcttacgctatgctatgggattatgaatcccgtctgtcccttcctctcgtcaccccgtgatgtcttgatcatgtagcagcaaccttagtcaagctggtcttgacggtgtgtgcagcccatgtgatgaatattacaaataagatggtacagttgtgacatccgcttcatattttttcacttggtgttaattctgtttggattccatcactgagaaaaaaaaacactgaaggtttcgcctgaaaaaaaaaactcgagaaaataaacccatcatgtaagaaagagcaactatgaacaaacacgtatggggaaaaaatagtaaagatcaagcaaagcacaactggcctagctaacagcaaaactgaaaattcactacaaaaagaactacaaaataactggcagcatatatgcgagtacaaaagaaatgaactttgtgtaacttggaacagaacttaaggactgggcagttgctacaatataccgattgctgtcgggaacactgcaaaagtgtcttgctatatcaatctaagtacagcatgagcttctagattagctagatagtaatattatctgctttactaaaattacccatgattacaaggttctacagtagaatataagcatggttacaagccttgagtgatatactgatataatatacaacactatgtacaagaagagaaaaaagatgtggtttccaatcatgtagcttccacttctattcaataccatctacaagttccgcagagttctaaagtgccaaatgcccatgaaaggaggtttagcttgcctgatcccatctacaatggcttcgccaataatcctttcctcattaaggcagaaaatgcacatatgtactttgcattagttagatatttaatgtacaaattcctctgcaaaaatctgcatccaaacatttccaaataagtataaatttcattaatatgcaaataatccaatagttggcataaatacttcaacgaattaatggacaaacgagtagtgaacatagaaattgcaaactgttactaaaacagtttggactagcaaatagtgtattttaaatataatattcacaaacaaatgtagaaccaacctcaaatccctcaacaactaaattctcaaactgccattgcacatatggtggtcttttaaataagttcaccataatatcaccactcagatagggaaaaaaagcatctggcctgtttgattacacagaaggtggcacaaagacttttctaagcatatcgtggaaaatgatattccagttctaatggcctgtttgatttgaggaatgaggagatcgattgaccacttgacaatgggttgtttggtttaacgaatgaaattggaccatcatctcatccccaaaagtacatatttaggccctgtttggcacaacaccagatcttagatcctttctggatttagagtttgttagttaaacaatagtggtttgaaattttatatttcctataaaatacgaacaaaatgattcatccaaatgctaatataatcacagatccagacccatggattttctacccagctctaaaaattgatggatctggaactgtgtgagtaattgcaccaaacttgtaggataatcccatgatggataacccatcctagatggtctgattcctcaaaccaaacagccatagtcccacaggccacaggatcatagtttcagatttcaactctacatgcaagttcggtttctattttagataagtaataaataaccaatggtttacaagtcggttgtattgtcattgagaatagttctgtcttttaaaacaaaatatcttatcagagtcccttaacagaagatatacagcttagaaacaccaaaatactgacatttgaaacttaagcgccacttataccttataattttattagaataaatacaaaatcacaactacacaaaaaataatagtgattacctactagaatggactaaatcgacgggccagctgtaattgccactcaaacaccaggcgccttggagctggtgccagagcaatcttttcttgtgtaatttcatcatcaacatgaataatagacaatacatcttcaaccaatggatctcttccaccccgaagaggatcctatggaaagatgtaaagaaacaggttataatcaaaggaagtttaattgaacaactataagaactcataattaaatgatattatagtcccacagcaaaaaaaaaatctatatactttcaaaagactgtattataaaaaaaggtttaagacaaaaaaagatagcaacgtgcttttattatatatcaaaaaagaacgcggcagtataataactaagtatatcttttgcaagatcttaacatctaactcaaaccagattccaaatgattggtcaataccagttcctcgttagtgtgtgataatccaggacagctgggatacaccaacactggtagttcaaaatggtcagcaatcgactggaaactggtaacttcatcaaaatttccctgatgcttttttcattttaactattttaaaatctcctaacagtggtaacgtgagtacaaaacttaacactacttagcctaattcagttagaacttagaagtcagaaatcggtgagatacggcaaaaaagatcatgacccttgccataaaacattgcacgtaactttaactttacacatctaagtgctgccgatactaatagagcttgagaccagaaaaaataaattcattatagccattccgcgtatattacctgtataaatatatctgtatgtgttttgccttcgtacaactgtaacttggcttgagcaccagcttgttgaaggacgtcagcaaaagtttgactgcatacaaaaaaacagagtaactggtatcatgaaaatggaaaacattatgccagttcaacaaggggtcaatcaacaaatgatccatccactacacagaacaatcttacagtacatggcaacaagaaccaatatagctgaaagcatgtttataatagaaaaacaagtagcacaacacagtaatatttgttctaacagtttaactctgaactattttgtactagtgttgaatatgggaagacaaataatggtctcaataaacttggcattctatacaatcaatctcctatttacaagtactttgataaatctactgtcctttgaactccagatttaatgaaaaatgcaatataagaacttatgctccggttctatctagaaaaactgcaaatgcttttcttcaattctctgctctgtatatccacatttaggcttgtaatagccaagatgtaaaaagacttcatattcatgatatgctacatttaagcttctaatagacaacactggaaaaggatggagagtataagggaagaattggggcattagagatgttaggcatgctacatcttggtttacgccttcatcaatccagctttttttcaacttagattggcattgcttcctaaattcaagtgaaactggacttagtaaataaaatttcctttagtaacacctgcatgtcatgccataaaaaaaatggagggtagataggtataggtgaagcgtgcatttgctcgagtttgtcttgtgtcatcttaaatggacatctgcagaaggcataagaagaaacctggcagatgatggtattgaataatcttcagttccatgcataagaacaatgggaggcagaagagctattgtctgggaacttgactgcttgacaacaatttccggagaataacgtgacaatgactcctctccttccattatgctgaaacagttattcaaaaattttccttaactgctgtttaaacaaaacaaaccactttccaagcatagacatattactacctgaaaaatattgaacgattaagaccacgttcatgaaaatggtcaaccaaactatgcatgttgtatctgctccccaaaaaaaaaatgttgttagtgcttccaaattccaatgtatgcttagtattctatcagaataatccgaaagagaaaagaaaacaattgaatattggaggctggtgcttattcgtaatatggtgataacaatcatcataattcatcttcaggagataacttttgaagtgtctatcaaactccacagcacattgagaaatgatttatttgtttgactaggagaaacaatttactccattagagatttatatgtaatcacattgaattgatggtcaactaaaatcagggtaaaaggaggttgatataataaatcataaatatgcacaatgaatcattgatagttttatttacaaatcctgaatgtcaaattgaaactgagttaagcagtttggtcgaaccactttcatattggcacacatggaagcaccagcaaatgaagagaatggaacaaagaataacttgggggagaattcatagggtttctatttacatgttagtaacaaatacaactaacccagatgatgtgaaatgatgaagactattaatttatttcttatttaagattagttcccatttggatgcactcccattgattcacgtgccaaaacaaataaatgcaattacttgtttgaagattggaagaaaataacatgcttccagtgtttgatcaaatatgccgaggacaatatcttccagagaaaacggccaatatgcccgaaaaacagaatatctgacatccaagtgtgaattttaaggatagcaaaaattaaataagaagttggcagactttttgttgcttgctgccaactcaatgcatataccagtgttgcagtaataggaatattcacgcaaaaaaaaagctaataaaaacgaactgcaagctcaccctccagataaaccaaaatatgctttgatttgtgtaacactccaagaaatggactgcccactagattctttcactgcctgctcgatgagggcacatgcagcaatatgtgctcctgctgactgacccaccaagtagatcctacaggtttaacataaatccataagtatgtcatgaaggagctagaatttgctgtttttatatagcaaaaggttattctggaggaagttacttatgaaggactaatgaattgaaggagcaaggacagataataaacagaattatatcaatatatggcttgacaatatctacacaaatatgaagaaagaaaatatctacatgaacatgtgatatttgctactttacctagcatgaagagtttaagggtaagcaaccaatgccataaatcaactttctttttctaataataattctaggaatttcaaggaggctatcaacagacattgctatgtaaatgccaaaaaattcacatgcaaacttgacttcaaaattttaataacagttctgtaagaacctttcataataaccttaatagaaactgaaatagttgttatcttaccgattaggatcacctccataactagcaatgttgttgcacacataagaaataccctgggaagcatcgctaaccatgtcacctattgttccttgagggaaatttctgatataaatgtacaacgttgtattaaacaaataaatattgccaacagtacaattcctcattagtaataaaatgatatagtattgattcagtggagtcatcagcacctgtaatcaatgcaagcaactatgattcctctctcagccaaccgcctcccaagaagggaaccccatgccttgtaactaaaatattttgtgcaaggtcatcaacaaagaaaagccaatgaataccgtggcgccttgttgcaaacttaacacttacccaataatccaagccccaccagttacgaaggccaccactgggcagggtctgttgatatctttgggtatgtacaaatctagcctgttcaatgtaatatttatcagtttcaataacatacaggaaacagtgttcttattttattttattgatgatgatgttacctgtttcttggttgttctccatagactatacttctacgaacctgacttgagaagaaatagtaatatccaactgtgaaccaagaaaggactgttttagaacgttgtagggtaataggaagagaaatcagacatgccatattcttttctgaaactgtgttagggtcaggtttgaaattctgaaaaaaaattatttgccagttggtcctggtaggaagtgtctccagtaaaaattggtcaaaataggtcaaaagtcccttttaccctttcctgttcctctcatctgaactcttccttccccttatgctagacaatattgccccgaaccacgctcaaaccaagcaaaaattttgttcggaagttcaaacaaagttctgaatatttggaactatgtccatccgtcttccccccccccccccatcctgcaggcatcaccaccgtaattttcttctttttttttgcataaaaccctaaggcatcatactcttcatgcgcaacacaactgacttgaacaattgagtcaatagaactgcatgttatctgcagcataccttgcaaaaaacctggcataagtaaaattgcatagattgtcagggcaagtagttgtgacatccaccggtaacctaacctgcaaaacaattaagatagtaaggaatatgtaaaaaaaccaacacaattatattcatcgagatattttttggcgaaaggatgaaaattgtcactaaggctgtgtttagttcacaccaaaattggaagtttggttgaaattggaacgatgtgacggaaaagttagaagtttgtgtgtgtaggaaagttttgatgtgatggaaaagttggaagtttgaagaattattttggaactaaacacggcctaatgtaatgttacgctagctggatagaaacttttgctacattgaatgcagagttggaaataaatactggcacttgaaaatgcaaggcccagacctgaatatagcgctcaaagattccaatattaaagcttctcaaacattatatacttgtgaacttagctgtcttacaagtatcttaaaagcatatttatgctttggttgtgcttatgagaacatctatagctgtatacatgtcttgtaaacaatcttaactgcagcagctgttcaattctaaacaagatgtagaacagaatttctgaggcaacaagaaagaatcacatcaacaaaattcatgactaataagccaggtaaaatagaagcagccgtgcatcatgctgccacactgttccatggtgctactactttatatacatactggtcagttaattgatcagtaagtccaaagcaagagcacaatttgcacgaagacatagtgggccatgtgactaactgacagcggtacagtacacgagtaatacagaatgactgaatctgcatgtaaaccaatagtccaatacactaatttaatttataaaacggacaaaatgcgtgttagcaacaacaaaagtctgcacgccagggaaacctctaaacgttaaaacactcgtgtggaccccgtagcttaattcccagtacgtctcaactctcacctgtcctcgaagttccacacgcaattgcatcagcaacctagtcaaaacactccctacttccctagtggattatcgacttatcgttagcttctccatgaaagctgcgttcgaatccaccacacggaaggaactccaagaaaacagaagcttcgccatcggaaatagcatggaaacaaatcgccagctcacgtatcgcatcgaggcgtccgcgattggctcgtgagctagtccatgatcgattcgggcaaacgcaacgcaagggctaacaagggtagaggggaaaaaaacaaactaaacagcgaataattacccgaggtactgcaggaggctgaaggtgaggcgcgtgacgaggtacgtctcggaggccgcgtgcccgacatcgtcgcggaacgaggactgccgcctcgggccgccgcagccgcatccggcgggtcgcggggacgcggactgcaccggcgacgagcggcggcggcggccggaggagtcgctccgcgagaggagcgcgccgacctcctcggcgctggagacgggccgcattgcgggcggcgcgcggcgctggggcggtgtgcgggatattcgaatcggttcgggtgggtgggtgggtcgcaactcgcaacggtgcgggaggtggtcgggtggtggacgccgtcggagggggagagttggggggtggtggcggtggtggggcctaaataggcggagtactcgggtagtgcgtggcaacaagggacgcgtgggcggaggcgggcaaaacatggcgaaatcttccgtttcctcctcgcctcggcatccttccttccggcgtagtatcgcagcttgcctctttcggcgcttgcgtacgcctaaagagagagaaagagaggattttgtcggattgttccgagtaaaatttgatattgcagtacagatgtcagcgttttcctcctgaaaagaattactcctattttactcccaactcacgctacggggcaaacgttaaatctgtatcgtgcagacacatggcaggcagaggagcatgagatttcatcggtgtctctcgtgtttcaccggccataaaaatatatagcggaaccagattctattttcatttttagaaaaaaaaatgatggaccaagctcgaccgcaagtgcacgcaatgaccgcggcgctcaaccggtgccacagttccgatacacttctttaacctcaaaataaattcatcttttactcatcccaacattagaatacctttattttatcaaattttaatataacaatttctcattttatctattttcaatacaattatttattacttttataaactaaaagacgcgaatattagagaagaacgtaatatcaaataattaaaaggggtgaggtttcaaacttaggtcgtctagccaaccaccttgtagagctagctggaagacccttacgcgtttctcacttttataaactccaatacagtaattatttaaaaaaaataaatataaataggatgagttaaaacgaacatattataaagagggagtattccgaacctgtccacgaaatagggaatttcatggacggaactcgaaagagtgtaacagcctaatcgtctcggtgacggagtatgggcataaatgggttggtggtggcggggccgcacaccagccgcagacggcgccaaagctgcgtgcggtgcgagagaatcttgcaggttctagagccggcagcctgcgctgtgcggcgtagctggctctcggcctctagctgctggtggcctgtggccggccactggccagcctaccgcatgcgggtggccgcgacgcgcgccttcctgccccgtgccgccgcgccacgcggcaggagaaggccaccgaggcgtttgcggccgtcgggccatgggaaaaaaaaaaaaaacgtttcgaggggcgacccgctgagctcgccgagccgggctggcctgaacagcccgtgccagcttggatgggctggcctcgtaccctcaccaccaggccgagctaggctggactggggaaagttgttacgctgctctttttcgttttatatatatacttcggctgttccgctctggatcgtaatgtgccaaaggcatatgctaagatcacataacgtgcatattagctgttgtcaacctttcaaaatgtgtgctattcagaatgctactatttcttgttttacataaataatttcaaattggacatggtggattcaaaacgttgtcttgaaaaaactcaatgtaagtgctatagctctctcacgagtagagtaggaaggca

SEQ ID NO: 5649 - DNA, 31996 bp, Oryza sativa
cctacccttaatcataatggaattttttgttttgtcacagcttagctagttatcatgcttatcctggccaccacacacattttccactcttgttagcttggggcaaaatcaagtgcaaaccacaataccctctcattttccaaaactttgttgacaaaactagaggaaactcaagtggaaaccacaaattcattaaggcatgaaaactacgtttgcaattttcaagagaattactaccaattaccatatatagggctagtgctatagtacgaacatctaaaaattctaagatctacattggtttcatgtggaagaaacacaaaattcataaaaagagtaaagtatactagcggtatcacaatttgtttggtgggtgcaattaagtcactcatcttgcaaattgctcaaacaagacacctatcttctttccaaggtgcaaatcacagaaaacatatgccaagtgggatgttcgtgtgctaagttagatgccatattaatttcattcatatacgttaacacaaatagaccaatggtctaatagtattgacaatataatctaatttaagaatatttttgttttttttgctaagcattatgcaattgtgttgactgaaagcatatgcatgtagcagcgcatgtaagaatacagaggttaatttgcttttttttttgcttaacttcaaacttgtaaccttgccttgcccatatggatcgcaagcgcatcatcttataccaatagggtttttaatttagcaacaaacacttcatgtgacatgtattctataatatttgcacccatgaaacaagttgagtggcttgtttgagtaatttataagattagtgactagagtgcacgcacccaccttacaagttttagtacccacggtgcattttactcttcataaaaggtgcaatgaagaggttgaaaacaacatttttcactctttctatgaaattaactaaaacgagtttatttttgaaattttacatcaacgtgcaacataacctctaacgcatatggtgttttttagaactttttaaactgtaatatatacagtttgtttgttgcatggttttcatgattacaccagaataataggtgcttttctacttgatactttcctcaacaacaccattatgaactgaagaataatttttttcatccttctagtttgagctttcaaccgcaactgtgatcaaccttcaagtgttatttcaacccttggaactacaaaatcttaactttcacgtttaatttgaagtgtgagactgagcacatgagttagctatgtgtgtggaattgaaataatcataaaatttatcaatatctatactaaataggcactgggaaagcaccaagattattagaaatacttttatgctgattaggtcgatctaaatatcatgattgcagatcttattaagagtttgttttaaattgttgggacccaaggtcacgaacaaaatggggataggtggggaaatacacttttcccctaactatcctcaaggtgacatgaacttgagatatattggttgacttatgttgccattgttccaatccaatgtcacatgtcttgctacaaggttaggctgtcttatattgccttgggaggtatacatgaagttacattagtgcccccaaaggtacatgcaaagttacggtaataccctcaaggagctgtaaaccctaggggtgttcctgtacacttggatgactctctggaccactagcgccatcttgcaagggcagttggagtggtcacccaatattttctaatggaatattcttgccgggttgtataatcaagccttctcctcagcatggcgtgtactacatgcccctcttgtaacaagctcgaataatatttgatggataaaacaactttccctgaactagacacgaatagtatttgatgggtaaacacaactttcccatgaacatacttgttaggcgttcgaggccatgtcttggttaaataggaggccaaccctttgttccgggtgcctgctacaacataaataaaatatgccaatggaaattgtcatggttatgaataaggcatacctcctttcctatgaattacgaaatatacggatatggtataccttcgtatatacgatatattcccatatatgataaggaaaactagaagatattatggaaaatatcctcatggactggtgattaaccgagtcctactcagagatgattgggtttattctatatcatgcaggtttattgtctccgagttctacttggagactaaggcaattcacggtataaaagacacaccccctgagaagttcagatcatcgaatcatagcgccaacacacccatcataggttatgaagccggaggatgcgaagcctactcgccggaagatcttgtcgaatcatctcgacaagggtctcgcatgtaacgccggattcatctgttctctgtgtactctgtggttttccatatcaatctcatataaactgaattagggctattaccttacaaggagtctgaaccagtataatttttgtctctctgttcgtcttgatgtcgtatcgtgtagatcctcgtaccaacgtaccccaataccctatttatccggtctacgggtatcctccgtcgacagaaatgttatgtacttctaattgaaataatgtaagaaggttataccacaagaatggtcccctgctggagtttgaggtagtattgcctccgttggtgttgacggaatccttcttctccttgtctccagtgtttgacatgttggtgaagacgaagtagacgttgataaatagtgagtagtcgagccttgcgctccccaaaaacctgatcgcccgcccgtccgtgcaaacgtcgcagcagtgcgtggtttcggaggcctactctcccaacgcgtatgcacacattcgtcgggatgggattaccgtagcagcaaccgccttggaaatggatgaaagtgtgtctcacttctccttagggagatcaaatccattctcattttatatgaggagtggaagatgaagtaagagtcatggaatgggaagaggaatagagtaactaattctcatcaattagccatgaaccatcaaccaaccatcaattaggtgtaattgatgtaggttaccaatggaataggaagagaaatagagcaactaattgtcatcaactagccatgaatcatcctccactacacaaccatcaaccatccatcaattaggagtaattgatataagttaccaattccctaatcaaatggattaattctcaaaactcatcatcccattaatatcccataagataatgaatacacatgaattcctagcataatgagccttggaatttatttgatttaattgatttaaatggatcaattacccaattaaatctaacatcttgtccagtcgttttaccaaatggcttgcttaattagaaaccactctagtttcttcaagcttgctactgattctactgaactaggattagtccaaaaacgtcccttgtcaagttgtcctggcttctagcttgtatcgcgaaataaagcttttgttgtgctagtaacagtgtgtaatagtgagactgccgtcgttttacaattgatacctatgctgccaacatttggtagctgcagcgatgggcacacaccatgcatatagtatggatagggatggaaacggtcagaagaatgctcaaaccattttcataatcataatttttttcccaaaaactgaatcggaatgattgtgtgaaatgataacgagattaatactactacaacactagaaaatatcataaacaaaattactgaaatagagtctcagagataacgtaccacaagaacaaggaggtcatagtcatatctatactacaaagtaacgtcatgtactaagcaattagtgtagatttaaagaagtaaataattaatttaaattctttataatgatactatagcatcgagaccgacaacacatggaggttatggtagcatttttctaattctaatgggttgccgatactttacacttatttgtttcggatgaaaatggtgcaccgttaaaacagttaaagaaaacaccctcccgttttccatcttgatttccagataagataatacagagtcgaaataaaatggctagtacagaacacaatgatagaaaactccgagccgtttttatccttaactatacatatcaggtcaagtccggccaactcctacagaatccaggacgggttggattgacacacatataaaaggctggtcttagaattgccgtctagagttccggtcttcctgaccgaccggctggcgagttcggtgctttgatctcgtgctcacttcgatccaaattttgtgcgtctcgtcaagtcactgcttcgaccccgtcactgctacccaattctcgcacggctgaacctagcttgtagctgtccatccgacgcctaacttagttaactgtcacgcagcaatgcagcatcggtagtcgccggccggtagcctggtaggctactgtggttgatcaacggatcgagctgagatgatatccatcccctggtacagactacagaggccgcgtgaccaatgtgccagttcaggggacaagaagaaaacgtaggccataagtgaaggaggcgaagcgggtagcgtccatcaagaacagggcaatggattgcgggccactggactggacaccggtccgggaccaaagaaaaaccacgcccacacgatggcacgagccgtgcagccgcgcatgccttgatgcgtcgcgtggtccgtccgtccggccgccgaggcgaggcgaggagaggcttggcggtggcgggcgtcgtcaaaaaggttctcgggaaaagtccgcgggggtgatttgtcgcgcgcgcccacgaaaatcgcatcacgtggcatgcttcggcgtccgtctgatcgtgtagcggcaggcccacccggggtcttttctgcgctttcgtgccatgatgtcatgtgtggtctcgctagcttctctctctagtcttcgatctcttgagctacgccaccatgccatccatggtatgtaggagaacgctacatgcatcgcatctcaggcataggcccaagttctggcactcatcagagttacttaggagagttccttagggttggttttgtttgtggtctaaaataggccttattaaattttatcaatgcaaaattttagtaagttttggtatgactaattttggtaaagcaaagttgtatttggattgaagccaaaatagcctaagttcactattaaaatggcatattttcttaggcatgctaaaatttggcttcaaaccaaatagacactaaacactattaaaattaataaatattggtaagcctaatttagatctcaaaacaaaccagcccttagggcttgtttagttcccaaacaaaatttttcgtgctgtcacatcgaatgtttggatacacgtattgagtattaaatgtagataaaaaaacaattacatagttcgttaggaaattacgagatggatttttcaagtctaattgtgccatgatttgacaatgtggtgctacagtaaacatttgctaataacggattaattgggcttaataaatttatctcgcagtttactaacggaatatgtaatttgttttttgttattggactacgtttaatacttcaaatctgcgtctgtatatccgatatgatataaggccatccccaacccagaaactattaagtagtttccatacttaccatgtcatatagacactgtgtatagaaactatgtatacaatggatggagtcttcaaattaaattctcatccaatcacctctcttctctctcctttatccacgtatgctcttgtttttatttggtacttgtgtagatatggtttcttgtatgagaaatgatttcttcatctttttacctctcttctcattgactctattgccacatatgatttttgcttatgtgacaatgtatttaatactatggaaactagatgacatagagggttggggatggtctaagggggaaaattttttgccaactaagaaagcccttacttggatgtgatacgaccacatcgttgaatcatcgaacaacaacgtggcagctcaccacggcagcggccagcgggtcgtgccctgtagacccccgattttggaaatcggaaatcttctgtgtttatccgtaccaatccctggatcagtagttggtacacacatatatagttggatcacaacatatcagagttaaaagagttaaatacttacattagggccaggtaggccaacaactatcagagaacaaaataatataagggcccggttaacatgccacaggcagtcgactgggaaacgagacctaaaacaagaccgcactccgatcatcttgttggatacgcaagcgtaccgacaagggcttctcttcaacactctcctaaaagatatataaatagcaagggtgagtaccaaccgtactcagcaagccaccataacaacaatgcatatgataaagggtatttcaaggaatggcttcaggttcttttgcataaagctagttttgcaattcttttcacaagtctaagacatagcatagactgatcaagttttaataccagtgttcacattaaacaacgacggttctgtccaccattcattgtgatcccaaggatagcttcccgccattgagtcgtcatggttttctgaggacgtccaccttccctcctcccagtaagtggctccaacagcataaaaatcatcatgcaatatcccatcccacacaagttaagaattttgagtctagccaagtgtaatacacgtcccggtgctcaataaccgcgagcacggctattcgaatagatttggtttattcacactgcagtggatgtacactttacccgcactccgcaactgcccaacacatgagcctcgtcccaacacatgagacgcgtcacggcaaagctttttgataacctcgcattggcagtacccgctccatgaactttacatcctcatgcactctaggcgtacacggtttctagcagtgagaggagttctggcgcacccgggaagggaagactcacacatgcattaagttataaatatgtttagattctcacatggcagtcctaccgatggtgacaccactgtagacacccgcctcgcagtcctaccaatggctgccccaccgtagagtccctgcctcacacatcaagaaaccactatgcatggatactgcctccgctcagctatctactccgctaggtctatacccatacgagaagtgcggttgtacgggggtcgtttcatgcttaacttcatggctcggtccttaattgaccagggatggcactagccttttccggacatcacccaaatcctccgtctgccccagtcgaaaacagttgtttaattttatttctcttttcacaaatcatgttatcaacatcatggcaatgtgacgctcatgtctccacatgccgtatctcaattaccttcccaaaggtaatttcccaagcatatagcatttgataaatatgagtatgcatgattctagaatagcatttctaagcaattgttataattgactagggactcatacgtaaacatggttacgaaggcataaggggtaaataataatcaaggcatggcataatcacaagtaggatgttcatcattgcatgcaattttatttgtaaacaaaataatttcgcaattgggatcaacatgttcaaggaatagtgatgacttgcctgctcagaatcatccttattcttgatacaatcttgatcaaccttcacctcctggaagctgcatacgttgcctcacgactaactgatacacaaattctataatacgcgagaaaaactaatattcaacaacaagcaaatatgcacaaccaaaatacaaacgtcagggtcgaacctagggttgctcgtactattattgcttgctaggggattccaatcatgctaagggctaaaattccttaatctttctattttcatcgtggtctatttaggagttaatcgatagtgtataaatgagatatacatatggctaatctgtggtttagtcaagctaatgactatggaaggattatggctacacatgtatttatctaaataaagtggtcatatactagaggttctgttgtcggatagatttaggatcaatcaaataattacagtgaatcatttgtattattattttactgatggaggcattactttaattatgaacatattttacttgtcacaataaattatgaaaggataataattatccatgctttgaatgttagagttgtttaggttaaccatattatggttacagattatcccttaatgaacaatcctaacttacagttgaactataattataattataaggtcaagatttataactagtatttatccaccatacatgtttgtcatatactccttggtttaatatatgctaaaggtaggttattgttcttatgtgtgattttaaatggattgtacagtatatgtgatttaagtgggttgacaagtgattttactgtttgagtaattattggatgctaaccgactcaaccttatttgggtggttctatcataacaactctgttcctattcctcataaataaattaaagactcatctatgtgtattcatgtttgattgacctaattataaggctagctttattatttaaataatctataagtcatgggtttaattatacaacaatttaatagtactagtatctccctatacattaatttgagacatcatttaaaattagtttgtgtggttattacaatgacaaagcatgttagagagaaatattcttacatctagtactaattttatttgttagcacatttttaagttgactattatgcattatcttagtattaattatataccattggaaagcttatgaatttagataaatttaggttcaagtttcactcaaatccgagttaaaatgagagagttacgctagtttaaatattcaaatttgaattaatccgagaaattgcaaaaaggtactgttcataaatgatttatttttaatccgaagtctgttcttaacactaacagttgctgacacgtggggtcaaacctttactttattttccaccgaattaattttctaaagggaaataggatgtgctaatgacaagtggggcccacaacctattctcttctcttttctcgttctctctatcgtcttctacctccagaccgagcgggagcagcaggggagacgcggcgcgcgcggcaaggccggccgagggcgacccgacggtgaccaggggagggagtggcaaggctctggcgtccacctgccggcggtcacggcgtaggacggcgcaggggcgagcggcgccgcatggccgccatggccgccatggccgggcacgggtagctaggtgctagggcgatacggagggtttacgaccaaattggtgagggcgtgagcatctacggagtgtgggggttccattttactcactagatggagaggaggagctccgggatggcttgtccacggcgagctcaccggcggcagaacggtggccggaccggcacggcgacggtttctaattggcgaaattaaaggggactatagtttctacggaactaggggaggccagaggagcgaggacttaccgagggatggaggaacgacgaagttcgatgtcgcgggggtggagtagagaagaagatcccgtacgcacgctaggtgttcgacgaaatgtgtgtgagaaagagaaagaggcagagatggggctaggccttgtgatggcagccaaggtgtgtggggaggaagggagatgggaggggggtatttatagggtgtgggaagggtggcttaatggtcgacgcgacggacggcgcacggggctcgaggacgacatgatggtgcgcagggctcgagggcgacatgatggcgcacggggctcgagagcgacgtgatggcgcacggcagcgcgtggctcaaggcggcgatggcgacacgcggcgacgcgatggcgcggcagcggcgcacggggcatgaggcactgatgcgacggcgacggcgacgcgactggtacggggctcggcgcggcgcaagtgacggtgacggtgacacgagcggcgcggggctcggctcggcgcggcgcagccaacggcgacggcgacagcacgcggcgggttggagacggcgcggcgacggcgacgcgacatgacgcggcggcgcggggcgcgagttgacgcgcgacagcggcgcggcagggcgacggcaatggcaacaaaacggcacgcggcggcggtggcagagcgaggcgacggcgacgcggcgcggtgatggcgacacgacagcgacggcgccggtgcgggtggggctcgaggccggctaggacggcgcagtagtggggagaaagagagctgggatggctagaaaccaaatcgaacacctaggggctaaggaacagtgctagccaactatttctgattttagagggtactttgcaattaggaacttggtgcaatatcgatctacatatcgaattaaatactcccataattctattatatatagagagagcctagtttatttgaatgatcatcatttcatgtgtactcatattatggcacccacctacattattcaaatattttaatatttgataaaataggttaataataactttttgtttatttgattttaatatcttgtgcataattatttgtaggattaaatatattctcgtaaattatatctattacttaaatgtatattacatttaaaatgtagttcttttctttacttttttttatcatttatggtttggcaagtaataggaatcataacaaccagcatgatgcaaaagttttaaaaaaatttgaaattttagtgatttttattatcggaaattttcagggtgttacatgcccgaagccccgaagtccaaaccgagagtagctcgcgcgctgccgtgtcgaccgagctggcgcctccaacaagtccacggcacggggcgggagggaactgtattccgtgagacaatggcacgagaggcagctgcagaatatgtccctgcatgcctggggctatgatatgagctgtggctgtctctgagatctcactggcctgatgaaactctacatggtgcaatgcatatgctgatttgcatttggcgaatagcggaatagggaatcgcgtgcgtagtatattaatccgccgatcacttaacctaaactccaaaaggtgatcgtcgtgcgtacgtacgtacagcgctccggtctgttcggtcagccctcgcgaagcttcacggaaacaaagaaggcctcatgatcgggagatcagaagggaggaaaaaggataacgaggaaactgtttcgctttgtcctcacgcacacacgcctcatgcgtccgtgtttatcgatcatgccactgccctgctgatgaacaagttcttcaagcaagttacggtgatatgcgcgcgcccactctgcaaggagcagggaagtattggcggcacatggagcagcggaagaaaggcatttctttgaaccggatcgtttcagctaatctatcgcccatcaccgcatccgacgcatggttggatggaatgaaatggaattacatttacacgtccacggcgtggttgaaaccgaaaaactggatcgcgtgtcacaaaactcataatgattggactaactgaatgtcgatttcctagcgcaatgattcatcaataatgcctggaattggctccgaaagtctgaatatgaaaatgatggctggatgggactctatatacatatgtcgataaaaagatcttctaaaaatttatcagatgtaaatatattatgattgtagtataacttatatagtattacttatatgtaacttttaaaaatccgaagtggtggtcacaggtcaaattccctcacccgtgcctgcgttttttttatcctttctgcttgcacgaatctcgaacaaaaattaattgttaaatatttttgtgaaaattataaacaagttacaccaaaatttaccatatttacgtcagacaaatattttcaagaaaatttatggacatatttatagcaaaaccgggccggattagcaagcgcatggaaagaaaggctctcaacgaagaacctcgcatggaggcccaaaagtgcatcatcgtcggcccgtccggcaaacggcccatatcttgctatgtcggcccaaagaaccctcgaaagctagggctttgcggagggtttagccgcgaccccgttcagtcaaccgtcattccgtctcttgctctcaagcggcgtgcaaccatggcggccacggcctcctccttcctcgcccgccgcctcctcctcacccgccgcgtcctttcctcccccctccgccccttctccaccactgactcctcctcatcctcctcctcctcctcttcctccgacgactcccgtgcgggatctgatgcgggacccgaccccgagcagcagcaaccgccaccagcgggccaggatcagcaggccgccgcccggccgcgcgccggcgacacccgtcccctcgagaacggccttgaccccggaatctacaaggttggaactccttgatcccctctgggttttgattcggtgcgagctgacagcctgattggggattttatttttttgtgtgtgtgggtgagaatcgcgaaggcgataatggtggggaaggtggggcaggagccgatacagaagcggctgaggagcgggagaacggtcgtgctgttctcgctcggcaccggcggcatccgcaacaaccgccgcccgctggaccgcgaggagccgcaccagtacgctgaacgatgctccgtgcagtggcaccgcgtctgcatctacccggaacggctcggcagcctcgcgctcaagcacgtcaagaccgggtgagccctctgttgcctctgcagacgagctgtcacgtaaacgtagtgaagggccaattcctgatgtttgagcgtgacaacctctgatttcgtatgttggattagattcttaactacaatggttcaactgcatagctctgttgcaattgatttgttggtgagtaaagcatctgttatgattatacttgatatgattggtacttggtttccttggggtagaatttggtatattcctttagctctgcatgagtggggattggtagatgcctttttcttttgtgtcgatctattgacttgaacttactctacctctcatttgtgattacatcactgttctactgtattactcaattagtaagaagctaaatatattagtctatctttcgcagttgtcaatttgcatataagtgacatggtaataatattttaaggttttagctttgtacagttcctttttttaattctttggttgattaactccactaacacaagtaaattgtaccatttcaacatttcagttctgttctttatctggaagggaatcttgagacgaaagtgttttctgatcctataactggactggttcggcgcataagagaaatagctgtgcgctcaaatggtatgtttattgcaccattgattttgacttgtggcaaatattttcttgaaaacatgtactagtgcgttgcccatacctcatgttcttttaacaagttctgtctagttctcaaaaagcaatgctcataccactacagtacgttaagtagacttttcgctgtttccttttatttttcacgtacaaactacaaagtaatgtcatgttgcatatgagcattcagcgatactgttcaatatttctatcgatgttgtttagtcggagtatgatactttttttttccatacgaacaggccgtctcttgtttcttgggaatgattgtaatgcgcccaagttaggtgaagccaagggcgttggctacttctgaaactgaggtccactcgacatcaaggtatatcagttgataaaattgatttaaattagaggtatctcaactgtgcttagctttaagcgttcaacgtatggtgaagatctcagtagtggaccagctttatggaacaaatacagttggacatcattgtcgaaaccctctaataattgaacaactgattgtactgtataacttgattttgacaaaacaacatatgtggctgtgctatttattttagttctcccaaaatttcttttgaccttttgggtcagagaagtttgtgaatttgagcttttctacaataaaatggatctgtttactcaatagttgttctatgatgcttccagtctaatctgataacccccttaatacctaatgcggatgataaagcctatcactttttttttggcatctgacagtaaacaaaaatatttgaacaactacgggagttaccacatatctttctgaagtatgcttttttcttgtcttatctcacgtgtccatcgtaagagcatctccaacagtctctctcactctccaaatgtctatttggccaactctccatctaatttgacaagccaaactcgttgtttactccaacagcctctccatctaccatctccattacaagtctatgacaaatgggacccatacgtcagcctctactacccttcttccactctcttttccccacccggccaccccttctaccacctccagtactacttactgcctcctcccctcgcctttaccttggatgcggcgacgacggatgacgacggccacggcaactcgcgtgcgcgcaaggcgcggatgcgcgaggcgacggcggacggcggcggcgactcgcgtgcgcgcaaggcgcaggtgcgcgaggcggtggcggcggcgactcgtgaccgaaccagttcccgacgacggcgacgacgcatggccaccaggcgaactggacgactccgctggcgacctcggcggcgaggaagaaggcgaggctgtgcacgccgaggaagtaggctgcgccgcgccgccggcgtggccccggaggcgaccatggcggcaccgaggaggcggcggaggtcggcgcggtcggcgaggtggcccacggcaaacatggcggtgacgaggaggcggcggaggtcggcgcggtcggcgaggtggccaccgggctcgccgaggcggtgcgggccggaggcggccgcgcgactggaggcggcggcgtgggaagctggcgccgcggcttccatttggaggcgacgacgaagaagacaaggaggagcgtggtgggacccatggatggccagtgaatggcaagtggagtaggctggccaagtttggctagtgagggaagaaatttggccatccggatggcttggagagtgggatggagaggctgttggagtgggatttttgttcaaaatggctaaattttggcttggagagtgggatagagaagctgttggagatgctctaagatctgtagagtttgagggataaacaagttatcaaacctgcatgctaacaccccaaaactttactttctcacctgctgaacacgccttttctgtctcaccatcgcatatccagatatcatctgctttgcacatcagttaaatgtaatataagctcgaagggtatatatagttactttgtgagctaaaagttttagggcaatgcaactgattctgaagatcaaaccggacattctaagatagacaaaaagcccaccagccattctaaaagataaacagaagacgaacacattatgcttgtaacagaacaatattcttatgtctgtctaataaacaaaaggtgaatacactatgctcgaaacagccaattctcactgaagatgagcacattattcttgtaacagagcaatcttctcagacttgcctaatgtgacgtttcctcggtggagaagttggagcgctgggcaagaacatgtagataccaaaggacaggaggaaagctgacatcgaccaatccttctagaatctggacaatctctcccatcgttggtcttgtgttctcatcatcttgtatgcaccagcaagccaccttgcaagccctctccacctcttctaagttagcatctgcacttagttctgaacctagcaagtcttgaatcttcccttcagggagtctcatcgccactagcactgggaagaatgtccctgcaccttgctcaccttgccgatgccaatctgcatttctgtttcctgatatgatctcgaaaagcatcatcccatagctgaaaacatctgcctttgtggtgatagctgtgccgcttatccattctggggcaagataccctatagtgcctctcatggttgtcaaaactctgctgaaatcccttccgaggagcttggcaagtccaaaatccgcgatctttggcatgaaatcagcacctaggagtacattctctggctttatatcacagtgtatgatgaggctcctgcatttctcatgcaagtaagctaatcccttggcaattccaagagcaatctgatatcttgtcttccagctcaaagtcaatggagtgcttccaaataggtaacgatccaacgacccatttggcatgaactcatagactagcatcttcatggacctctctgagcaaaatcccagcaaccggattaaattcacatgctgaattgtgccaattgtgctgacttcagctcggaactgcttttctccctgagaaacaccatcaagtttctttacagcaattagtgtcccatcaggtaacgttcccttaaatacaggaccaaaagaacctttgcccaacctctcagagaagttttttgtcacatgctgtaggaacctatacctgaatacgaccaacgaaccctccactttgttcgcttcactcaaattcctcttcctgagaatcagaagtatgccaatgatcacaatgagggtgacaaggatagctccagcagttgaagccccaataacagttgccttcctcgttagctggagaactctgatgcagcgagccggatatggatgctatgccccactgaaccatcagcaggagccactagattgattaaatctccataccacaaagaacaaccaccagcgtaggaataagcggtacaagagcaattgttcagacaagcctgcttacatccatctgtaccagttgccaaaccccaggctttgtcaggcaacttagcaacagctagtgcatagaattcatcagctgttgtcttgctagagctattgccatcatattgtagcttagtgtttctcatgcaacctccactgggattaccatatcgccactcgccgttgtactgcttgctgaaacccctgagacaactgcagaaagtgacggcgttctcagtgcacatggcaaaagaaccacaaaggaagtacacggcgcactgtgcttttggcagtgccaagaagggcacccagtcttttttgctctccatccatactactgtttttacctggcctgaaatttccataataaacatcgctgtggcaatggatgcattagttcggtacacaaagtagctctcttggttgttaacggtaaatttgtagcttaaaacttctttaggatacaatgccatctcaggaattccagtaaacatattaccaatccatttgcccgtttcccagtagatggcagaattgttccatagatggatgaactggtcgccaccattcgggtcaatctcaagcgtataatacccaggtgatggatcaacagagcttttccatgagataaatcttgtgatttggccagtaattttgttccgtccaagcttggccccagggagccacacattggtcggttcatcaaaactctgccataggaaattggaggtattggaggcaggagctaacactaagttgcctgaatcaaggataactccaactgtggagttgacgttattagtgatatttgtggcccagatcaaagacctggcctggtcgaacaatgccaaattgccatcttctgatgctgtcaactgtgataagtttggatcagagattggagtcgcccgatttgctatccagacgggtgtggtctttgagatcttgttgtaccaaatagcaaggtaccatctgttaggcgctctatcatctgaattgttaaccactgagattataatagttttcaagaatgcactagacaaagacttctagagcttagagactagtatgtgtatctagaaagaaataacgaagataggtcttgcttcacatcttcaacaaatgctaactgctgcatgattcatttgttgtacatggaaatatcttcttctacaaattataatattttctctcttatatttccatctttcatataagttaaaatttaaagcttgtgggaaagtaacaaaaagaaggaaaagaattatgccatgaaacgagcatatttcggaagccttccttgtggatttcaagaactcacctatttctttctcacaaaaatatgcctactagggcactagccagatattcacctccaacctgaaagtatcaagtaaaataaaaggaaacatgtggcgtggcttgtagtttctttttttcccctaattatagccccccaaggctatagttttatactattctttttctattatatcaatataaaatatttccttcatcccataatataagggattttgaagggatgtaatacaacatagtactacaaatctagacatagggttttgaagggatgtaacacaatatcgtaatactagatagtgtcacatccctccaaaatcatttatattttgggacggagggagtattgtactatcttggggtgcaataagctttgcacataacatgttcaaaacatcaatttggtttgtaattactattgcaatacaaggatggcacactgtaaaactataaaattgccatgaacagtacttttgaaaaaaaaaacatattaatcgtgttaagtctgtaaaacattatacaagatatatgctaacgacagaatggaatatcatccttacgatatcccatcttgtatcccctataaaacattaccccatgaaatcttgtacggaacttgcataaaacattttttcgatagtagaagtcaatctagcctctacatccaggatatataggcatatagccaaaacatgcatagaaattgattgaactatttaaattaagactcactgaaacatgcatacgcctaacaaaactatatgtacctcgttttattttttgttttggtttttgatcaaaccatattgtccttactgcaattatacatataaaatttaggtatttccggggaaaaaaggtttcttgaaggactggaagaagcatagaactatgacgaaacatgcagaaatgtgggtgaaagctttctgaaaccttttgtacttaatgaaacccgatgagaattggaatataaagcagaggcaagataaactaatagctgaagtttacaatatgtctctaatctctatatcacttgttacttgctacagtagttgctataaaaaatacaaacgaaataggctgaagtttttgaagtggatgatagggctgaattattagctcatgtatatccacgtaccaggctggaagaaccccagcgcgaaaagtccgccggacgagataagcctttggccgccggagagcggccgattccgggagacggtgtcgtctgcccgcgcgcatatcagcagaagaaaacacggaaatatcaacgcgcccaaggaggcctccattagtgattggcttcttttgctgggaggaaagcaattatatagttcagccttgactggtgctactgtgccagaatagtaaaaggcgagactacggtggtgtttggaatggatagatggcacatcggacgttacgacactaattaaaagtgttaaacagagattaatgataaaaaccatttcataactctagactaattcacgaggattagtctatgtgatgctacagtaaacatgtgctaattatagattaattaggcttaaaaaatttctcacgaattagctctcatttatacaattagttttattagtctatatttaatactctaattagcgcatatgacaaggactaaaattagtctcctcatatccgaacaccacctacaaaagagtattccctgtttggttgctcgtgtagttattgactttgaggttttttttaagataccctagatatatatataggccgtccatttagtttgatccaacgcgtcagaattcgtcatacgcggacttccgttgctcataatccacgcacttcttggcttaattatctcttgattattgtttcatatttggagagaagatatccaaattattgcaccggcagatagctatgaacagcatcttcgtttttttttttcttttccttcttctctattcgattgaacaggattttgcaaaagcacgtacaatctatgatcagtaattaatcctcaaattaaacaagaaggttgcatgcatgcctgttcattctttcatgcttgcatgcaaacccgggctctaataaggactttttatgctgcaagctaggtttttttttctttttttgagaacaagctaggctgttactgttgttaatttgagagagatggcggctggcggcgacagtggcagcgctcgttaagttgggggccatgcgagatggaaagagagatcctcacggaattattagatttaataaattaattaattattactttaaccaaagatctaaaatatctatataaatcaatggtacttcctccgtttcacaatgtaattcattctaacatttctcatattcatattgattttaatgatatatatatatagattcattaacatcactataaatatggaaaattctaaaatgacttacactgtgaaataggtggagtatgatttaacactattaccattattagtaaaagtgtgctgtaaaaagcgtccggactccggagtttggagttcctctgctctgtacctctggaaaaactcggtaatacaaaaatagaatcattcgacaaaatttcaaatgggaatacgaatattcttattcaacgcagaaaaaatatatatcaaggagataaaaaaagcttaactaaattaattaaaccagaatttattgcagctgttgtttcttcttttggatcattgtgtttcctacgaggtgggtcgccgccgacagagacttctagtgtcgtacatgtacatttgttagtggcggtcagttctcagttttcaccgtagcgggccgggcaccttttgtcaactccggcaactggttgtttggtgactatcacagattcagaggctcgcagccatgattctctcaaccatgacggcatgacgaactctcgcttccggatcatccaaagaaaaactctagggggcatgtactatcccctagcagcagattgatagcttgacaaagaaccaacggtgcaacgattcattaattaacatgttattattattttctacgtatatctttatctctacttattataaaacttaaagatgattctgtactcatccttatttccgtccatagtccgactttagagctgggatgtcgtgcgtgaacgggtcacgcgatggagggagtatatacgactgaaataaatttaaacggtataatttttatattatggaatgaagggagtatatccgactgaagtgcagaagtattctctccttaaggggttgtttagtttaaaaaaaaaacttttcccaaaaagcatcacatcgaatctttagatatatatgcatggaacattaaaatatagattaaaaaaactaattgtacaattagggaggaaatcgcgagacaaatcttttgagactaattagtccatgatttagccataagtgctacagtaacccacatgtgctaatgacggattaattaaactcaaaagattcgtctcgcggttttcatgcgagttatgaaattaattttttcattcgtgtctgaaaaccccttccgacatctggccaaacgtccgatgtgacacccaaaaattttcatttcaccaactaaacaggccctaagccgcctccaagaaaataaagggcttcttgattaccccgagaaaccgaaaaatagaaccaaggccctctttgtttaggcttataagccaacttataagctgaaaagtctaaacctaaacaaacaagcagatttttcgtttggcttttttgaagccataagccattctaacactattaagccaaaagttaggttagagaagcttttttttttacttatatgagatagatgtatgactctaacactagacttaggttattaaatccactggcttataaattattatgccaatatgctgacttaaaagtgtaagccaataagcataagcctaaacaaagaaggcgtaagcccgaagtactgtgcactgtgacttacgtatagcttctgggatatttaagagaaaagaaattctccctccgtcctatttttagtacagtcgtgggtttctgtaccaaacgtttaaccgtctgtcttatttaaagaaattataaaaaaaatcaaaaacttgattcatgcatgagtaatattcatattttatcatctaataacaatataaatagtaattataaaataatttaaataagacggacaaacattaaacactaaaacccacaactgcaattaaattggaacataggtattattcaggcagttctgacgtcaatgtaccgcaccgctcagtttatgtacactgaacatgcggagaattggctagggcctgtgctgctgctgatgccgcgcgaggttaccgtggccgcacggtcgtggtgacgagcaggaggccggagctgacatggtgagcgcgagcagctgcatcctcaccggtggcgggggcaccaaccgctggtctcactggtagtcgtcgtcatcatcgccgtaagatcgagctcaacggagagagaggataaagggtgtgtttagttcacggtaaaattggaagtttggttgaaattggaacgatgtgatagaaaaattgaaagtttatgtgtgtaggaaagttttgatgtgatggaaaagttggaagtttgaagaaaaagtttggaactaaacaaggccaaagaatagccgtgttcgggaggtgaggttggaactcacctcccgcgcacataaaaaggagtgacatattttattatgattaattagatacttattaatatttttagaaaatagattaatattatttttaacgtaactttcatatagaaaccttttgtaaaaaataacaccatttagttgtttgaaaagcgtgcgccggaagacgagatatgtgagttgggaaaggtggggaagagagaagagtgaaggaggaatattatatagtcgtcactataagtgagctcttacatagtactccagttcctttttcctaaaataagtttattcttacctatttcacacgtattactatgaaatcaaaaaaactataatacctctgttttaccaaacctcaatgtagttattttctattttatctacttgcagagtatttattttctaatttcacaaattccgataaagtgattacttaaaaaaatatatttgagtgtaggtccttcctatttttaattgttttctttatttttgaaactaaaatgccttgtaagtgttccatcacctaaaagaccacgtcaaactgccacaagtgatccaaatcgcactgatattattagttgaggatgagatgctctgtatccgtaaaatgatgtgaatgaaactcaattgaagggatgtgtagtgaatcttatccctttactttatattctattaatcctaaaataagtttagctttcatctatcctacacataccgatacaaattcaaaaagactagaatatccctattttatcaactcccgatataatgatttctcattttcatttacacttgatataattattctctattttcataaactctgatgtgatgattacttaaaaataaacttattcggaatatataggagtaggggtgaaaacggtcacggaaattaccgatcgatcgggcgccgtttccgtttaaggggtaccgtttccgaccataccgtttttggctatttttaaattttgttttttctaatttctctctgcatcgtattaatgtcgatactgagtagtttaaatgataaatatagtcaattaccggctgatcgagcatcgtttctgaagagatgctaccgatttctaccatttccgatcgtttccacccctataggaggagctaaaatgaacttattataggacggagagagaggtaacttgatgttgattttttcaagatttttattgtcctaaccaaaataaatcacgagagtagttttattgtcctgtttggaacaggggaatttaatccccccggcgaggccacggtaaacctcgcccgtcctttagctaactgcactcaattaacctagtagcaaacgatcccattgtaccgcaactgcacgaacaatttaatcctgccatacctagtactgtagtattgtggtctgtgggtatcacacgatacgcctcccatctccgatgaatcccccgttgatgtacctatactcgcttcctgtgtccgtgaggatgaggattgaggtcaaggtgagagcgcagattacacaacgggcaaagactcgcttcctcaatggctccggcctccggctcccaggaagcagccatcagctgtcatatcagtgctacacctgctacagtatactactactcctccagtgggcagagtgacagaggagcagtgggctagggagtagggagacctccactagcaatgcagcaatggccctatttagttctaaagtttttttttttctaaacttctacatttccattacatcaaatcttatacacacaacttttctattatatcgtaccaaacatactaaatgtactgtagagggttcctggtacagttgttgagtcatcgcctcctctcccaaaccaggaaacctccggtgcctccatggtcaaagctccaactttagctttgtttaccctcgcgtcctatactgtccaccgtaccaatcccgagggttgaaaatcacaccggcctctgtccctctccttgcctaacttcattctccatccttatcatcgtcgtctacgtggttcttccttcttcattctactccaatctctacccaacagggtgtcccgagcaatccatgtttttcatggcattttacgcctttacctgtgcaaaattgtgctagcaatcgacgtcagctgccttgcaatcacaatttgatcgtcaattcgtcattgtggggacaaaagctctgtcctattgtactttccctgcttatcctattctcaagactatcaaggtattcaaggtctcaaggaggcagcttggaggcatttgggccttgagacacgggtaggtagaactcagcatgcatgcgcatgcctttgaaattccaagggggatcactttagtttaagcctttgctgagaacgatatttggtaggagtatctggtagagtactatagtttcagactttcagtccacttcaagacaccatgcagaattagctaccggtgagaagcaactattctaatcgaagtcagcagtgatccaccaactaattgagtttagtcactcgatgctcacctggaattcacctaaattcttgcccggttcattggttgttgccatgtttcgtgtgtggtgtccacagattaacgagcagtcaacctggcgacacggtactcacaaatcacaatctgtagcattcgctcactactcatcactgacttaatatattactcgtcactgacgacgttactgtaataaaattatactagcatgcttacataatatttaagatataataattattaatggatgataatgtgatatttttacatactaagctttagaatttatactacggagtatgttgtaacttattaaagtaaagtaggataaacatatgaaaaaaaaaaccactttctgcagaaggggacagcaatacagcacgagtgcgcgatacaggaaaaaaaacagcctattcagattcaacactccaactaaaacagtgggtccgattagtcaaatcaattatgcgaggcaaatgaactatctggagctcaaagattttacggttattcccattcgtagcccggggcactaggcattttcacgaattaaatatgaaaacatattgtccattcaattttttttaaaaaaatattcgggatgcaaaatcttttgcacaaatatactatcggtctcacacaaccattgcatgaaaataacgtgaaaatgacgtcgtgacttgtatcacacagtgaaagtcgctcaagcaaacagcgataccgcaagcaatcaacgctatcgctcaagcaaatagcgataccgtgccttgccgatttaattagcggttaattatcctagttagcgattaatcactaatcagaataattaatcactaattattattagttaattgttaattaagtaattaattactaatcaaatggatctcattggtcagtgtcgctgattgcttctgcgagaccgaccgaatggtctcgctcttccattccgcgagatcgtgcgcgagaccgtgcggtctcgcgctttcgccacgcgataccgcccgcaacgtcatcgtcatatcattttcgcgtaacagaagtgcgacaccgatggtatatttctgcacaagtttttgcatcccgaatatttttgagaaaaaattgagtgaacagtataattttaaatttaattcctagtcactgcatgttcatgagttcatcccatgacattaggcaacatatatatatatatgctcacgacaaaatcgatccgttaataccttccatgggatgtccgtttatatacatcgtcgaaatgcctggaaagtcctataagatatcactaaacttagcacttcgactcataatatattattccctccagtcataaatattttatgttattgcaatatctatacaacttcaaaagactggtgacagtaaatctaacatcccatcctccattgtgcggctttacagttttttcaaattggtcatactattctctaatatttagagaatgtctcactatttgattcaaacaagttaaatgaatatcatataattaaataaacaaacacgtgattaaacattttacaaaaactaaatattttttgggcatttagctattcaatctgtctcaaatataacatgtagattttaaatttggtcctaaatataccaagctagtactcataaaaggtgagttttaccactataaactacccatattcatccactactccttccgcctataatataagggattttgacattttgcttgcactgtttgaccactcatcttatttaaaaaaatttgaaattattatttattttatttgtgacctactttattatccaaagtattttaagcacaacttttggattttatatttgcacaatttttttaaataagataagtggtcaaacagtgcaaacaaaatatcaaacttccttgtattatgggccagagggagtatcatttagctttattatagccccagctagtccaagcatgcacctcatacactccgagggaataaccaagttttttttacctctctccttaataattgtgtcaaaggctaaaacttactatattttagaatggagggagtagtatttagtaaaaaaaattattatcggtctcatctcccaagtggatacccccaagcttctacggtccgcttattgaggaatagatataggatggatgttcaataaggacaggtcatcgcaaagaaaaactaatactgcctccctcccaaaataattgtaattctaggttatttagcctccctcataaggtttgaaaagaaagactatgatgtccctcattaaatggtgtataagtaagagtggaagagtggttgagggtagaatagaaagaaatttgaatgagaagtaattgatgggacaactagtactctattgtgataactattttgggataaatttgaattgtagaaatacaattattatggtagaaagagataagtgagcctacgagtctacgactaccaattccatcggacttatcaaatactcggtttaaaaagaattatgtgcatatatttgcctcaaaaagtagcataatagcaaaatttactagatttcataaacttattattgaaaaatataatagtatgttttatataatgtcacaactatattaaaaaaatatgtgaaattaaatgggaaatggttatgattggttgagacgagagaataagtgaagaaattgaacatgcgatgattgcgattgcttgaaaggatgaagtagatgtaaaaattgatatataaaaattggcgaccctaaattcaaaagtttactgaaggagtaataattacgaatttaaatatacaagttattgacttttggtcatgatgttactattcatctttttttaaaaaaatgagtacaagttatttattttgttgtggtttgttttatagttaaaggtacttcatgcctgaactattttttcccatattaatgaaaaacattatatccaaaatttaagtcacttggcaaccatcaggccatggcgccaagcacgccatcctatatcctaccacctccattttggtttcaagaaaaccaccttcattttgaaacataaatatttcttgactattactttttgatcttaaaatgaacaaatatattactgtttacgacagactaaacctattcggttgtatagcaaaagaattttcataggtgtattttgggatgaaggtatagctagctgtgagcaactgactgaacatttatcaaatggaattgtacataagttgaaaaaaaaaaagaatggtagagccacatttctcctgcacgactgcctggcccatgccctctctgctataatctgcaccctgtcttccatttcctcatcaaaaaaacacaacaaaacagaacagaagcagaccaggtagcagacaaagccaagagtttctcacactcctcccatcgcttctcttctcttctcttctctcctctcctgtctgctcagtttggtgggttctgctcaccagtctccccccgcagtacaaaacctccattcctcgccgcctcctcttccactcggaaacgggtagtagaaaagaacacaccgcggtcacacacactctcttcagcaacaaacgatgaggaccatcatggcgaggagccctcacgagtcatccttctccttctccaggaggcacttcaagtggccagttcttggcaagagcagcagccatggcgccagcaatgcaggggaggacgacttcatcaaggcagaggacgacgaggaggccaccatggccttctcctccacctgcccgtcgttccactccgaggacttcgtgtcccctccgccctgcaagccgctcaagcagcagcagcagcagcagccgcagcagcagcgcaggaagggacgcacggccgtgtcccgcctgcgcacggcgctggccgcggccctcgccggccggcaccgccaggtcgggctcggcgcccggctcaccggcacgctctacgggcaccgccgcggccacgtccacctcgcgttccaggtggacccgcgcgcgtgccccgcgctgctcctggagctggccgcgcccacggcgtcgctggtgcgcgagatggcctcgggcctcgtgcgcatcgcgctcgagtgcgagcgcgccaagggcggcggcgcctgcgcgttccccaccgccgccgcggccccctcctcctcctcctcctcctcctcctcctccagcgccggcggcaggaagctggtggaggagacggtgtggcgcgcgtactgcaacggcaggagctgcgggtacgcggtgcggcgcgagtgcggcgccgcggactggcgcgtgctgcgcgcgctggagcccgtgtccatgggcgcgggtgtcataccggcggcgtgcggcggcggggagggcgacgtcatgtacatgcgcgcgcggttcgagcgcgtcgttggctcccgcgactccgaggcgttctacatgatgaacccggactgcggcggcagcggcagcaacaacaatggcggcccggagctcagcgtctacctccttagagtttgatcactcgagcgtctcccattctcacgttttcttgtatcgtgtcagttcttgcatgctttgttgtttcctgttgtaggctagtagtactttagtaggtagtgtgacggtatgagtggttctggaataatatgcatatggaaactgggattgaaatggaattattttttctttcttttatgtttttttgggcactttgtttggtgcctaggagttattggactgaggtgttcgatcatgtgagtttagtgtcactgacgtatgggtctatagcaaagaggattcacatatcagtaactgaaagtcgtataatttaagtcgaacgagcttaatctaaagatatcactcctatatacagagaaagtatggtaagttctttagtaaacagtactcaagaaggtctaggacgtcattttctaatccagtgatgggtgatctcaattggtattgtactagcgaaagatgattaagatcttttaacttaagttatgtgattttgagttactaacatataagttatgtgattttgagttactaacatataggttctttttgctacaaacctagagtcagtgaacctagagtcaggtgacttagaggcagatggtccttctcctccaggctccagtgaaagaagggagatccagatatcaggaaggagcagggatgaccggtgaacagtgttgtattatccagaaagattatgtgatagtaatgattattatcgaactgcatcaattgtctttgttctcatgcatttgtctctgccataatgtgggaccgacagaatgccggactgccggagtacatctgttttccgaagttgtttttctaatcactttatttatttattatgtaaatcactttatttattcgtaagcttaattttcctgtattttactgtcaaaattgggggtataaatatgaaacccgtggagtgttaaaacaagatagagcaaggaaagactagattcataaagaaacacttagctatatgttccattttaaatgagtgcaccaaacagctcaattacacccagtcaatgaaaaattatgtttatgaatctgaatatgggtctgtctatataggtatatacctagtaaatattgagagctactatacatacgatatgtcacatacgaagctagtacgatgttgtccagctgtttcctagcgatgcaacaagtaaggttcaccatccgttagtaatcgtacgagaatcgtacataacaatcgtaatcgtacgagaatcgtgcataacaatcgtatgcacagctagcattttcacaacttaagtttgtttaatttgtgttttgttgagttgtgatcagtgaccgcttgagattgcggcgcaggtagctagccaatggccgcgaatgcccaatgctaatgtacaagttaatgaatagaacttttataataaaatcatagtacatattattttttttctattttgttgatttttaacatgacatttaataattcatgttattacaaatttagtgcaaatatgaaggaatataggtcatgttcaaaatatctttaataattaataaaaacacatcacaataaaacaaatggttattagtatttattgtatttttaaataatatgagtggttaagtgtcatgtgtaaaagttaacaatgttatatatttaaaaatatattgtaatcatctaagtttggtatcttctttattttgtgatagtagctagtcaaattggtccacattgtttagtggtatgttttgatcataatactcagggttaagaggaagcaccggtaacgatggactcatgcagtcatgcttacactggtggagaaatgctttttagtcccggttcgtaacccccctgtagtcccggtttttcaaccgggactacgaatccgggactaaagatcgctatctttagtcccggttcaaataaccgggactaaaaatcaatctttagtcccgg

SEQ ID NO: 5650 - DNA, 86458 bp, Oryza sativa
  unsure (1)..(86458): unsure at all n locations
ttagtcccggttggtagggactaaagatcttcctcttattaaccgggactaaaaatcatttttagtcccggtttttaatggaaccgggactattgtggatatggatcgaccgaccaaagatggtttctctaccagtgttacatgactccatatacttaggatatatatttgaaatatattaataccgaaaatttgacacccaaaaaaaaaactagtataatacacccccaactatcgatgttggacacttaaccatctttgagttgttttgctatggttttttacacgtgggatgccacgttagcccttcgcaacattgaatgaaatataataatacattaatagtttaatacagcgtgtaggcctgccttctctctcacaccgtcacatgcattctctctctctctctccctgtttatggttctgtaaagtggacaaggagatgacacacggcaatgacggtagggttctcgccgccggcataggtggtgcctgagaccggcgcagctgaaaggaggcctccctgttctaccaacttacctaagctcttacgcatgttaggtatttccatgttgattattcacactatgaaatccatcttgccacctttctaccacactcgcatataacagctagagaataatcaaatgtcccctctctgtatcgaattggaggtggcttgcttctaccttgtctggagaactacgatgcagatcgtaaagtccttcccgtgctgccatttccaaagctggtcatgtccctcgatctacttgttccgtcgttcacggattccacctacttgcccttgtttcctccctgtgtggagattcttgttatgtgctcagccctctctattagcgaccgcatacagctgcttcggttggcgaccgtgcgcaacgtcttggatctgctccttccccatgacacctcctccgccgactaccgccacaacctgttggagatgctccttccccgccgccgtgcaccgtttccagtaggcctcctgctatcccctacgttcatagcgctgatgccttcgaagctccacgccgccgttatcgctgcttgtgaaaaagctaggtcaaaacgaaccaaccaagcaatatgggcttggcctatattttcctatgcgctaacgtgatgaagggtgacgcagcatcccacgtgtacaaaaaccacggtaaaacaactcgagtagaaataagtattcaacattgaaagttgagaggtgtattatgcctgggtttgtagttggggagtgtatttttgacaaatataagaatttaggggtgcaaaatgtactttgctcacattctataactacaaaatctatgggttgttcagatcgatgtcatctcaaaccataccatcctttggtaaagttaccaaaattgtgcatccatttagttcctttttttgacaatttagtccttttagaaaacttattttgaaactaaccctcgccaaaaactttaacaaaaaataggccgtgggctcagcgctagtgcctttggcgttgaacccttgcccacatggatccacagatggcgtggggtcagcgccaatgcatttggcgttgactcccgtatacctgttaagtacgtgaagtatattttgatatcatgtagtgcagtggtgaagcccatcccttgacttggtgacctgggttcgaaccttgagcttgcacctttttttttcacttttctatgggtaacagagaaaaaccaaaaaaagcggttaaaccgctgcactatgaagaaatcatgacaaagaatagcacaatgtctaattattacgtacatggggttagcgccaaacacttaagcgctgacccatgccacgtccacaaccaactatgctagcgtggcaaattttagtgctgtactatttggtgctgagacgttggaccttagcaccaacaggattggtgttgagtccacggtctatttttagttgaagtttttggcgagggttagttttgaaataagttttttaaaaggaccaaattattaaaaaaaggcatttagtttcttaccaaactcttgtaaacacataagaaatccagccaaaacttagcaatattgttaaatttggtcaggtttatttggctacaatccgaacaaggctgaatatctggtgagaaatctggaagctgcgtggctagaaccagggtttacgattccgacgaaatccgatcggatttcgcgaaattttgacatttcgacgagactcgaaagtagaaaccatctgagatttcgaggaatttcatccaaatttaaatttgaattgataaaaaaatcttataaatactatgatattcatagaacctattgagatataaattttcgaaaaaaaaatgatgtattgtgtgtatttactaaaagctacatcaggaaagaaaagaataaagaattaaaaaaaagaaacaaattaccgatcggaatttcgatgatttcgatcggaatttcgccaaaaccgaccggttttcgagaacttgtcagcaaactcaaggatttgtattcaaattttattcaaattttggtttataaaatttgttcgaaatttaccggttttccaccggatttcgtgaaattccgaatttcgccggtgcccgaaacggaaggtcatgtcagaatcctaaaccctggctagaactagaggccccttaaaccattgatgcaatacctgtagtgcatattggagcatggaacagtcggaaggggtgtgacttgtgagaggtgaccggggtcgtcgtctccgaaggatcctgcttctctgctctggtaagacccgatgggtcgaatcatggcgcatggaaggacagctctctttaaaacctgattggtactccgtactctggtgtgacctgcttgtgcttggagagatatctttttcctcggcctcctcccctttctgcctctcgcaaggtgattgatgtcttcatgaatgtcagatggtggattcggcacaagcgactccacagatatggattcccttctcgtttaccgggccggtacttcgtgctgtatatcatcagatcctcactgtttacctcttctctccacgtacgttggcttatccttctcttttcactgtaatcacgttttgttccgacgggtcatgcaaagcagttttacacaacaaagcaagacgcttgatttcagaatgcatctcaattctcaagctcccatctactgctcccagaatcgttgcagttgcagagctgccgctaaactcaacttctgaactcatatggttcaaaacagcaacactcactaacagtttggaacttctgacagtatatacagtggttttctattcttctctgtcagtctaacagggcgcagtgcctacttcttcctcgcgtggattcgtgctaaagctagtaagctcttggtcttttcggctaggtaagacaaggcgacattccctgcagcttatacccactaaaagcgattaagcctctattaactaagcacgcaagtgatgatggcctcatgctatcattcgatgggggctcgcccaggacagcatgcggcgcctacccatgaactcctgcccggctcggctcgacagactgcatctcaatccattcaatcagcacaaagctgagaggaatattatcagataggacagagctaattagcgccttttcaacggaaaagctcgggggggcttgttcgcacgaaacagcagcagtaatcatgtaaagagcaccacgccaactctagtattagcactgcgtggctcacacgtgctgaatgtacgagagtctgaattgaattgtgcgccgatgaacctggtgctctgattacaggccgggcaacgaattggaaagggagaaacgatgtaggcaaagctcattgcaagctttatacggtgttcacgagttgatccccacctcaatgcactcgaatcattggcacattgggcctgaacctactcgtcaatggcatgagaagaaaaaaagggtattgcataatagtatctgatctgaaagatgctacaactttgaatcatgaaatggtccagtaccaatgctttacgatcaaaatttgacatttttttagcagaaagtgattaattcatatttgacacgagcattatatcaattaaatgcaatcactcaccatcttttctagataattcaagttggcgaattcagacaaaaatcaacacatacatgaaagacaaataaattgatgcatcgtgcttacaacatcaagtgaagtgccgactaggcaagtaggacccagcacctaccgatcgaccaccaccaatatcaagatgttacttgcccttgctttctcttgataaatcagcagctgcatgagcagccgcgctagcactagtattgctagatgcacatgcactagcctgagcttccagatccaaaatccatgatagcacttgactacttgtagtaagaaaataagaaaagaaaataagaaaaaaaattacagatcaagcatgggaacttggaaagccaagccagaagaggagatttggctcacaggggaacgaagagaagtatactcgtgcttccgtggtgccaccggcggcggcagcagcggaggcggcggccaaacggcctccgcctggcgttggcgcatgcaatcttccgctgcgcatagctgcgatgctgttgctttcgcgtgtggcgatgacgacggcaccgggaccgtgcttttactcctgatgactgtagtaaaaatttctacggcagccatggagtggagctgtgctgtctgtcacttgcttttttgggggacggagatgcagaaattgatggacccgtcatgattatagtattattattgcagtcacttgtgtcctgtgagtcgagccgtcgagcggcacgattgatgtgatggccaatgtacacatgactactcctgctcgcctctctttcggtcttttgttcgtcgggccggagaggagaggagaaaagatacgagatctactcttctgtgtactctagtattcaatccgcgtcaaaataaactaattttaagaatatagagtactatattttagtattaaaaatctagatatatgtatatctaacatatccccaaatttataatagaagtttattttattttgggatggatgaagtactccttaatgacgcgaggcacaagcatcgtgtgaggttttatcgccgtaagagcaagttcaatagtatagccaactactagctccaattcatctatagccaatctaatagcttatttatacaatagttacatactacactattaatacctggtcccatctgacatacacacactgcgtcttggagtccgtgctatagctggctacaaatctgtagcccgctgctcttctctctcctcatttaattccttaaaatgtatttgcagctggcttatagcctggtattgaacctgctctaacaaggaaaagatatgggggcactaatccatttcctcgctggattttcgggaataacccagatccgacaaatggcactctgctcagcagatggatgggtggtgtaagtttttgtgtaatggtatagttatatcgtacgcactgctgcagtgctactgttcatacgatgaaaaaacagctcggtagcacagccacaaatgatgctcttagttgtaggctaacctatacccgtggccggacgaaaccgagcagcaatgcggagtaacgtcgggcaacggcccacaaactactatcgtcgcagaggcatacgagccgaaatattggggaggcgctgtattcacgtaaggaaaaagtacaccaaaggtccccagcttgtcatcgagttccaaaatcgtaaaacctgatacaacacatctccaaacttagaaaaaccagtacaaactatgtccctcgacggttttgactttgattttgtccgacgcggcagccaactcagcgtgggccccacacgtcagcctcttcttcccctccccctctccacctctcttactctctcctctcctcttctctccacaggcagccggcgggggagtggctctgcgtgggcgcggccggccagcggcaaagcagctccttcccccgcccccgcgcccaactgctccttgcccctcgcgcgccgctccttcctcgccgcccagcccagctgctccccgccgcccgccgctcgcatgcatctaaggcgttctacacgccaagaacacccacgtcgcccgctaccgccatgcagctcctctcccggccgcccacgcctagttgctctctgccgagtgccacccatggagaggggaggagagaggaagagaggtggagaggggaggggaagaagaggcgcggcaggggaacacgggggctgggaagggccttttggtggcgacaacgatgcaggagcaggtgtcgttagcgaccacacgagccgctgcatgtgcagactcgccaacggcactccccgtcataactctgcctcggcctccaccttcctcgccgtcgcctgcaccgcttccccaacaaggtcaccatcgacgtcgccctatccctgccgccaccgtcgccgctggacgaggcaagagggtgaggtcggaggagcagcgcatcggccatcggacgatggcggctgcccacggcgaggtccccgtggaggcggtggtggccgattgtcacatcctgaaaattcaaaatatataaattgttgtttaaatggaatttctagaatttattttaaaagtcttgaaaagaaaatctaagtttaattaataaattccaatataaaaagtggccagataaaatttcattaaatactttgcttaattctataattcctagatttttctgggatttatttgagctaaggaagtatttttaataaatggaattgcatttaagaaataatttaaattgaaaaagttttaaaaagtcttcttttggctttgggccgaaagtcggcccaaaaccgccttctctctcttctcggcccagtccggcccagtccgcagccgcccgcgcgcgcgcgcgccctcgcagccgctgacaggtgggtcccacctgtcaggcccgtcgtcttcctcgggccgaaaccctagtttcgcgccgccgagccgccgccgctgtttcctttccaatccggccgttcctttccttctccggccgaatcaatagaggggaaatgatctccgggatctcctctaccttttctcctttggaatctttggctcaatcggtttggaatgagttggattcgagttcgtctcggattcgttcttcccgaaggtttccttcgccgttgccgtcgccgtgggccttcgccaccgcctccgagcccctttaaaaggatccccgtgctcttctcttctcgccgccaccctcgccttcgcctctcgtcgccggagtcgtcctagcgccgtgcgccctagcttcgctgtcgccgccgccgctccagccgtgcgccgccgtcgttccagccgtcgccgtcactcgggaaggccgccgtcgtcatcgccaagtcgccgccgtcctcgtccgccccttcgctgccgtcggagaccgccggagcatcgtcgccgtcgtcaagccgaaggtagccgccgcttcctcctcgtcgccgtcgccgtccgttggtcgtccgccgtcgccttggtcgtcggtgagttcgccgtgccgtccgctacccgttggtgtcctccgtttgcgtcctagtgccgccgttcgccggcgagtgtccgccgcccgagccgtcttctttgccgagccgccgccgccgtcggtgacgtcatcgctggcgtcatcaagcccctctcccgtgagccgccgtggactcgttcgatctcggccgtccgatttggatcggatcaatctcggccgtccgttcgcgtgaaccgtcgcccgtgcgcccggtccaccaaaccctagcccgctgacgcaataaatcctcttttccttttcaaaaataattcattattgcgtcataattcaatttaaaccgatttaagtgttttaatccgatttaatctttaaaaattcataactaattcatcttagctccgatttagttggttcaagtctctaaatttttctaaaattgagatctacacattaaaaatatccacatgtactgttcatgcttgtttttgtgctgttttggtgattttgcttctttttgcttagattccgtcgtttccggagagtccgtttttgcagaagaagagtttgaagagttccaaggccagcaaggcaagtcacacagatcccaaacaaccctttgagcatgttgatcctatttaaagctattgtttctattcaactattgcatctattttcgaatgtcattgggtggaattgacctattctttgttatggcccttttgtacattgattaccttattccttgataccttgggttatattaatttgactagttgagctttatttatattggttcaactagatattagatataattgcttagccctgcttagaaacattagtacacttatgggataactaatgattcactattatttcatgatggcttattgatagttcacgatggtcaatcgtgattagttaattaattaatgtgccaactaaaacctggtaatggtgggttgtgagcacatggttttgatggtcgtgctcatggcaattaaggaccggttcacgagtttcggttgtgaaacatttatcgtgccaaccacaagccagcatgggcaacggctttatcttttgtatagcatggttcattgcggggcaccagactgagaagtggcggagataagcccacgggggtcgctggggagtccatgccttgtttataagggggtgattatgatccaggaaggtgcgctgcagtgaattgtgttatgcgaggggtattgtcacaactcctttccgagataccgtggtggtattgaggcacatggtgacatgatgtggggttgtgtcttgtgggtacagtggtacacctctgatcagagtaaaactattcgaatagccgtgcccgcggttatgggcgggtctaacaatgtctttcgtgattagtctcacacctctcatcattataaaagatgctataactggtaataatttgattagctcctggtttggaatggtacattcctggtttggagatagaactgtgcagccggggtggttgttcagaatggttgggcctatacaacagggtatgttgtatagcgttggattaatattgcttaattattacttaactgttttatcaaattctcaaatgtttgctaaatgctgcttttgcaaatggaaccctattatgccatcctttgttatcctgtgcacttgcatatttgctgcgtggcttgctgagtatgtcatatactcaccttgcaatcattcatcagaggaagagttctacaatgaggctgatggtgtggaggattaggtgtagccttggtcaagctgcctgtggagtggagccgtctgcgccgtttatttaatttccgctgcttagaactttattgattgagaggaactatctacctttgtaatgacattctattcgcttatcaattagagtaatatttgtactctattatcaatttgttattgtgtgcctcggctgattcctggacgagggttcacacacatgtaagcgtttggaattttggatagaaattccgagcgtgacaccgatgcatggaggaagaggggcagagcccgtgccatctggctcacggaggatggctggcgccccggctggtgacgggcacaagcacctggctccagcggcaaggccctccagggcaccgatcggcgatgacgacgtccagtgcggcgtccaacggcgaagagcccctctgtctccacactcgcccacgctgtcgcctttggcttccgcttctgggttggtgccggcctcccctcccgcgtcgcagctgccgccgccgtcgcctctccgccaccacgctcgcctgccaatgccgccttgctctaccgccgccctccctttctcctgtgtctccgccgccgcgtccctgccgcagtatcgccggccggccgtcgacctcctcaccccggcgacctcctccccatcgtcggccgacctgcccagtgcagagagaagagtgagagagagagataggggagggggagggggaggaaaggagaggaagggagaggctggcctactgacatggcatcctgacatgtggagctcacgtgggtcccatgctaactcaatcgccacgtcggacaaaaccagggttaaaatcgccgagggatctagtttgaactggttttgtaagttgggggatgtattgtatcgggtttcacggttaggggacgattttgtaactcgattacaagttgagagaacttcggtgtactttttttccttcgcgtaatgaggaggtggcctgaccaggtgtggatgcggattggagggtccatcccgcgagctggtggaagtggaaccgtggaagtgagatagcaacggatgtacacctatcggaatcatgaaatagctatggtcatagccgttattttgcactaaaacttgaaacgggaattgtgctgttagaacttgtgtttttattttaaaaaagggtgccattctttacataattaaccttaacaataattcctcaaaacctgaggttttgtgaaattcactctaaatattacggagtactgtatgtaagaatttaattccaagatagaatcgactaacttgtgcgtgctctctaaatattacggagtatgcacgctctctttctaagtttgctcgcctttctcgttgcgtgcaagttttgcatcaacacgtagaacgacaatgagctaaactagcttgcctcggcagcttgcatataatttgaattagttttgtgctatcgaccaaaatcaccaacgtaaatcaccaatttcgactaacgcgtgaacggaatcgaatctcgacagtacgttccaagttcctagacaagctggagagtctccactttgtgttcatatggactctccactttagctgtgtttgttcatgctaaaatttaaagtttggttgtaattggaatatatgatgaaaaagttgtaagtttgtgtgtgtaggaaaattttgatatgatgaaaaaattgaaagtttgaagaaaaactttacatctaaacacggcctttgtgttcattggactcttgctcaaaacacgtaagacaaatcgaaccagaaagcaatttgttcgttttgtgtggacggcatctgaatctcacggaagttaattaggaatatataattcgatcagggagttgcatctagggtgaataaggatatattattattctgttcgatgttcgtgtgcgccaaaatttccgaagtggactggaaggctccaaatcaaaccctcaatgtgtaactacaattttattccgagtaattttcctcttttttttcccttcagatgtacaagaaatctgcgtatcattatagtcatctcataaacacccactaaagcaaagttaaaaacatgagaacttgtcaaagaaaaaaaggtactacgaccagcaacctgtacaaacatatattcaaggtcaaatactagtaaggcctttggtctaccattctttgagtacttttgatttcagctaacttcaatattatgatcaagtactacaaaactacaaagattttaacacatggcaaataagcgtattatggtcctaaggtttttacaaactacaccgtataatcaaatgtttttcttatcccaccatgcttatgatttatgaaattaatccaaaacatctacaatatgagagttttaatcatctaacttaagtgtttttatttttttttcaatagtagtagttaaattgattaatggtgtggttttgtgtaactcagtgctaaacatatgtggatttgtacaacgccgaactacgatactccccagtcccaaattataagacgccccctttttttttagaaaaatcaaactcggtatattttttactaatgattatactaaccatatatttatgttaagtattatgcatgttatattactagattcaaattttaaagtattttcacgtgatggtaatttcatattcattgaaaatacaaaatataataaattaatggttaaagtatatcattgaaaaaccatgtaaaaaattataggccttataatttgggacagagaaagtagattagtttttgtgaagttctactcatttctttcacttgatcataatcttatggcacgcaagctatatagataagaggttccaactcaagaaatctgaaaccacattatgcacacccagcttgttatacataggaataaaagcgacaccaattttgttacaactggcacagcccaccttaatcgtataagaaaatgggctgcagttgggcttgtcctgatgagctgcattggcgtggtttggccctgttgttcaccaggaaatactacatgcaggcatgaagcaaccactacgaaaaaacaagatcatctgccgcaaaacgcactcatactcgcatggttttctcatgtgttagcatccatattctccgaagtgtgcgtatctgactcgacgaataatggaactcaactatttccaatagcaaactcacgtccggtaactctgcaaacctagcaagcatccaattctgtaaaagctcccccgttgcatcgtgccatcacttgcctggacaagcaacaataatacaggggcgcctttattcctgcacatctaggatttgtactctgcacacttgagagagatcttgcatatctagcacgaaggcctataaataccttgttgccatccgtttccagttcatcatcaacaacacagctgcttaagagcttctgagccttatcccagggtcaggacagaacagagcagagaagcatcagaagaatggcttctctgaaggccgtgaaacctgccggacttgccaaggagccggctgccaagctcagtgagacggcgacgaagcccgcggccgccaagggcggcgtcaagaaggctgagcagaagccccgggagcccaagaagaaggtatagtactgcagctgatccaaatccaacttgatgttggtaatcttgctgttgttttcttggcagcgtctcttcttcgtgttgatttagtcatttggctattttcatgtgaaatcaggtgaagagcagcaagccggcggcagccaaaaactgatagtggcaacaggagagatggagatagtacgagggtctccatcttacgctatgctatgggattatgaatcccgtctgtcccttcctctcgtcaccccgtgatgtcttgatcatgtagcagcaaccttagtcaagctggtcttgacggtgtgtgcagcccatgtgatgaatattacaaataagatggtacagttgtgacatccgcttcatattttttcacttggtgttaattctgtttggattccatcactgagaaaaaaaaacactgaaggtttcgcctgaaaaaaaaaactcgagaaaataaacccatcatgtaagaaagagcaactatgaacaaacacgtatggggaaaaaatagtaaagatcaagcaaagcacaactggcctagctaacagcaaaactgaaaattcactacaaaaagaactacaaaataactggcagcatatatgcgagtacaaaagaaatgaactttgtgtaacttggaacagaacttaaggactgggcagttgctacaatataccgattgctgtcgggaacactgcaaaagtgtcttgctatatcaatctaagtacagcatgagcttctagattagctagatagtaatattatctgctttactaaaattacccatgattacaaggttctacagtagaatataagcatggttacaagccttgagtgatatactgatataatatacaacactatgtacaagaagagaaaaaagatgtggtttccaatcatgtagcttccacttctattcaataccatctacaagttccgcagagttctaaagtgccaaatgcccatgaaaggaggtttagcttgcctgatcccatctacaatggcttcgccaataatcctttcctcattaaggcagaaaatgcacatatgtactttgcattagttagatatttaatgtacaaattcctctgcaaaaatctgcatccaaacatttccaaataagtataaatttcattaatatgcaaataatccaatagttggcataaatacttcaacgaattaatggacaaacgagtagtgaacatagaaattgcaaactgttactaaaacagtttggactagcaaatagtgtattttaaatataatattcacaaacaaatgtagaaccaacctcaaatccctcaacaactaaattctcaaactgccattgcacatatggtggtcttttaaataagttcaccataatatcaccactcagatagggaaaaaaagcatctggcctgtttgattacacagaaggtggcacaaagacttttctaagcatatcgtggaaaatgatattccagttctaatggcctgtttgatttgaggaatgaggagatcgattgaccacttgacaatgggttgtttggtttaacgaatgaaattggaccatcatctcatccccaaaagtacatatttaggccctgtttggcacaacaccagatcttagatcctttctggatttagagtttgttagttaaacaatagtggtttgaaattttatatttcctataaaatacgaacaaaatgattcatccaaatgctaatataatcacagatccagacccatggattttctacccagctctaaaaattgatggatctggaactgtgtgagtaattgcaccaaacttgtaggataatcccatgatggataacccatcctagatggtctgattcctcaaaccaaacagccatagtcccacaggccacaggatcatagtttcagatttcaactctacatgcaagttcggtttctattttagataagtaataaataaccaatggtttacaagtcggttgtattgtcattgagaatagttctgtcttttaaaacaaaatatcttatcagagtcccttaacagaagatatacagcttagaaacaccaaaatactgacatttgaaacttaagcgccacttataccttataattttattagaataaatacaaaatcacaactacacaaaaaataatagtgattacctactagaatggactaaatcgacgggccagctgtaattgccactcaaacaccaggcgccttggagctggtgccagagcaatcttttcttgtgtaatttcatcatcaacatgaataatagacaatacatcttcaaccaatggatctcttccaccccgaagaggatcctatggaaagatgtaaagaaacaggttataatcaaaggaagtttaattgaacaactataagaactcataattaaatgatattatagtcccacagcaaaaaaaaaatctatatactttcaaaagactgtattataaaaaaaggtttaagacaaaaaaagatagcaacgtgcttttattatatatcaaaaaagaacgcggcagtataataactaagtatatcttttgcaagatcttaacatctaactcaaaccagattccaaatgattggtcaataccagttcctcgttagtgtgtgataatccaggacagctgggatacaccaacactggtagttcaaaatggtcagcaatcgactggaaactggtaacttcatcaaaatttccctgatgcttttttcattttaactattttaaaatctcctaacagtggtaacgtgagtacaaaacttaacactacttagcctaattcagttagaacttagaagtcagaaatcggtgagatacggcaaaaaagatcatgacccttgccataaaacattgcacgtaactttaactttacacatctaagtctgccgatactaatagagcttgagaccagaaaaaataaattcattatagccattccgcgtatattacctgtataaatatatctgtatgtgttttgccttcgtacaactgtaacttggcttgagcaccagcttgttgaaggacgtcagcaaaagtttgactgcatacaaaaaaacagagtaactggtatcatgaaaatggaaaacattatgccagttcaacaaggggtcaatcaacaaatgatccatccactacacagaacaatcttacagtacatggcaacaagaaccaatatagctgaaagcatgtttataatagaaaaacaagtagcacaacaccagtaatatttgtttctaacagtttaacttctgaactattnttgtactagtgttgaanntatgggaagacaaataatggttctccaataaacttggccattctatacaatcannattctcctatttacaagtannctttgaattaaattctacttgtccttttgaactccagnnatttaatttgaaaaatgcccaantataagaactttatggctccgnngttcttatcttagaanaaacttgcaaatgcttttcttcaattctctgctctgttatatccacatttaggcttgtaatagccaagatgtaaaaagacttcatattcatgatatgctcatttaagcttctaatagacaacactggaaaaggatggagagtataagggaagaattggggcattagagatgttaggcatgctacatcttggtttacgccttcatcaatccagctttttttcaacttagattggcattgcttcctaaattcaagtgaaactggacttagtaaataaaatttcctttagtaacacctgcatgtcatgccataaaaaaaatggagggtagataggtataggtgaagcgtgcatttgctcgagtttgtcttgtgtcatcttaaatggacatctgcagaaggcataagaagaaacctggcagatgatggtattgaataatcttcagttccatgcataagaacaatgggaggcagaagagctattgtctgggaacttgactgcttgacaacaatttccggagaataacgtgacaatgactcctctccttccattatgctgaaacagttattcaaaaattttccttaactgctgtttaaacaaaacaaaccactttccaagcatagacatattactacctgaaaaatattgaacgattaagaccacgttcatgaaaatggtcaaccaaactatgcatgttgtatctgctccccaaaaaaaaaatgttgttagtgcttccaaattccaatgtatgcttagtattctatcagaataatccgaaagagaaaagaaaacaattgaatattggaggctggtgcttattcgtaatatggtgataacaatcatcataattcatcttcaggagataacttttgaagtgtctatcaaactccacagcacattgagaaatgatttatttgtttgactaggagaaacaatttactccattagagatttatatgtaatcacattgaattgatggtcaactaaaatcagggtaaaaggaggttgatataataaatcataaatatgcacaatgaatcattgatagttttatttacaaatcctgaatgtcaaattgaaactgagttaagcagtttggtcgaaccactttcatattggcacacatggaagcaccagcaaatgaagagaatggaacaaagaataacttgggggagaattcatagggtttctatttacatgttagtaacaaatacaactaacccagatgatgtgaaatgatgaagactattaatttatttcttatttaagattagttcccatttggatgcactcccattgattcacgtgccaaaacaaataaatgcaattacttgtttgaagattggaagaaaataacatgcttccagtgtttgatcaaatatgccgaggacaatatcttccagagaaaacggccaatatgcccgaaaaacagaatatctgacatccaagtgtgaattttaaggatagcaaaaattaaataagaagttggcagactttttgttgcttgctgccaactcaatgcatataccagtgttgcagtaataggaatattcacgcaaaaaaaaagctaataaaaacgaactgcaagctcaccctccagataaaccaaaatatgctttgatttgtgtaacactccaagaaatggactgcccactagattctttcactgcctgctcgatgagggcacatgcagcaatatgtgctcctgctgactgacccaccaagtagatcctacaggtttaacataaatccataagtatgtcatgaaggagctagaatttgctgtttttatatagcaaaaggttattctggaggaagttacttatgaaggactaatgaattgaaggagcaaggacagataataaacagaattatatcaatatatggcttgacaatatctacacaaatatgaagaaagaaaatatctacatgaacatgtgatatttgctactttacctagcatgaagagtttaagggtaagcaaccaatgccataaatcaactttctttttctaataataattctaggaatttcaaggaggctatcaacagacattgctatgtaaatgccaaaaaattcacatgcaaacttgacttcaaaattttaataacagttctgtaagaacctttcataataaccttaatagaaactgaaatagttgttatcttaccgattaggatcacctccataactagcaatgttgttgcacacataagaaataccctgggaagcatcgctaaccatgtcacctattgttccttgagggaaatttctgatataaatgtacaacgttgtattaaacaaataaatattgccaacagtacaattcctcattagtaataaaatgatatagtattgattcagtggagtcatcagcacctgtaatcaatgcaagcaactatgattcctctctcagccaaccgcctcccaagaagggaaccccatgccttgtaactaaaatattttgtgcaaggtcatcaacaaagaaaagccaatgaataccgtggcgccttgttgcaaacttaacacttacccaataatccaagccccaccagttacgaaggccaccactgggcagggtctgttgatatctttgggtatgtacaaatctagcctgttcaatgtaatatttatcagtttcaataacatacaggaaacagtgttcttattttattttattgatgatgatgttacctgtttcttggttgttctccatagactatacttctacgaacctgacttgagaagaaatagtaatatccaactgtgaaccaagaaaggactgttttagaacgttgtagggtaattaggaagagaaatcagacatgccatattcttttctgaaactgtgttagggtcaggtttgaaattctgaaaaaaaattatttgccagttggtcctggtaggaagtgtctccagtaaaaattggtcaaaataggtcaaaagtcccttttaccctttcctgttcctctcatctgaactcttccttccccttatgctagacaatattgccccgaaccacgctcaaaccaagcaaaaattttgttcggaagttcaaacaaagttctgaatatttggaactatgtccatccgtcttccccccccccccccatcctgcaggcatcaccaccgtaattttcttctttttttttgcataaaaccctaaggcatcatactcttcatgcgcaacacaactgacttgaacaattgagtcaatagaactgcatgttatctgcagcataccttgcaaaaaacctggcataagtaaaattgcatagattgtcagggcaagtagttgtgacatccaccggtaacctaacctgcaaaacaattaagatagtaaggaatatgtaaaaaaaccaacacaattatattcatcgagatattttttggcgaaaggatgaaaattgtcactaaggctgtgtttagttcacaccaaaattggaagtttggttgaaattggaacgatgtgacggaaaagttagaagtttgtgtgtgtaggaaagttttgatgtgatggaaaagttggaagtttgaagaattattttggaactaaacacggcctaatgtaatgttacgctagctggatagaaacttttgctacattgaatgcagagttggaaataaatactggcacttgaaaatgcaaggcccagacctgaatatagcgctcaaagattccaatattaaagcttctcaaacattatatacttgtgaacttagctgtcttacaagtatcttaaaagcatatttatgctttggttgtgcttatgagaacatctatagctgtatacatgtcttgtaaacaatcttaactgcagcagctgttcaattctaaacaagatgtagaacagaatttctgaggcaacaagaaagaatcacatcaacaaaattcatgactaataagccaggtaaaatagaagcagccgtgcatcatgctgccacactgttccatggtgctactactttatatacatactggtcagttaattgatcagtaagtccaaagcaagagcacaatttgcacgaagacatagtgggccatgtgactaactgacagcggtacagtacacgagtaatacagaatgactgaatctgcatgtaaaccaatagtccaatacactaatttaatttataaaacggacaaaatgcgtgttagcaacaacaaaagtctgcacgccagggaaacctctaaacgttaaaacactcgtgtggaccccgtagcttaattcccagtacgtctcaactctcacctgtcctcgaagttccacacgcaattgcatcagcaacctagtcaaaacactccctacttccctagtggattatcgacttatcgttagcttctccatgaaagctgcgttcgaatccaccacacggaaggaactccaagaaaacagaagcttcgccatcggaaatagcatggaaacaaatcgccagctcacgtatcgcatcgaggcgtccgcgattggctcgtgagctagtccatgatcgattcgggcaaacgcaacgcaagggctaacaagggtagaggggaaaaaaacaaactaaacagcgaataattacccgaggtactgcaggaggctgaaggtgaggcgcgtgacgaggtacgtctcggaggccgcgtgcccgacatcgtcgcggaacgaggactgccgcctcgggccgccgcagccgcatccggcgggtcgcggggacgcggactgcaccggcgacgagcggcggcggcggccggaggagtcgctccgcgagaggagcgcgccgacctcctcggcgctggagacgggccgcattgcgggcggcgcgcggcgctggggcggtgtgcgggatattcgaatcggttcgggtgggtgggtgggtcgcaactcgcaacggtgcgggaggtggtcgggtggtggacgccgtcggagggggagagttggggggtggtggcggtggtggggcctaaataggcggagtactcgggtagtgcgtggcaacaagggacgcgtgggcggaggcgggcaaaacatggcgaaatcttccgtttcctcctcgcctcggcatccttccttccggcgtagtatcgcagcttgcctctttcggcgcttgcgtacgcctaaagagagagaaagagaggattttgtcggattgttccgagtaaaatttgatattgcagtacagatgtcagcgttttcctcctgaaaagaattactcctattttactcccaactcacgctacggggcaaacgttaaatctgtatcgtgcagacacatggcaggcagaggagcatgagatttcatcggtgtctctcgtgtttcaccggccataaaaatatatagcggaaccagattctattttcatttttagaaaaaaaaatgatggaccaagctcgaccgcaagtgcacgcaatgaccgcggcgctcaaccggtgccacagttccgatacacttctttaacctcaaaataaattcatcttttactcatcccaacattagaatacctttattttatcaaattttaatataacaatttctcattttatctattttcaatacaattatttattacttttataaactaaaagacgcgaatattagagaagaacgtaatatcaaataattaaaaggggtgaggtttcaaacttaggtcgtctagccaaccaccttgtagagctagctggaagacccttacgcgtttctcacttttataaactccaatacagtaattatttaaaaaaaataaatataaataggatgagttaaaacgaacatattataaagagggagtattccgaacctgtccacgaaatagggaatttcatggacggaactcgaaagagtgtaacagcctaatcgtctcggtgacggagtatgggcataaatgggttggtggtggcggggccgcacaccagccgcagacggcgccaaagctgcgtgcggtgcgagagaatcttgcaggttctagagccggcagcctgcgctgtgcggcgtagctggctctcggcctctagctgctggtggcctgtggccggccactggccagcctaccgcatgcgggtggccgcgacgcgcgccttcctgccccgtgccgccgcgccacgcggcaggagaaggccaccgaggcgtttgcggccgtcgggccatgggaaaaaaaaaaaaaacgtttcgaggggcgacccgctgagctcgccgagccgggctggcctgaacagcccgtgccagcttggatgggctggcctcgtaccctcaccaccaggccgagctaggctggactggggaaagttgttacgctgctctttttcgttttatatatatacttcggctgttccgctctggatcgtaatgtgccaaaggcatatgctaagatcacataacgtgcatattagctgttgtcaacctttcaaaatgtgtgctattcagaatgctactatttcttgttttacataaataatttcaaattggacatggtggattcaaaacgttgtcttgaaaaaactcaatgtaagtgctatagctctctcacgagtagagtaggaaggcaaagcaaaaattacagaaagtgtccgtgcacgtaataaactctctgcttttttgccagttgccactagtttaccatcaccgtttcgcgagttgccggaattcccctatcgccgtcctcgtcctcggccgcggactccacgccgtccctgtccgtgcgagatctccatcccaatttcatcgccgaacactccccgcctcgtcgtcgtcgcaaccacggcgcctcctcctcctcctcgacgagacgcccgcgggtgcctacgccccgtgcccgcgtgaagcttctggctgacgtacccgccgccatcctcctcggtcccggccttcctgtccctcaaaagtttcgcgaccatctcgatggctgcgccggcgtcgtcggtcatcagcagcctctccgcgacctcggccggcgccacctccacctcccgcagcagcgcctcgatctccgggaagagcgggtggtcgtcgccggcgacgccgtggtaggtggcggcgagctccctgaacgcgccgaagccgaggtagcccatgtgcacgtgcatgtccatccggcctgggcggagcagcgcctggtcgagccggtccacgtgcgtcgtcgtgaagatgaggatccgctcgtggccgctgctggaccagaggccgtccaccatgttgagcagcccagacaaagtcacctgcgacgtcgcgcggtacatggcaacacaaaaaaaaaaaacgcacagctttgtaagcgacacggtagcatctgatcagttttgctaacctaagtttgagattgaattgatggttgggatttctctttttggatgtctcttaatctgatcttcctttgcaatggtgctgagactgtgaaaacgattgagcttatcaccaaatttgtttgttttcaagacgtgactgatgcgtgtgtgttcatttttagtgcggggtcatggccgatggtgtacgtatgattgtattcttgttgtacctcacaaaatggcaaagttgacaacgcacgcgagacaaaccaaacaaaaattatgcgctctcttaaagttgtgaaacagtaaaacaactagtagtagtaagatattatgagaacgagtataaaatttgtgtgctttttagaaaggaagatttgtaatctacaagtgcatgtgcatgtgtacgcactagattttagaaaagctttagttattacatctttaatataagttttaaccatgattgttttcccgaacaaagattttaccctgctagcctgtcctgatttagaatcaggaatttacgcttcgaatctcacaagaacaagtaatttagcctgtcgtttggctagttcaaagtttaagccttttgtttcgcttaccatgcacaatttacagttacagagctaatgaggtgtattaattagtactactaagcactactaatactgaccttacgattcacggaaggcgggttgcttccgtcaggacctccatgcggttccctccgcggcgccgcgacgacggcgcagtcgacatcctcgatcaacaatatggacctgttcttcatccggatcagcagcttccgcagctcggtgttggagcggacgccgccgagctcgaggtcgtagacgtcgaagcggaggtggttggagatcgcggcgaccaggctggacttgccggtgccgggggggccgtggatgaggtaccccctcttccacgccctccccgtccgctcgtagtactccttcctgcccaggaacctgtccaggtcgtccaccaccgcctcccgcagcgcggcgtccatggccagcgtcgcgaacgtcgaggcgttgcggagcctcacgggccgccacttgccccactcgttgctgtacagcttcgcctgcctctgcccctgggacatggccgcgacgcgggccatgacggccgggaggtacgcgccgagcaccatgtccttgtgccgcccgtcgaagctcagcttgaacacctcccgcgcgtcgtccccgccccgccgcctgccgccgccgccgccgccgtggctgctcaggcgccacgtcagctccgccccgtcgaacacgtccacgaccgccgtgccggggcgcatggcgagcgtgatctgctccgcgccggcgccgcgcggcaggctcgccttcatcagcggcacgggcgccgcggcgaggagggtggagacgtacgccttggccgcgaggaagacgcggttgtagaaggcgccgtcgaactcctcgatgaccacgcagtggcggcgggacgagggtggcggcaggaggagcagcgcgcccagggccgtgtccgggaggacgtcggcgacgatccggcgcagcagcatggcagcgcccacgacggaggaggccgccgtgatggcgttcttgtaccgttccagagcttcgctgttcggagacgccatggctgtcctcgctgcagctgcagtgggaggctctgattaaggttttcgatctaatcaagtgtttgagtggtttcagtaacagagattagcattcagcaggtgaggagagcttttggagtggttgccgaaagggaataccttattataaacattgtaaaggtcggtttaattggttggtgtttgatcactctgtcatgtaattaaccaccgtatactaatgtttgttgtgtaggttgtgattaatgtttgcttaggaaggagattagtgggtgctgactagctaacagttcggtctaccgtgtaaagcacttcagtcagtcaacaggtgccctctgagtttgccaaggaaaacactcggaaatttcgaacgtacatttcaaaaactgcgatttaattggttgtgcggcttggggtctttctttaacgtttggtaatcactctgagatagccttttgtccacatagtacattgatttatatgtgaaatttcaaataaatgtatcttataccccctctaaattacttgtgttggcagttttcatactgtaactaacactccatgttacactttacacccataaaaactatccatatcggtcaaattatggcttgtttagttttcaaaaaaatttttctaaaaacatcgaattaaatctttggacacatgtatagagcattaaatatagataaatagaaaaactaattgcacagtttgtatggaaatagtgagacaaatcttttgagcctaattaatccatgattagccataagtgctacagtaactcacatgtgctaatgatggattaattaggcttaataaattcatctcgctgtttccagacaagttatgaaattagtttttttattcatatccgaaaacccttttcgatatccggaattaggtttaataaattcatctcgctgtttccagacaagttatgaaattagtttttttattcatgtccaaaaaccctttttgatatccggtcaaacgtcgaatgtgacacctaaaattttctttccgcgaactaaacatggcttatattaccccctcctagactagcaaaagttgatccagctagtggcttgaccaccacatcacttttcattgcacataggtattgccagtcagtccaatcaacaacaaagacgcaccacaaatccacgatcgttctcgcctcgtttctctgtttttgtctctacctccagtgtcggcaatgttgagccgtcctgaccggtggcacaataatcttctgaccagtagagcccacccactagaaccctaacacatggaggcaaatggagcagagctgtatcgtagaaccctaacacatggaggcctagtttcaaactttttcttcaaacttttaacttttctattatattaaaacttttctacacacaaactttcaacattttcatcacattattctaattttaatcaaaattttaattttaatgtgaactaaaccacccctgagctcaaggaggggagtggcctagcatagcgggttacagactgacaggcatggtggcagtagaatgagaagatctctatagtgcacgttgaaaatgacacaaaagctgacagcagccagcaggcaaagttgatgtccatcacaacgcacatttttaagtgagccacgtttttccgtgctcaattttaataaatttaaaaatataagtcacgcataaagtaatattcatattttattgtctcataacaacaaaaatactaattactccattcgtctcattttaagtgcagtgatgattttttatgccaaaatttaatcgtctgtcttatttaaaaattttaatcgtcccgttttaaggagcattttgtgaatgtatagtccaagaatgatttgacgcggttagtaaaaccacattggcgtttttatgacttctgtatgaaattgatggcattaaagtaattgaatgaaaataagtggcaggtgtacgaacaattgaatcaaaataagtggcaggtgtacaaatataggtgaacattgtctggcaaactgcaagaagaatcactagagacatggtggtggaacaagtgaagacttggacacatcatcgcacttttcaaggcttaaatcccactatctacctccgtgctaatacaagtacagtctaggttttatctaacttttaaccttccgtcatatttaaaaaaattataaaaaaattaaaataaaataatcacacataaaatactattcatgttttatcatctaataacataaaaatagtaatcatatttttttaaataacatagatagtcaaacggaaaaactcacaactacacttatattgggacggaggtagtaatacttaccattatactcataaaaaaaatacatttacacttttaatggaattttggtggaaccagcacaccaaaatttaaatttagacttaacacggtacttgaatttacggttatttactctttcgatggtagatggtgtacatgtttacagcgaggcgtctgtggtgaataggggtcttcttaataggggtaagatgtgagtgtgtgcgtgttgtgaactcttgtgtttgtactgtattcttaaaaaaaggggcttgtttggttgtcactttgaactcaacacaaagctttatgtggaggtgagagaacttatataaacaaagagtgttgatttctatacaagagctagctccttatatacttcaagataaatacattaaatgtaccggtgaaaaaaatatgagaaaaaaatagagacaattttatagctcatctattatacatatcagctctaatacaaaattataactaatagctggctctactattatatttggttattgatcatagcctgaggatagattacattaaatgtcaccagtggctcccggctagtataggcagcttcacaggtttgccagtgaaaactccatttaattttaatattgatttgtgaattgttatgaaatttgtacagtaaatattagttacattgaagtttatctgggctcaaaaaaaatttttggttccgccacttagggctaatttgttggagcttctagttgctgcagcttctctcagaatcaaatgctcttctaagcataccagcttttggttaaattatttatagaatccagaaaataaactagaagttagaagttagaagctgaaaaacttaatttttctagattcccagctatttctcaaaacataaactttccaaacaggctcttaggccatgtttctttcagtttgggattattataatctagattattgagtcagattactataagctagattgttataatctgtagtagaataagcggttagtttgtttctttcctagattattgggtttgcaagtctaaagagggagtgggtggcatggtgggtaatttttcatccaataatctggaaaaagctcacctaaatgagcttatcaaattataaaaagctggcttcggattataaaaaactacttcaataaattgtctgtttctttcaatttactcttaataatctggattatataatcccaaactgaaagaaatagggtcttagagcaggtacaataagttaattaggttggctccaaaatttctcacaccaccttaatcctatattaagggggaagaattgaagcgagagaaacgagcgagcgcttaatctagcgtcgggcggtagcgcagcctcccacgccgtatagcctgcatgcagcccgtgaaggcgattaaaaacgcgttatatgggccccacaaggaacccgcctgatcccatcctccagctctcatcgcatctcatccaactgcccaaatcggcgtcgacgctcacgttcctcttcctcttccgcacctacgcgcgaaatcacctccagccttgggcgtgaaatcgccggcgatacttggtgttcctctccctcttccacccctacgtgcaaaatcccctccgtctgtgcatgcgaaatcgccggcgacgcctcctgttcttcctccacttccgctcatctgctcctggctcatccgctgatctgactggtggtcgcattggtgctcatatgtgaggttgctgctgctattatgtaatgtggattctcaagttgattagtatcgatcaactttcgtatacatacaacatacatagacatatttgctgaatattcttgcttggattgacttgcctgttggactaatccggcaagataagtgaatacaacaactaattacaaaggaacaaactgaatgatgtatctgttttgtttcaggaacatatgtgctcttttgtccactgaataatgatgcacttctttcacaaataaagtttttagtttcacaaataccttactgaaatcatgttgtgtgtatttgtggtgtaccaccaagacatcttatagctaacttatagctagcttgttgtatgagttggcttttaagttagctctacttaatatgacaaaattttggagctagctgccagctgcactattgaccttgctcttagtgcattgatggtaggtcatcagtcatcacgtattcacgtgggtaaacgtacttcgaagtaccgggaaccgggttatacaggagaacaaatatatctcttcaagtactccagttacttgctaagggcattcccaacccaagacactagccatagtttccataaactccacatcattaagaaactagtactagacactactcttccaatgcaaacactactattacatacttcaatttaatgatacttatctctcatgacgttttggatgttgtgtataaaccatgtctcatgcaagatatggtttccctctctttcctcatttattcacttgccacatcattttttatcctaagtggcagcttatttaatgctatggacaccatcatagtcattggattagaaatgccctaatagctcgtttcttgttttgctcgggggattaacacattaatcatgtttggattagatgcgattgctttcgtcgcctggagctcaggcgaccgtgggtccgctccatggcaccagcccaggcgagcagaagagcgcgtatcatgcaggtttggtggttgcttcaggtggtgtttggatcagggaattaactttagttcctatattttgatactaatttagtgtattaaatatagactacttacaaaactaattacataaataaaagctaattcgcgagacaagtttttcaagcttaattaatccataattagataatgtttaatgtagcatcacataggctaatcattaattaattaggctcaatagattcatctcgcgaattagtctaagattatgcatgggttttttattaatagtctacatttaatatttataattagtgtccaaacatccgatatgatagaaacttaaaagttttagtcccatctaaacagggtctcagattggtctccggccaggtgaatccatctttggaagccaacaaattactccatatgtccctaaatatctctaaatatatgataccgttgatttttttaatatatttgatcgttcgttttattaaaaaattttaaataattattaattttttcctatcatttgattcattgttaaatatacttatagttttacatatttcataaaagttttttaataagacgaatgattaaaaaaattaacagttatatagatttacatatttcacaaagtttttaacaagatgaacgatagaaaaatatcagcggtttagggacagagggactaccaaacagccccaaaaaatgctttgttgcacttgcaggctgcagcaggataggcgcggaggcgccatcgtcgtcaccagccgcggcgcacgaccacgaccgcgaccgcggtgggcggcgtaaccgcgctagctccgccgtgccgcctcacctcgccctccctcccaccccgccgtacgtcccgagcgcccacctccaacgcagctcctcctacctccgcttcgccgtacgcatttttaatgtcatcaccagcattaatttttcaccgcttaaataaattttcgagctcagacggcgccaccggccggctgcgtcgtcgccatagcccatgctctcgcatacctcgagatccgccgcggttgctttcgctctccctgatctgatcatcccccactcgaattctccccctccttttttttctcagccgcggaaaagaaaaaacagataaaaagaaagaaaaggggaatcttggagcccgcggcccgttttgcagcctcacccctcaactgtgcgtcgttaatcgcggggccctcccctccccgtcgctgctgtggttgctgtcgtgccgtgtgggcgtcacaacgaataatcaatggcctctcctgcatcaccaagaagagaagaggaaggaaaaaaaaaatcagagagagggagaggagtaaaaaaaaagaagaagaagaaaaggagaagggagacaggggagtcagtcttctccctctgcctccgtgcctgcgcctttgcttcggagtccgccaagtttagattcgaggaggagaagggaagagaagagaagagaagagctctcccctccctctgcggcgtgtcggagcaggcgattggctccgttccaacagtccaagacgaggattattttacaaaggttaggtcttgccgccgccccgctgccgcttgtctgtctctctcccttctcaagtgtgcctcatttgttgactttgctaatccccaaatctgatttggctcccccgcattgcgcgcggcggcaacctcttcctggtgcgcttgccacatcagcctggccatgaacaaagttttcgctttttttttatgcgggagagatggggatgattatgcttgaggggggatcttgagcgtgtgtataggatcgagggttttgaacctgatttctgaaagcgcctggtttgtgaggctcaagagtctctgctttttgccggtttgagcttttaacgaaagaggcgatgggctctgttctgctgaattagccacctcgaggatggggaggttgaaggattgaagctctcttttcctttcgcagaagtaatcgcctgtgttctggcctctctgtggatatgtttcagagcttacctgtagcgtcgagtttgtctgcaacgaaaattgctggtgaatgtttcagatgttatgtattccatccatttgagattctcaaaattggttttggctctgtttaggatgtttaatgcctcaagttcctagttggtccacctatttgattaactccacacatagaagagcagaagttggtacatccttgctgtgcattgttgaaactatttgcccgttctgtagtgatctgaaagatgtcacattctgcgtgcgatcccttctgtaatgaggtcagtggtcgttttgggaaagcaagcatttcagcaacagagtgggatatttgatatctacaggccttagtaatgctcattttacagacttttcagcacaataggttgtgtctgtttccttgcattgttaaagttagaaggttccctatatatatgaaaaaaatgcaatgcggaagaaaggaacagagtaacatatttgaatcgtaaacagtgagctgggtcaaataatttatagctatcaagaaattgtcttgtttgtctttcgggctttaaaacaatgtgtgaactcctcgttttggaagaaaaactctgacatgaaattactatactgttttctatgtacaccgttttccattgaaccgttgagtttgtttgttgtttacagaagctgccttttataatgcgattgttaaatgacttgatgtatagctttatattttctgtgtatctatttgtatttggatatgtgaacatggttggatatgaacttaggctctttcttgattgacttagggtgtaggatcctgattttgttcttgaggtatgtcctcaaccagttcttcacagccaccagcatcgtcagatagagaatctacaccagccagtgataatgcaacatctcctgattcagatggtaagcagcatatcattttcttatatgatctctcattctctctacatgactgcactacatacattattattccctttcttatcttccaatttatccttcatggattttgcaggcacgaattctgctggacccgcaagaagcagaattgcactgcagttggatcagcggtcattgcatttttctgttactgcttgggtaaatggattaagcacaacaactagaactttcagcaattattgcattgcacataattttctattctctgaaatcaattcaatgctgaagatcacgctcttgtctcaaaatcccattggtgtctatataagaatacttttttctagggcaccctcattggcctaaaaaaggtcagttttagaattcttcacaagtgagttaatgttcagaattcattagatatattatcacataatagactgatgagcatatattatatcagaataccagatgagattggtgtagccatttatttatttccctccttaatgattatttgctctttagttccataggaacaatatttagtatactttttaagtgctcgccagtacaaaatttcaactttagtttggggattaatttgtatgccttgttttagcttccatgtattaatcatgagcacaaatttacacagcttttagttaacatgtttaaattactttagctgattgtcagattatctttatcacacacacaacacatttgtttcctctgttttttataggttcttattgttgcattgattggaatccttccactgacaccacgacaactgcaatataagggatatcgtttgtcacttctcggcacaacctgcaccacaggctatgctttgtttgctttttatcgggttagtaacatgtcatctgttttattcttcccttcttagataccttgcacaacttttaccatttttccttttgttcagctaccaagagcaggaaacatgcatgctgctcagatctttcaccatgtagcttcgtcaaaggattttataccattcatgtactgtcttatgtttgtcatgtctaaactgcacttgaagcgtaagcatggcttgtttactgacataatgtattcttcatatttccacctaaacacctttcctagtacttgacacgataatattttttgacagttgttttggtaccagtgatttgctgggcacttgaacatgtggccagatttctacggcgccattttactaattcctctctatacaggtaaatgaactcaacagattataagcacaaaatcgatgaagagtatgtttgtcttgccttctatgcatatgctgttgtgctatcattcacatatttaggataaggcagttgaggcattatcttcccattcttggtttatgctgctatattgactaaacattttgattacatggcttttactacttcatctctctgggtgtgcaatacctgtaaaaccatcacaatgcaatgaagaaaacaatatggctgtacatgccctagtccatcagttgtaaatcaatatgtgcaggaaactgtcataaatgttgaatagtataggaagaagggaagatatactacgaatattggacattctatattgagcctcggagggctaggtatatataggagtacatagtgaggagataaggaatgattacagataaggaaggaaccatacaaaccaatcctatcctaatatgactctaactaccatataaacaaaaaaacataaatactttatgtgcaggaaatctgcatggcaataagttgataaaaaacaaaacaaccctgcaatactttgcctgccgaacatactggtaaatgtgttataacatttgaacgcattgtgaatttgtaggacatatctggagaaaccttgcacatgggttgagacaaacacaactgcagtcaaattcctgagttcaaatgcggagattttgttgggatttcttttgattttgtctctgttctcgtcagtagagtcctacccttcagttttaattcccccattcccattaaccattcatcttaatctcttattactttttacttctgttgtgtaggcgacaacgcaatcctatgcaaacgttcatgtactggcaggttagttttttacataaacactgattaatttctccaaatgacatatttctctttttttttgttgactacaatgctgcaacaagacttatctttcaggtttttctatgatatcatttgtcatcacaattaggaatttggagtgttctttttatatctagtataatatacttttatttttcttgcgtggatatcatcttatccactataaacaagtgcttgtttagttgtacatcaaacagaataagtaccaaatgacgcttaattttgcactgcacatgctggctaaaatgctggtgacgagctcgtccaaatgcggatagctatatttcaataatctcaggatgccagccaagggaaaaggtgctcccatggctgaacaaaattaccaattaagtgtatgcaatatttgcatttaaaagataatttgggcaattttagttacttctgctctcagttgtaaaccgcaaaccgcgcccctgcatttaaatgaatgcttgtcgggttgtagagaaaatttattatttattaatgttatagtcacagaaaatttctagcaaatcactatctcactctgtttacccgctattgcagttactgaagctcatgtatcactctcctttcactgccggttatcacagagctatctggcttaaaattggccgtacagttaatccctatatccatcgctacactccttttcttcatgacccgataaatgctggcatgagatggtggttcaggtagcatggatatggctcaattaatcatgtaaaggtgtttttggttacagttcacagttaacacatggaggatcttttcagtaagttgtagtttgcgagcgacatgtttagtaccttttctttttgcgatgttgcgctgatattacttttagttactgacaagtaattcttgtaactttaccttgactgtagaactagtgtagaccttagtaatatggccaataccatgaagtgaaaaatggaaaagcaatttattactatgatgcaactggattctgctcctgatttgtatcagaccacttcatgtaccatcccaaaatataagttttgggtaggatatgggcattaagaaggttacacacgaaattaaatggaaaaatgtatgtggataaattgtttatatcttaagataacttttaaatgctataagttattaaattctgggacgaagagatcagttggtttcaggccctgggccatgtagatgcatttggttgcaaggatggaatgggatgggatgggacgaacccacttttgaggttgtttggttgaggggtgagtgggatgagatggtccctggagaggaatattcctctcagatccgggaccaaccgatccggcaaattctggcggacgaactcgtcctagttgggacgagcgaacggcatgacccgctcaagcttgaggccagcccgcgcgctcgccctactcgccctcaggagcagcggtaaacaccggcgggctcggcgacggcgacggcgaccgcggctgcgggggctcggctcggcgaccgcgggggctcgacgacggcgaccgcggggggctcggctcggcgacggcgaccgcggggggctggacgacggcgaccggcgggggcttagcgatggcggccgacgggctcggcgacgacgaccgcggccacgggggctcggctcggcgaccgcggggggctcgacgacggcgaccgtggaggctcggcgacggcgaccgcgaggggcttgactcggcgacggcgaccgtggccgtggggtggctcggctcggtgaccgcgggggactggacgatggcgaccggcgggggcttagcgacggcgaccgcggggggctcagcgacggcgacggcggatctagtggtggggagggcggtggaggtggatccgcgtcctttgcctgctcgccgccggcctgctcctccaaccgcacccctgctcgcccgtccgtgctcctcctctgttcgtccgcctgctcgcaatattgcgccgctcctcctcgccgccagccatcgtcgcacctccgctcgctctcctctttctcgctgacggtgatagcaaacggcgcccatcccatctctagctcatcccttcaaccaaacaaaaaattaggattgtcccatcctacaaaccaaacacgtaaatggaatcatcccaaccccaaaatcagaaatggtttcatcccatcccacctagtcccgaaaccaaacacacgctaagatgactagtgcatattccaggggcaatttttgcaacagtacatgaaaatgcagtgccgcaatatttcaagaattgttgccaacactctattcgaagcaggactattaaaaaaaatcagtaaatcagtactattacaaagaaaattgaaatgcgataatatttatttcatgaaactcccaggctccaatgagagttcatgcgaaccatccctaggccctgagattaagtgtgaggtggagcacggatccggcctcgatattgtactcgtgggccgccttgtcgtcggtgaccagcacccctttgtagatgagctgccctatttgcctgtcctcctcctcgatgcgcgccctgatcatggccccggtgtccgtcggctcgatgcccaggccaaacacctttgccgctgagaggcttcaccttgatgttcatgctgcctggaaggaggcggagatagaggctcagcgtcgagccgtcctggatgttgtagccagccaccgtgcagccgttctccagcaacttgtggtcgaagaagagcagctgctggtccggcgggatcgggatgccctccttctcctggaccttctccttgacagatcgtgtcgctgctctccacctcgagcgtgatgagcttccccatctgggtctccacgacgatctgcatcttcgtgtctcgacggacgtcgatcgacgacggattcggctgctggtttgtggaagatttacgacgtacgacaaaaccgcggggctttgcttcgatgctgtgggcgtattggctttgcgtcgagacttgaatcgatcgatgtaggactggtgttgtgttatgcggctccggtcctgtggtttttattggtggtagaggcaagctttcgccgttcgggttggtttccagttccgatacggccgcgacgcccagcgttcgcgttgggctccatctccggttcggcggattatccaactcgggcctgtatctggactctgaagatacaaaagacgtactgttgccggttgggatttttccttgagatcatgtagtagttctcggaatgggactcgtcatcgtgtacgtttctacgactacgatgccggagtacacggctttgtcgggtacgattatacgatgtgccgaaaagatgcagcccgatctaactcaggactagtgtgattcttgtattgtaagcgacgaagtgcatcccagtcgggtacggtacgattttgatgtcgaaagggcgtaaaagttctgtcattgcggatacgagaaaaacactgagtccactctcacacggtaggagtacatgcattatttgaagctggccggcgtgccaggatgagacgaaaaaaaatttggtggagaccgggtataattctgtaaatcggctcccgtgcagccccgaccccgatgattgccgcatggacaatctcagaatcggacgtctagttcgttgcggcttcaggcccagcgcaaatatggcataggagcctcgctcgactcggctcccgggcccgtcgggtcgtgggctcatatccctctcgtatcggcctcattcgtccgcagcagccgccgccgccaccgtcggccagcggcgtctctctcatctactgtctctcgtccaccatcgctccctctctcggacatcgtccactcggcggtgatgacgagggcaaccggctcacaatcgccgacacccactgcggcaactccatgcatggttggtctttcggcaagaaatttaattaccggtaaggagattgaggttgagggtgatgacgcggaggttgtacacatcggtcttgtcactcattttcttgaactgcacattacgccatcagaaaatgttagtggcactatcagtattaggtatatagatgccgaaattttgataatttaactcttttagaaaatttatttgaaaagtaaaccgtgtcaaaaacttatttcaaaaataaaccgtgacctcagcgtcattgacgctgaggttaacgattaaacgccaacgatcatgacgctaagcacaccttggcggggcactatggagggttggatgggatcagccatgggttttggcgctgaccccttatgtagtgataaagtgggtttgtgttaattcttgtcactttctatgatgtgccttggtggtttaacttcctatgatcccaggttcgacccctcattgctcatttttttgcttgctttaatcacacgaaaagaaacaaaaaaaaagcaggacgtagggatcgaaccctagtcttctgcctgacagtggacacattcaccgttgtgctatacttcggttcataacagtattagccatgttttgcatgtaacatatatatggggtcagcgccaaaatgcatggcgctgacccctatcgcacctgccaatggctccgcgtttttgatctcagtgccaatcccaatgatgacgaggtcacggttcatttttaaaataagtttttggcatggtttactcttcaaataagttttctaaaagggttagattgtcaaaatttcggatatagatgcagattctcaattcatatagatgaagcccaagaaatgtagcgtgaatttggagcaaatttgttcagagacagaaaggtagtagataatgttagtaaagcactgttgttaaacaaaagtcgatctccccagaaaaaaaacaaaagtcgatctgccatttactatggccggaaaaccgtatgatatacatgttaatttgttcaactgaacttgacactcttttactgaaatatatgcactgaccaagtgaccatgaagaaatgaaatgcttaaatctccaaaatcttcagtatgtatcaaatctaaatggtaaaggaccaaaatgaatattagtactttatcaaatctaattagaatctgcaaacgttcagactacatacattgaaatgtagcaattaacaactatattaaagtttgaatgcagaagcccagatcaaactaactaatcaaatcaatcctgcaccatggtaagaaagaagcccgtgagctcgatcaagagatagcagctactgcccacgggaagatggagtacatctctgcgctagccgccggcaaacagggcgaactcgtcgttaacgttgcggtcgacgagagggatgggttgtgggggcgcggccactcgctatcgccgccccgccatgcagacgacggatgagataggctgcgtcggcggcagtggctgctgctgagaagagatgtcgatgatgcgatgtgagccggtgaggcggtgagccgatgggcccggagccatcgagcgagtcggctcctccgtcctgtttgcgctgcgcctggagccatacatagtgagacgttcgattctacggttgtccacgcggcaatcatcggggtcggggctgcacgggaaccggtttacacccggtctccaccaattttttttctggatgagactatcctgcttctctttgtccaatagggctcatcattctgtacgttcatacgactacggtgccggagaacacggctggtcaggtatgactactatgcaatggttcgaactgatttagatattattataaaaaatgatctttcatttatagaaacgcatagatcaatagtagctacagaccagcaaaatgtatgaatggtgcatacggttgatgatgaacgtaggcaaattaaatgtgacaaaggttatgattggttgagaatagaaagtaggtagagaaattaaatagtgtaagtttgtaattactcttattggttttattattcttaatgttttggataaggttgaaatcaaattttttataactttgcctttcagtaacttttaaaatattagtttaaaggcactagaacaacatatatagatttatcttataaagtaataaaaataaaaatatatttatttattgtacatattataatagaaaaatatagtcaaagatatattttgaagactgtcattgtataaaacatcaagaattatgaaagtagaggcagtagttgagaagagaatatgggtgataaaattgatatattttacaataacttttaaataacagaagttatattttaggatggagagaataactgactttaggttatgggtcaagtaccaacaatttccggttctataagtcaatatcaagcccaatcagatgctatatatactagtgcatattcaaagccaagtttcacaacattatagaaaaatgcattgctgcagtatatcaacaattgttgtcaatactccctcctaagcagggctattaaaaaccggcaaaataatatacttaaatgagcaatgttaaaaaaaaatcgaattgcaacaatatcatatcatgaaacccgcgggctctaacgagtcatctctagcccctgagagcaaggacgatcgtggaggagcacggatccggcctcgatatcgtactcgtgcactgtcttatcgtcggcaagttgcttcccgccgtagacgagcctgccctccctctcatcgatgcgctccttgatcctgcccatagtgtccgtcggctcgatgtccacgtcaatctccttgccagtgagcatcttaaccttgatgtcgttcatgccgcggcggaggcggagcacgaggtgcagcgtcgactccttctggatgttgtagtcggccagcgtgcggccgtcctccagctgcttgccggcgaagatgagccgctgctggtgcggcgggacgccctccctgtcgtggatcctcgccttgacgttctcgaccgagtcgcagctgtcgaccacgagcgtgatggtcctcccgttcagggtcttcacgaatatctgcatctttcttcgttgacggtcgtctcagctggtgatcgatgcctgcggcgatttgctgtgcgacggccggaaaactgggacaagagaagaccgcgcggcgacggcgaggtagtttgcttcgtttgcttctctcgtggacgttggtttgcgtggtgaagccttggggatcgataagcattgcagttgcagctctcatcgtgccgttttatcgtgcgatcggcgggcttgggtcgcgttcgaatcggcttcattttccgataccagcaggggcagaacatcgttgtccgatacgtattgcccggagtaaaccgtaccggaaggtccggaaccagcccgcacaaacaacacaggctggctcggacgcaccaagggccaaggcaggcagctaccatggccaacgaagtttggtgctgacgccactgctctctctccggccggagtcccggttgaggttggctagcatgattggggccgaccgccggatcgaattttttttacaaaaaacatgttaacactcacaatgcgtgtacattcatttctattaatacatacacatatactctacctctataagcaccttcgaaagattagaccaatatattttaagatagacaaagtcaccatggacacctcactgtcgacgaacatgtcgcctaccactaaaagaataaatagttgtaaatatgagcacacatatcaaatctaaaatttaaactcgggtaggtatcaattgagctacatcagaatgaaaatgaattttgtcaatgtaataaaacaaggaaaaaagttattagatttgaccgtctgacccagttttttaagaaaatgtaatttattttggcctttgcttatagaaacaaactacaaacaatttactacagaatttgcaattaagtcgacaatggttaatcacagcttaattgaaaataaaaaaaaaatccgaacatcagcctaaaaggagtgacatatctattactaaactttcatcgacgaaaatctatgtaaccattattttttactaggtttagaatttttacgttggttttatgggcaaaatagatccgatccttataatagtactctcaccttccataaaaattagacctattactccctccgtctcactcattactctcaccttccataaaaattagacctattactccctccgtcccactcattaagacgtggtcaaacttggcataatctttaagaataatctttgactttaaatttctcatagactataatatttgtagcaaaaaaaaaatcataatatatgaaactaaatttaagtgataatacaatgataatattttcatcaaataaaatttaatttataataaactattaattgatcaaatatttaaagagtttaatcttaaaatgtgtgtgtgcattaatgagtggaacggagggaatactttttatcaccaaaactaggagaaattaattcattttgcatataacaaagatcaacaagtatacgtacgcatgcaactaataaatattaagatgattaattaggttctcattaaacatttaatttacctatccaccatttaagtcttggatgtatagacactgtaaataacaataacttatttgaaaaaacagtaaaatatgaaataggtctttcttgtggttggagagagtacgttctacatatgttgatttatttgtctggtcactcggtagtagttattttcaccctcgatgacacgcaacttgacgttcgtatatgctttgcaaatttgtatgcatctttcacaagcacaaggatgaactcatcagttaaccgacattgtcactcatatgcttcttgaaaagaggaatcgatcgaaagggtagtcctcgctgcttgcgctgtggctggacctagacgagctccgcattgaggcgcggctttccactgttccagccaagatgacgcgggtagcctcatggtggtccacgtaggatttttttttaagctaaaggagagagaggagaagccggtgactaattagggcaagtgctatgatagatgtgactaccacatttaaatttatctatattattcactcactaactatgagacaaaccatacaatatatcacctctaatacacaaataccaatatttctaatactctcacattcttcttgaagtttgtgtggaggttgcctcttggtttaagggtgtctcatcatctctctcatcacttctctcctctacctcatcactcaatccaatgtggcacttttagggggcaacacatggagcattagagcaaggctaataatatagccagctgcttactgaatagatctttacaggctacctctcagccaactcatatagtggttagctcttaactattaatatatggtccacctgtatcgactctcacatattttcttagttcatgtgcctaagtcggctataagcctaccacccgctttccctctctctctctcctctcctctcttatccatctcagcatgtattcaaccttcttatagccttctattatacttgctcttatagtacttgcccttagccgtccggctgcacgctcggcccgaggtcgcggggaccaccaggagcgatgggttcgccatctgcgtccggtacgctgttgactgtgtccaccaccgttgccatcgctctccattgccgtcgtcgtctcgcgcttcaccgggtcgccgccctcgtccgtcgtcattgccagcgccgccaccatcagcagccttgtccgtcaccgcagccgttgcactccactgagtcgccgtccttgttcgtcgttgcggctgccagcggcctcgtccgtcaccaccatggccgccgttacactccactgagtcgccgtcctcgtccatcgtcgtcgccgcagctggcctagtccaccatgcccgccatcgcactccactgggtcgccaccctcgtctgtcaccaccgccgccaccgtccttgtccaccatgatcgtcatcttcgtcgtgcttcactgggtcaccgccctcgtccgccatagccgccgccacctacatccgccatggccgccgcccttttagacccttgccgagttgccgtcgccctcttctgccgccgttgcggccctcgtccaccccggccgcctatgtccacctcggccctcatccacggcggccgcccaccacaggcgccacgccgcgttctttcgccgcagctcgttcaccgtaggcgctgccgccgtcattgtccactgcatccaatccccatcggaagagaagaggtgagaggaaggagagaggaagagacatggaaagatggtgggtcctataaagataaaatatttgtattacagtatttcctattgtcatacattagctacaacatttattatagatgacatgattattttttaagccaacaatgggttgtattattgaccttgctctaaaggagtaagtggctccgtttactgtgactcataaatagattcgtgaattagccattatattttcagtggcagatccttctcaatcgacgctgaagtgctatgcccatgaacagtgatgcatgatgacaagggacgaagcgattggaaacagacaaccatgatctgtacatatgttgtggaggtcgggaggtaagagcaccatggaccatggtatgcctatagaaggtaagagtatatcggtgtagggatgacgaaaagagggtcaactttattttttttaaataggtaatttataaataatataattgagatttgagactgatcagtatttattaattttgaatcggcaaaaaaaaaaacgtctcaactaaaattattactccacaaaagaaacttcataaaatctctgtagatcgataatgcaaagaaacttcttaccaaaaaaaatactattagcttatattgttccaaaaataacctaaagccctagctagagtctagagtaactcgatgcctccatctactagttggagcgcgctcagaagttcccgcctcggagagcgaggacgaggtggaggacggagccagcctcgatcttgtagtcgtgcgccgtcttgtcgtcggcaagctgcttcccgccgtagatgagcctctgctgcacgggcgggatgccctccctctcctcgacgcgctccttgatcctgtccaccgtgtccgtcatctcgatgtcgatgtcgatctccttgccggtgagcgtcctcaccttgacgttcaggccgccgcggaggcggagcaccaggtgcagcgtcgactccttctggatgttgtagtcggccagcgtgcgcccgtcctccagctgcttgccggcgaagatgagccgctgctggtccggcgggatcccctccttgtcctgcaccttcgccttgacgttctggatcgtgtcgctgctctccacctccagcgtgatggtcttccccgtcagggtcttcacgaagatctgcatctcgacggattcggcttgcttgtggaaggtttacgacggctgccggaagctggagaagcacgtaaaccgcggggctttgcttcgatgtcgtgggcgttgggcttgtgtcgagacttggatcgatcgatgtgtgtggctatgcggctctccgggcgtgtggttttattggtggtagaggtagcggcctactagtgttcggggtcggcttcccgctccgatccggccgcgatgccaaaatacagttcgtctcggcttccagctccaggccggccccgacgcccagtatgtctagtatacggacgtaaaaaaactcaatcctaggtttgaatctggacatagtgtatgtccagattcaaacccaggattgggtttttttgggacggagggtgactaccgtacagtgtgatctacagactactgctgtgcatacgtattcaaaataggacttgcatcgtataggccggatacgtggcttatcgggtacgactacgatgcccagtagacgtaaccgattgcaatggtccagatgaacagatacagcacggagctagttctgatgagaccatcagctcatagcgattcccatcattgatttctatagcaatatttttagctaacgatgaaaaccaatggcaaaaaggaatgacaacgtaatacaagtggctcgtgcagcctttttatgcaatagagaaaacaatgaatggttgaacatgctccagtccatcaaatgtaaaacgtaaaacagaaaatgttactattattttattattacctgagttcatgaaaacgcatgtctccttagatccctaactattaggagtatatagcaattgctcagtacgtactgcgagcctgagcgcagcccaagaactctggacgggctcagatcctgagttttggacaacactatttcctaccaagtctccaacaagtcaagtttatattgaagttgactctggaccttgcaactcgtcagatcaccccgtcatgacagcacatttcagcaaggctaaagcaatcaaacgtagagctagccacttctacttctgttttccgcatctctgttctctcctcgcattcacttcagcagcccagctcttgccaatctctgtctggaacttgcctgcagtaacaagatttacagatatgtttaacaacagaggacatgtttacaaatttttaaatagcctgcaacaatgacattaccagcggtagagaggaagaactcatctaacactttgccatgctctgtagaataagatgggaagagttagtgttacaaacggattataatccacaatgtacatcagatatgtactacttgagtaggatgacaacataggcaggcagctggaattatattgtacagtgccctgaacaaacaaaagaagaagatggtggcatgaagaaagcggtttggtatgattgtcaacacagcagcagactattcaaagttcttgctttgtaaaaccaagcatcaatgcacgcatcagaatggtgcgataaaaaacatgatgtatcctgcatattactgtaacagcaaattgtttcagaggaaggacccaatctaccgcctggtagacttcacagtttgttaaaatgagtaagcagctagttgaatgtacacaaatttaaaattacagaaaagtaatacctttctcatattctagtgcttgaagtatcatttccacctgcaaaacaagtaaatacaagaaatggtaaaatcccttgaaccatagtgaataaatagagaatgaaaacaaagaaaaggacaaatgagatgtgccccagagtgaaactgcaaatgaccaatatgtgccacaacacaccaaaatacaatataaatattacaccttaaagagttaagaatacaaaatgaacaatatgttgcatgcagggtttaaaattccggaacaaatttcaggtctataggtgggtcccaatagacagtgagctccggtgaaaaatttcggcaaaacactgttcatggtccaaatccccaatttccaatccccttctcactcacctttctccccccgtcctcccccaacatctcctcccatcctcccagcactagcgagcaacaccggcagcggttgctggaactggaggcagaggggtggctggagtggccagcggtggttccgcggctctccggagtgacgacgatgacacaagcggcaaggcggcgcgggcctcgcatcctcgtgctggagtgccagcaacggctccgcggctccggctcgacggcgacacaagccgtggacctcgcatccttgtgtttggctggagtggccagcagcggctccacggctgtcgggcgcgaccgcgaccgcgacaacgacacaaggcacacaagccagagaggacacgacgacacaatccttgcgtttcattctcctatcctgtccccctgctttggattggatggacttgatgcatgtctatattctgatatatgtcaaatttctgtaatttttgttgttcaaattcaaattttgtttgaaaatttcgttcgaaatttccgaaagatttccgaaatttcgttattttgctgacctccgaaaattttccctttcccgatagattgaaccctggtttgcatgacacccctcttatgtaataaagaatattcttacaagcaaacatgcatgcgttaaagtattggaaattaaaaatattttgcattttgcacaagcccaaaaagttcaatgaactactgaaaccattcatcaaaacaaatgttatattcttgtttattttgtctatgttaatgaagaaaagcaagaattttccagttcatatgaactaaatataaaatatttatctatgagtgagttgtttcaggaacttggacatggtttcataaagcgttactctagcaagcttgaaaattgtagaattgtgctgaatttgtaccaattccaaacaaaaagaaagctagtatattaacgaaaatgataattctggtgtacatttcaaattagactccaggttgagaaaattaaaatcaacattataaaaggcaccaagttaagaactaagaaaaagaaaaggaacaagtagacagttcagaaaataaaaggcacgcttactttatcaaaatcctttacaaggttggcttcaatggatgaattattttcatattcttcccagagctccttgatctcatcagctacaaaaaacagaacactaaaagtagtgaagattgatgtcaaacatcatccttcatgaactcggacgtcacatcccaaatggacacaaacctattggtcctccaccgagaacttcacacatttcatttagagccttttgttcacggcggcttttttccgctttaggtataccgtcggatggagtaatgtcaccaacaatagctgtcaaacaaaaaggataaaaacctgaatataaaaggatgctaagaaaagtgggaacatacagattatacagtcctagaataaggatgataaatattggcagatgaagtgcaataacatattatcaacaagtgcatacaatagaaaattaagctaaaaacagctgatagggtgttctttggcataccttcagcaatgtcatgcacgatagcaattttgatgcatctgttttaggtaaaataaatatgtcatcacaaacaagtaaataactaatgactaatttagaaaggaagcctgaaacatctggtattttgttgtaatcaattaactagatgaacaaagaacagacgaaagggcattttttaatgctatggaaatttgaataagaaaaacacggacctttctcgatctacagcaggtaggtcaccggcaatcaaagccataagggccatacggtacatgtgatcagcaatagactcaggaccctttatgctatggtttatccagcctttccttttagtggtctgtataacagaacagaaacatgcacaactcaatatatcgcagaataataacgagtataatagacctaggcaacacatgcatggagagatgaacaattgaacaggatccagacgcttgttcatatgcttgttgctggtcacacatcccacctacttatgacatcgtaagcaaggtacccatgatgcgagacttcatggaatcatggtaatcaattcacaatacaaaatggcgattatgaaacccctcatagctgttccacattccccaagctgttactctagaaattaagggggtatcaccagcccggttgtacacacgcggtcagcgaaggacaggcatatgccttcggagcgacgtatccagaggcgatcggatcacgaggaacatcccgttggcgtaccttaaggcgatggcagagggtgaggaaatcgatggccgaggaggcagacgacgccgcggcggagggcggcgccgcggcggccgcgtcggccggcgcaggcgtcgtccgcctagggacgggcgatccgccgggtccagggatcccggaggcggcgcggacgccgggcgcgaggcggcgccgcgccgggcgctccacggggagcgaggccgggaggatgccccgcggcgcgcggcgctggaggccgccccctggaggggccggcagccgcgtggtcacgcccatcggaggtagggctcgaggtgcgctgtggatcggagcttgtggtggtggcggaggcggaaggctacggatcaatgggatgggatcgccggaggaataggcagcggcggcgggtctcctctcctctcctttgcctctgctcggggtaggtaggatcacgaccgcacgagacgaaggcgtccgatcggacggccaggggtgcatccgctcgaacatgccgtaacgcctcgtgatcatccggccgtccattccgtccattttaatcgttcgccgttcattacgcaggagcagcacatggtgctagtgctatagggacaagccaattttgcttgcgcgtcatcttgattcgtgctctaaacagcatctggaatcgagtactcggaattatacatcctgattttgttcttttattaacattctgcaaagatgtcgattacactgcaatagtacagtgggtctacttcatgaccatatatgatgagattgtaaacttcgtcggcagctctgtcacaataatctcttctaagctcgatcttatcataggccaagcattaggattcgcagcgatcatacgacgatgaagctgaggtgctggaccgttaaggcatttacatcaatcacacagctcctcaaattagccatagcgaatgcgattagattacactgagatatagcgataacaaattatcagtgacgccatcagatcaagttcgtcaggggcctcggtgccgaccgaagcacgagaagcatccctgtggctggtcggtcgggatcatgccaccgcccttggacgtgtcgatcgcctccagcatggacaccacctccgccatcgccggccgcttgtccgggttcgcgtcccagcagcgcttcatcacgttggccaaggagctagggcagcagcgcggtatctcaggcctcaagttctgtagtacatcatcaatcaaggatggtgattttcttttcagtgcttcagagttcaggaatcagagaggtgaagtggggaaaacgggataggacggcgtttttttttatttacctgacgaacaacagctgaagtgacctctgagaaactcagatcaggatacggcatatcgcagcagtatatctcccataggcagattccaaagctatatacatcacacttcctgttgtaaggatggccgttgagaacctgcacaatgatgccaacgtatgacagtaaggacaataacagtagactagaattacggaagaatggtacgtgcaattttggaagatcgcagaaacacaacatgacaatgaataagatgattgaggggatgcagggttaagattttccattcgccaagcaataagttttttgaacgataccagcaaggaaattttcagtgacatatagtcacttttcccttcttaattcgatagtttggtataagtaaagacctatcagcataaatgatacatgatcagcataagatttccgtatggttgaaggaaaatacctcgggtgccatgtaaccaagtgtgcctgtttcacccgtcatatcactaggatttgaagcctcaattcgtgcaacaccaaaatcagcgattttcactgttcttgatttgtcaaggagcatattttcagtcttcacatcacgatgaactatcttctttgagtgaagatagcttaatctgtcagtgcaaatcccacaacaaaatcttctgagattaaaacggaataatagatgtaaatccagaaaaaggaccaagagaaacatatattattacttaccccctagcaaggtcaagagccaattggaccacaactttataggctagcttccttctcctgttctttatcagaaaatttttcagtgcacctccggcaaggtactcgacaacaacgcagcaaatattacttggcatgccaaaatgtccatgttctgtctgtatatttaaatctcttgcacccattatagccccaataaactgtcagttaaatttcaagatattgtcaggacccagttgagaagcagaagacaactacgttcaccaagtgaatgaaaaaaataatgataattgttgatagctcaaaatgaactgtgtagatggcagatactaatatttattgcttggtaaattcggcaccatgttctaaaatcaattccattgtaattatgccataccaaataggagtacgcaccttcaaataggagtacgcaccttcgctactattatcagaaaaaaaatattgtccaattatacaagattctaatgctctttagcagtgcatggctaaacaccttaataactattttatacagaagaggaaaacatggaatccaattttagacacgatactgggtgtattatatagctagcaccagagtttgaacatgactgccagtcctcctactgtcatatctgatatctctagccatgaaaatattattgcaccacaaccaatggtttccttaatagattataatgccagagatacatcatgataaaacaagtttgcccatgtggttgtgccggacaatattgaatacaaattggttttgtaaaccagggctaataaatgtaaatttcccaaatgttctgtaaaccagagataatgtaaattggtctatatatttatcagtgaaacgatttaacctatgaaatttgaagggatgaaaaaaaaaagtcttctccagtcaaagattaccttggtaacatttggatgatcaagcttatgccagacagcgacctcttgtgcaaatgctgctcttagtgaagaaatttctcgttctgatctatggccatcctccccccagtcaagcattttgactggatgatagagaagatatatcagttacttcgacaatgaaactacaagtagaaataaaaagtcttttttgcatttagcaattgattcgaagacaaagttatattgaagtagtaatgctgcatattactacatcaatacacattctttttttaatgtaaatcaatagcacattcttgatgagggtaacaaaatcttggtgaactgtgcatgtctctgttttcctaaaagtgtatttagcaattagctgttaattgccaagtttgaatctatctgggggaatataatgtgacaagtgatgaattattcatgcaaaagcagtgaggaagctggttttgtcatacaaactaaagtggtagagaaaggcaagccaataaaaaactccagtgagttagcaaatactttgaaaaataaaaaaaagaacatgctggaggaacactgccatttaaaggaagctgatggggacttgaaccctgactaaaaccaccgctaccttgtgctaccaggttacatgagcatcaccaagtgatttaggattctaatgacctcttatgaatctaactgatactttccatttcaagacattgtactcaatttcctggtgaaccaatatattgaaaggacggcatgcaataggtgataaagttctggacagaaaaaaccactgcatctgcttttgccttctgtcatgtgattatagctggtgatacagtgcaaaattgctaatccggaccttttatcaacccgaatttggttcagatgcttttgaattttcctggtccctgaaaagtactgtgcctagttgcaacttgcaactttttgatctgaaatatccgctgctttaatatgtaatcttcaacttccaggtgctcatcataagacaaaacacatgaatcatgcctattaaaacttttaactgttggttggttcaatcacatgagaagggttgcacgccaaaagcacgcttatctacccagaagtcacggaatacaccatggaatcaagaaaagcagaggtatcacctttagcaatttgctgacaaggaaaagcactaatgacacgacgagcgaaaacaacttccaaaagcacccgaaacaaccgcacctatggtaaatgacgtttgccatctatcaatcgatcggctctactccataatccatatcctaatccaggaagaagaacataccgatgaaaataattaaatcacgcatcaaactttcctaaaaacttggagaggaatcgatcggaaccagaagctaacgcaggcagaagaagccactaacgagtactagtaagcaacaggccatttcatcgaatagctcatggtcatggacagcaaaaaaaacttggtcagcgccgagtggacgaatatatctgcaaagcaatcagctgtttatagcagaggggcgaaagaaaaaaaaataccagcgacgtcctggccgtcgtagacgccgcggtggacggtgccgaacgtgccgcgggcgatgacgcctctgatgacgagcttggcggggtcgatctcccagtcctcccggcgccgctgatggtgcggcgcctgcggcggctcctccccgagcccgagcctggcggactcgccgcggcggctcccgctgcccccgtgctgcgacgcggcccgctccgcggggcggccgaggtggcgctccagctgctcgtcgaggctcttgaggtcgatctggtccgcccggacgaacccggcgtccccgctcccgccgcccgcgccgggatgcctcatcgcgctcaaacctgtcgtcggagctagcgatcgatcgagcgagctgggggggttgggttcggtggcccggggtgggtggaacgtctctgtactctggtggcgttgtggatgccgcggcgtggtggtggtggtggtcgcggtggctacaggggaaggggacgggttggcgaggcggggacggaggcggttcgaggtcgtcgtgtttggggagacgacgacgactccatgtgagagcgcattggggtgtggggggaaggcgaagtactaggcgcactaggagtaggccagtgatgatgacaacttgacaagtggtgaccgaaggagactcgtgtcgcgggggtggggcccgactggagggggggtcgtcagggagtcggaaagtcagagctcaggaggtttcgtttgtgtcattgggcccatttggcatctttttcggccgggccattggcccattagcatctgatttcgcataccgtgtgaactgtgaagtagtatcacgtgtgagttgtgatggcgtgagtctcgcgcctgcgcgcaaaacggtgcggccgttttttccgaatgttttgctcccttcaaatcttttccagtctacatagaatatataggagtattttgttgaactagtagcgggtgcactactacgtagtactatacctgtacaagtgtaatgtttgcaaattgcaatattattatcgttacgtagctgttttagtactgttaaaacctgtagaaaaattgcctcccacgaaaatctacagagaactgaaatgacagtagaaaaattggaaaaaaaagaggaattgtttttattaaaacaatcgcttgaaagtggtcctagaaccgtagttttattctaaaacgttccaaagagagaaacgtcaggctttctagtcggaataagttcacttcattacccatttgatcgaaatctaaaccataactctaaactacaaaaccagatatctcgatcttcaaactcctaaaaccggtgtaattggactccctgagcggttttgggggacggttttgctgacgtggcgccatgtggcgcctacgtggcaatattgaccgagtctttgttacacgtggtgttgatgtggcacctacgtggcggtagaaataaaaagtatgcgtgggacccattagtcattcacacaaaaagaaatgtgggcccaccttcttcctcctccctctctcccttctctctctttctttccccttcttccccttcggctggtggcgcgcggggacagcgagagcgagcggcgtcggcatcgggcggcggcggcggcggtgcgggagaggagctggacgaggaggcagtaggcgcggagggagtggggggtcgacgacgacggcgacgaggaggcggcccagtagaagaaggtgagcgcgttcctggcgacgagctccggggaggagaagtggcagtgcttggcgaggagaggaggacggcgtcgacatgatcggcagcggggaaggcggcggagagcgcctccactgtcgctctcggatggtgcgcgaggtagtgggagatgcgccgaggcgtcgtggcggcggtgacgacgatagcgcacggcggaggaactcgccggccgtcggcacgcaggggaggaactcgccggccgtccgcgcgtggggaggggctcgccggccgtccgcgagcgggggaggggctggagctcgccggtggtagggagcagcggcgaaggggaagaaggggagagaaagagagaaaagggagagagggaggaggaagaaggtctgacatgtgggccccacatgtcagtgggcccatatttctttttgtgtgaatgactaatgggtcccacgcatactttttatttctactgccacgtaggtgccaagtcaatgccacgtgttacaaagactcgatcaatattgcacgtaggcgccacgtagcgccacgtcaggaaaaccgcctctcaaaaccgctcagggagtcaaattgcaccggttttaggagtttgggggtcgagatatctggttttgtagtttagggtcatggtttagatttcgatcacatttgagggtcatgaagtgaacttattccctttctagtcctgtaacaactttctacgtaaaattagagcccacgaaggcgacaattctggcccgttacagcgcctgaagaacagaaggcctagacagcagtcttgggccgcatcgagccatacaagcccaggaaataaagcagcccagttcaattctatcctgttactactaatttaatcgcgagaaaaatccccagcgggagagctcacgaactgttcccttcccatggcggcgctgcctctcctccggtggggcgcttcctccctccgaggaggccactcctccgctccgccttcgagccgcctcttctccgcgctccgccgacctcccgccgccgcccgctgcgagcccggctcgagggtcatgctcaaggggatggactaccctgagctcgaggtaagagtactcctctcggcgtacgagttccgtggatccgtttgcgagttgttggtcggaggtttccgttaagcttatctggcgcgctcttccgcagaattgggtgcggtcgcagggcttccggccagggcaggccatgatgctgtggaaatgcctctacgggaacaacgtatgggcgcattgctatgacgagctggctggtaggtttcagtgtttagttgttatgccacggactatattcgctataattttgcagtctacaggttaattcctctattagtaaccttgagagcacatatatactacaaatctacaatggtgtctatcctgaaggaaatgaatgccaaattgtcaactgccaaggagataaaatctactcataggatttctgaagttttgatgtgtcagcaaagttgtttatacatgaaaactgctaaattagaagtaggttagtggttctattcgaaagtaaaaaaacatgctactccttttagtctgcatgtacttgttgcattatgttcagatgtgcattttctgcaaccttactaccttcgttacagatcagttcagcatatatactttatctcttgctacattatgtaagcagcaaaatctaaaaattcgtcataattcataacagtagtatttttaggggcggattgaaaaccagcggcatttgatctaacttaacaatggtattagcgtttcagaaagtcatgctccattagtgttattttctgaatccccacataaatgtagattgattttgctatcaaatatcaagtagaatttattttcgacaagcaaaaccagtaactttaccaaagctttacaagttttaagattagctgtgatggatttatattgcaccattttgtctttcttgtttttgtgtaagggtgtattccagtgatccagccaattggaacctacaagtggatttagcaattatcttgtgtttctttttccctttgtaattttggttgaatgaatctgatcgtttgcatctaatttcatccaggtttaaacaaggacttcaggaaaatgctaacagatcatgctgatcttaaggcattaactgtgaaagacattcttaacgcgtcagatgggacccgaaaggtagtttcttctgtgttacttatatcttctgtactatcttcagatcattgattatggaacacagaatgctacagatactgttctctcttgaagatggatcagtgattgaaacagttgtcattccttgcactagtggcaggacaactgtctgtgtttcaagtcaagtgggttgtgccatgaattgtcagttttgcttcactggaaggttcgtttacttcttttgaataacacttaacttttcaatgattgtgttggtgataattttacagcgttgcttatattttcatgctatatctgtaggatgggcttgagaaagcatttgtctacagctgagattgttgagcaggctgtgtttgctcgtagactgttttcagatgaatttggatccatcacaaatgttgtatttatggtaagcatcctcctcatggtaactaatggctctagcttttatggtcgttgactgagcagctgactgtatagttaattaacataattcactttgtagtttacatcttgaatctgtatatatctatctttaacatgccaatatttttgaactgtcgaacatatccttaatgtgatatcttgtgccacaactgtcaagataatcatatagatatgtttttatgcactctgttttcttacaacatccccctgcttctgtctgtatttcatctcaatggtatcaatattaactgttgttaaaattcaattttgttaacttgttacattgttttggagaactgtgttagtttaactattagtcttatcatgaactcatgggtgtttaggtttgtaatattcactggcatataacagttaattgattgtctgccttgcatttattcatatgatgcttgcagatacttctacaacctttcattaatatcaaacttttacagggcatgggtgagccgttgcacaacattgacaatgtactaaaagcctcagctattatggttgatgagcagggccttcagtttagtcctcgcaaggtcactgtctccacaagcggtcttgtcccacagataaaacgcttcctacaggaatccaattgtgcgctggctgtgagtcttaatgcaacaactgatgaggtgaaatccagttttggttgttgtgttgcaaaagtggtttggcattgttctgttgtttctataagtctatactatctttttcttaggtgagaaactggataatgcctattaatagaaaatacaatctcagcttgcttcttggcacattaagggaggaaattcgtttgaaaaagaagtacaaagtgttttttgaatacgtcatgcttgctggagtgaacgacaggtgaggaacctttggattatacaaaaatttccctgattgttgttggcttgtggcaattatgttatgaagttgtcttgaatattatttcttaatacttgcgtaaaactgtttttttttcttatttggaggtattttacatataggccagaataatttagactataattgctactcttattgtaatcatctgttcatagggaattacttgtatgtcttggaaataaccttttttgtccttgcaataaaataagttaccccttggcccttgtatgattgtatcattaatatttctgtggattactatgcttacagtgtggatgacgcgaagagactagtagatttagttcgcgggatcccttgcaagatcaacctcatctctttcaatccccatagcgggtcacaattcaagcccactcctgatgagaaaattattgagtttcgtaacattttaattcaagatggccttgttgtatttgttcggctcagcagaggggatgatcagatggctgcctgtggacagctaggagagcctggggactaccagctacccctgctccgtgtacctgagaaattccaggtcgctttgtgactctaaacagtaagtacggtactacaatcctcatagatattgtagaatagctttgacaaaagacatgtaactttcatgcggttcttagaggtcattctctgggccaacctgacgactgacggaatatttttgttactttctttaaggaaaatttttgttgttactacaacaagacagtgtcttcagctggcttatggcatgtaaaagaacatttaggcatagtgccgctaatctgctaagtaccaaaatccagtattttccatggatgtgtgacgcttcatctctccctatccgaattgccattggattttagcaatatatgtctgcattaatgcttccactgtgcaatacaaggagataaacctaaatcatgcaactttcaagttcatggcatttaggcactttgcatagttcctgattcggcctaagtcgtcaaagttaattctttggttagtgcaggtatgacaggcatctccaaaaggttttacaagattgtgccttgcttgagataccttaaccattaaggtgtgcatgccattgccacgacctgaccaccatacggaaggaaaggaaaagccaatctagcgcaaaccccacctgtaaaagtcacttctttccaaaagcaactctattatgctgcacatattgggcgtctttagcactaatctgctgccgaactggcagtctacacgtctactcgttgctttagcagaggcatagattttgacagttgctgattttgtatatggcctagtttagttaccaattttttcttcaaacttctaatttttccatcacattaaaacttttctacatacatataaactttcaatttttcatcacatcgttccaatttcaaccaaacttttaattttagcgtgaactaaacacaccatgtctgttctcttctgcgagtggctcttctttcaattatattttcggcactggattcttgatatttgacacaagctttaatatacggactacgtgttcatctcctcacctgctcaccagttttagcaggaccgacatctgctggggagccttggcgacaagggttgtgacatttgctgttgtcaagtccactttgaactaattcttttcttccatgttaaataaaagcacaaccttttcatgggccccccttgtgaaacatcctctattaaattctggtttcagctgctcaaggcacctagcaggagtacttgccctccaggaatccctccctgtctaaaaaagaatcattctacatgccatcactaaaacactatctgttattgtttatagcggaggcaattattaaagagtggtcctgttcgatctgctgcatttgttttacagcgattatacatcctcagagatcatttctttggacaaatatggtttacgaggtccatgacgtacatgtcaaggcagcaaaacataaaaactgacagcaactcatgttcactacagggcccacaaaatcatctcaaaccggatggattagcggcctcttgtgcgaactactactgccaatcgcacgtcttcacgatgtctgtctctactagggagtatactggtcttttcctggacagaaataactccctgtccatttcgctcctaatatcatacaatcgttttgacccttaatttgtagccgtcaaagacggctccaattcgcctaccacgacgatgacatggcaattatttacgggtaataattccatcatgctagcaaatccaaacttaaataagagtatagaataagcttgcgttctgtcgccacctagatccgatcatgaatcatgatctgattaacttgcatcacacgcgtatcctaattctatcaagaatcctcgcaaactgaaaaaaaggaaaaaaatctgacaagaaaagaagaagaacaggaagttgtacacgcccaaagatctgtgacgttacagagaaataaccgtgataatctcaaatccaacggcaaaatcttggatgggggaaggaaaagcgaagtgcggtgcaacgtggaaagcaacacgtaacctctccacccccgtgcttaacacgggcgcccatccctcccgtcggatccgcctccctcccgtgtttgcgccatgggcgagaccccgcgtaccccggcgccggataggccgccgcctcccgtgccggtgcgcgttcccgtgccagagccccagcccgagcccgagacgccgcaggcgtcgccgtcgccgcctcccgcgcccgatccgccgacgccgctgttgtttccggagtcggcgccttcgacgccgcgcgaggagtaccacacgccgccgccgtcgctggacgaggcgcgtgacgaggcgctggtgcctcatcaggagggcgtcgtcgacgtcaacgggggatcggaggccgccgccaagagcccgcagctctcgccggtgcggctccaggtgtcgccctcgccccaccggttgctcccgcctgcgccgggctctcccgccgtcaacggtgaagatggcgccgccgggacggcgcaaggccgccgtccgggacgcccgcaacttcacctcgcgacgggccgcctcttccggacgccgtcgcaggggtccctcgccatgtcgtcgccctcgccgtcgcctacgccgccgtcaccgctgactccagcgcccgccaccaccgcgcccgcacccacgcccacggccaaaagcaagagcgggcagaacacgccgaagcacaaggaggcgttgaagccgccggccacgcccgtcgcgacggcgatcgcgataccgttcaacccggccgaggaggccatgacgtcgcctctgcggatcggcaacggcaaggccgcgcggctcgaccaccagcacgggcccgtggcaggggcggcggagaacggaggggacgtgccgccagaggtggcggccgtggccgccgtcggggagaggaggacgacgtcggtggcgctgcgagtggccacggcggtgctcagcctggtgtccttcgcgctcatggtcagcgcgcggacgtccggctgggccggcgaccactacggccgctacgagcagtacaggttagcgaccacttttgcctagatgctcgttttttttttctcttttgtttgtcacgttttagtcggatttgtccgggttttgacggttacgggagttggtacttgtaggagtagttagtatctgacttcttgggagttggatttatttttctgtcttgcaattatgggggttaattgaaattatagtcgttcttactaaattgattgttcgagaattttcgttactgttccccattggtttttgtcattttgctgtatacaaacgtggatactggttctgggaagctatattctgtactcttgttcaatagtacagagtagtatttcacgtgctctgcttgaaattcagattttatcgtggttgatccgttgatgttacgtatgttgtgcaccgatttttgaaaaaaaaatattgttgtacaaatagaacttgcgagtgaagattaagaaaatttaaacacctcgtgaatgcagagatacttgttttgattcaggtcgcttagaggtagaacacaatttcagttttaggttaagacaataatcaaacggttttctctgaatttctaaactagctcaactctacactaaacagaggaacatagcttcatcttttggtggtttaataactttctcttctccccattgaacaacactaaaacttgcaggtacgccgtcggagtgaacatcgtcgtctgcatctactcgatcgcgcaagcgttcggcgagattcgccgcctggtttcgccgaggtttcttttccggagcacctcgagctactacttcagcctcttcctggatcaggcaaagccccagcctctcatccttcacctgaaatgcgccattccaaagcagggaaagcagaggtgtttccggtgtctgaccatctgatcttcctggtctcgctgcaggtgttggcgtatctcctcatgtcggcctcgtcggcggcagcgtcccgcaacgatctgtggatgtcgagcttcggcaaggatccgttcaacaagaagatcaacagcgcggtgtggttttccttcatcgcgttcatcggactcgccaccaactctctcatctccacggccaatctcttcagcatgatatgatacgtacggccatctctcaagctgatttggggatgtggagtacttagtttccatcgtgtaaatttttgtggcacatatacacatatgttctctgtctagggtcatgatcaggaattcatttgcacacacacgactaataaaatataggataaaatatgttacactgtttcatgattaaaatatgttacactgtttcatgattaaagaagcttgatgtgtctcaaagtcctttctttgcatagcattgctagggattactgttgcaaatcaatcgctgttgagatgctacaaattaattatctgtaaagatgtggtgattatatgtaacatctaggatagcacagtatctgagagactgtagctgctggaattggatactattccccgtccggcaacaggaacaaaagcgacggtgacactactatctgacaccactatagtgtgctgttctctgttgatttcgtccaacctacgacttctttaatggatgcatgcataattcataattgcatatcgtttaagattctggccagtcttctccaaaacttacagagaatcttgcgctgaaccaagaacgtacatttctctgaccgaacacaagacgcggtctctactcgtggagctcgatttggttcactctgctcagccagatggagtgcaggatcatgtggaagaggtcgtaccggaggggcctcgcgtgccacaggaaatgcctctgcagccgcttgacgcagccgtgcatggccacgtacttccggagcgtgatcccctgcagtatcttcttcaggtccggtacgtccttctcggcgacgaccaccgcgaaggcgctccagtccagcacgtcgctcagcggcagcacgaagttgtcggcgatgatcaccggaacgcactcgtagtagagcgcctccacgatccgggggctgttcacctcgtaccccatggggcagaggcagaagcggctgttcttcatgtgctggatgtagctcatccgccgggacacccgcgccgggagcggcccgtacacccgcatgtcgtcgtcgcggccgtcgccccagtgcttgaggagcaccggcctcaccctgccgtgcacgttgccggcgaagaaggcgaggatgccccgccgcgacaccggcagcccgccgacgtaccggagcggccgcctcggcgtccggatcgtcgtctccgggagtgacacgtccctgcccggggtgaagatcccctccgagctgtccgcgttgcacagcgccttgacggtgttccggcgcaggtcgccatgcgccgtcgtcgtgtaagatccctgcagccattgccaggaaccaaaaccaaacacgatcaaaactgcaacacaaaaagagagtgaaaaaaaaaacatcaagatgttggtttacccaatcatggcaggcgacgaggaaatggtcggcgcctctggtgcgattccagaacgggtacttggcggcgaggcctttgacgaagtcgcggaggtaggcggccagcggcctgaggttgtgggagtcgggaacgtagagcgagatcctgagctgctgggagctgtagggaaggtagaagaggtgcgccttggcggggtcggtgacggcgaacctccggctctccttgaggagcttcatgaaccagccctcggacgcgtagatgccgctgaggggaggcgtgtggaagatgggcctccggccgtcctggtaaatgtaaactttgagtatccgttccatcagttcatagctcctggatgatcacattttcgctacaattatgacaagcttagtcaccatactgaattatcagtggtacaaaaatctgtacaaaatgcagaaatattatggtttgataattatcagtggtcaacataatgtacgatgccgttgactttttcaattaacgtttgatcattcgtcttatttaaaaatttataaaaaaaatatgtaaaaatataagttaagattataatttctccgatgataaaaagagtcacaacaaaataaataatagttatataaattttttaaataagataaatgatcaaatgttatgtaaaaaattaacaactttgtatattttaggatagaggaagtaatatacgcagcaaggaacgcaaatcgggagacactaacaatcatgtatggagatgttcacaattccggattttctttttgttcaaaaacaatttcgaattgtgattttggggtgggtaatgttttcctacgacgcaaaaataaccccccaaatttattcgaatttcatgaaaaatatttaaatttcaaaatgtttcattcaaattacaatggttatgtaaattctcgctaaccatagcttgaggtttagcaatagtagtcattcgtcccacaaccttatgtaaaaattatctatagtttctttgaagaaaaggctggaatgaatttcattactaaaaaaatgatcaaaatttctaaagttcaatggaaatttctaaatatttgttcccctgaaagtttcccgttccgaaatagtgagcctcttgggtacaaaccacggcccattgacttgtctgatctgacatcacaatttcgtttaaaaatataagacactagatatatttatgatacattaattttcactaaaatgtagtcaaatcagtattatactgtaatatatctatattttcattttaattacactataaatttaaaaacttacaatataattacactgtaagttttaattattaatctatatgttttccaatacacactatataagagaatttaagatataaaaaaattattacctccttgaaagagcataagggatagaatgttagttgttacacacatatataagatgtatagccatcaacatagtaaaaaacgatcgaaatctagtaaaaaaaaatacacgcttctacatgtccggaaatccagagaaatagaaaaaaaaccggcaactcgatcatcctgtttatcaaaacatgctagaatgagacgaactttaatttggtagctggtgcgtgaaacgaggaacggaagaagaagcgacgcatgcaccaataatattatacctcttgaactgggagacgttcttgaagagaggcgcgtataggtcggggtcgtcgatcaccggcccggcggccattatctccttcttggcgtaccgcagtgcctcctccggcgccatcctccaatacgacggctgatcaccagttcgacgcaggaattaacaaactcgatcgatcactatgctaacacgaataaataataattagatttggatcggcctctgctcgatcgatcgcgtacctctcttcgtcgcggccttgcagcaggtggcggtggcgcgggaggaggaggaggcggcgtcgccggtgctggaggaggcgacgagggcggtggcggcggggagatcgcggcggacagtttcccggtgaagtctgtggcgggcacgtggggtgaggatgggagggagaagttgaggagcacggtggtggccgcggccgccgcgacgagggaggcgatggccccgatgcgccagcaggagacggagaacatcgcgccgcggcggtggtggagccggcggcgggacgggccggcggggtggtgcgcggtggcggtggcgaggcgctgtggcggcattgggtggaggaggaagcgggaggcatgaatgggtggaagagcgcgcgcacgcgcgggctggcgagcgtaggcttgcgcgtggccgagtttgtagagaaacccgaggcgcctacggaccaggtgctcgattttttctgagaaaaataagatgcccacgatatcaaatgtgatcatacatgcatgcatacatgcaaaacttcctagacaaactttaaaactatttttcctcttaaattatttattcaaatcatggtcggatgacaccattaaatccgttccaattaaatctttaaaacagtaccatacatggatataatccgataaaaaaatatttagcttattattgaattatttttaaatgttgcatgttaaatcaagtaaatcagaattgtttcgctaagtagatcgcaaatgtttcattttttttaaaaaaaaactgaaacaaaaccaaatcacctcatgaaacattttactaaaatatatgaaacaacggtttctcaaaaaatggggttgtttcaccctgcgtaaaaacaatattttagcaaatagcgaaatgatatttcaattcactgcaacatttgatccatatatagtgaaacattacgagtacactaagtgaaacatttttaatggaacagaaaatgaaacggattcccttaatagggggtttccataatacgtgggtgatttgttgcaaaagaatattccaattcattgtaacatttgatccatatatagtgaaacattttttgtgcataaaaaaatgaaacgaattcctttaatagagggtttccataatatgtaggtgatttgttacaacggtgtgcgtggtggggacacgtggcgggggcggcgcgtgcgcggggccgcggaggagtgcaggcgctcgatgcatccacgccagcatcgggggcccaatttgaggcattttccagagaaaccaccgcgatgcgcggctgccactgtatttttctcttcgacactcgatctcttcagatgggccgtgtgtgggctgtggcacggggtgggaggattctgggcttctagcccgatttggtctgagagatcgagactaactggaatcatagaatatgattatataactttttttacacctggagaatcaaaatgacaaaatctaacagtgaatagttcgtgcacaatccaagcagatttttttatcccctccgtttcatattataagtcgctttgattttttttagtaaaacttttgtaagtttgaccaagtttataaaaaaatatagtaacatttttaacacaaaataaatagattattaaaatatatttaatgaaatatttaataaaactaatctggtgttgtagatcttgttaattttttttcataaacttagtcaaatataaaaatgtttggctagaaagaaagtcataatgacttataatatgaagtagggggagtagtatcttttttctcggtgtatgtcaaatttggttatgcatgtttgtttagtgttcagctttttttttaaaaaaaaaaacatggacaattatccctaccctcggtagcttacaagtttatgcccatccctggtctagtacaatttctttaattttatcccttgatctcaatcaccatgctatgattttattttcatcaatttcttggagttgaattgtaaaagagtagaatattataataatggtgtcttttctcctcttaaaagtgttcttttccttcttttggatatatagacctatctgtattccctcaaatgaagcattaaactatcgtttggtacaccctcattcagctaggcaaacacatatgcgaataattttcaatgttattgaacactagaaatacaagtcgtcttagtggtgcgatctgtcggtgagcccgggttgcctagggtcatcgggccttggatccgccccctgcatatataccttatattgacactctcttaaaacacaaccattgccatctctatatgtgtctaacaagaaccttgaaatgtctaccttgcttgagatatcttaaccattaatgtccgaatgcttgtcatttgtaaccacttgaacacctagagagagaaaagtggcccagggctaatgtgagaaaatttagtcacaacaagataactatcttgttgagaaaggccagatgacatagcttgaaggagattagggttctagaaaagaggaatagacatagactagggcacagatcattggaaggggaatcgatcgattattcttgcttcattaacgaagatatatatagtaccaaaccttttaaaggggtgcctcgatttgtccctaagataagtactaatttctattaggcaaaatttgttacaggacacccaaaaaaagtgtaattagctgtgggacaatgcaaagacgtgaatttgcccgaggacacttcaaaaatgtggtaatttgctgcagaacactaaacgcattaaaatataatatccagtcaatggatgagagagaaagcacataaaatggtaattttgcccttatcttcttcttcctctcgtccttgcccaacatagagtagagcctcctcagcttgtcgtgtggggcgcgcatgggcacatgcaccagcggccgattgcctggaacccctccacgcaggcctacgactgggtcggcttcacctgcgacgccaccaacgccaccatccttggtctccgcccacctagcgtcagcctcatcggatgctacgcctctaggtgctctcccttcgatgcaaccacctcttcggtgatgtcccatgtgacctcttctccctccctggctccgtcccgcccgacgtcgccaagctcacgggtgctccaacaccttgctcgcacgcttctcgccggagtccttcgccgacaacctccagctctacgataagcagttgagccagccatgcgtgcgagtcgttcttcccgtccccactaccctctcctgctggcgcgccgacggatagcggtcgttccatgctagtggcctataaaaagaagtggaaatgtccggcacggcgatccacaacagcggtgaggagtccgtggcggcgggcgtggcctgcgaccgcactcacaacaggggacgcacgcgagaggatagtcagaagaagaacgagagaagggagaagaagataagggcaaaactgtcattttacgtggtttctctcttatcaattgactagatattatattttaatgtgtccagtgtcctgcagcaaattaccattttttagagtgtcctcgagcaaattcgcgtctttacggtgtcccacggttaattacacattttttaggtgtcctgtaataaattttgcctttctattactacagaaagtaatcaatctaattttatcaatgaggaaactaatctgaccaaattgcattgttggtgccttgttattaataaataatgagagaacaatcaatttggttcctcaacatcgcttagggtgaccttgatctctaacatgtctttaggtgaatgtggtcgttgaactcaccttacacgccatgctaataacaaaataactcaagaaaaggttaatgttgatctcaatctcaatgttaagaatagattatttttcatccttttgtgtcttcattcaagataaataaagcctactactttttccatttcaaattattgtcattctaggttttgagtccaacatttttaattttttagcattaatttctaaaaatccgtgtactttaataacataataacatgtgaattagatattatggtttgccaacaaagcttcgaagagttgttttctacatatgacatatcggatgggctcaagggcagatccatgagtactttgtacgggttcatctttttcctcctccagcccccctaccttcttcctcttcctagcccccctaccttcttcctcttcctcttctgatttttctgaacttttctatttttatctttaaacatgaaccctttcaaaaacttatttctaagatctgatctttttgaccacgtcagtcggactagcgtggtaaaacaacaccatcaggctagtctgattagcgtgaaaatgttatttgtttacgtcgatttggctggtgtggcagcgttatttgactatgccaccctcgctgacgtgacatgacaaaactgtcacgcccgttgtgtatggcgtgtcagtattattttattacaccaaacaggctggcgtgatcaaaaggttcagattctacaaataagtttttaaatggtttatttttaaaatttaaaaataaaaaaatgatcttctcttcttccccctcccctgtctcccttctctctatgcggaaccaacaggatggggcggcccccaacacccacctttggatccgcccctcggcaggctcatagactaagggcctgttcagattatagccaaaataaatcttacctaaaatttgggcaagatggcaatattgctaaaattttggcaggatttcttatgtatttaccaaatttagtaacaaactaaatgtagatatttttttagcaattttacttaaaaaattgtatatttgaaaatgacaacaatttgaacacgctctaagataaaagaaacatccggaatcaaagtgacttcaggctggtttggacagagaaacatccggaatcaaagtgacgtcaagaccaaactttcaaggacgaaattgactatgttaccaactataacgaatgtaactttgtccttgcactctaaaaaaggtggcacggcggagccaacggactcctctcgggccgtccacatgatgcacaaaggcaaccagctgtaaaagtatgcatgcaatgcttgtttctgaaggaaaatccattgtactgctacacatatacgggcctgggagtctacacatctccacacaccttgctttagtggggacacagatttggacacatttcagatcatatagatacatgatgatctgatcagcagttttagcagtagtaaaagactttctggtttgctagaaagatgtcgacattttgttaatctcagtcagtttcctgtccgtgtccgcttgctccacacgtataggtatagatctttagttgtttgcctattttggtctgcctgatttttttttccgtggcggcatattataccttttaactttacattaaaaccttctccgggaatatcaagcatagttcatagcagcgcttgctgttttaagatatgtattattttttttacatgtgatttggttgggatgttatttgttactatcatgtggagtttttgcaggcccgttttaaggtgtgaatgtgcttgttttttacaatatatgttcgttagattgtacttacatctacttatattcacttacatatataattttaagaatttacaatataaatatatgccgactattttttataaaaatacgacgacatatatagatagttcctaaaattttgctctgcatggtgatcatgagcgacagatcttgttgcatgtcaagtctactctagatcaattcttttcttccttaacaaataaccgtacaatacataggaagtactaattaagtgcatcctagcttcatttaattctcattcaaggcacccactcttctcacatactcttcttgtcctaaaatatacagtcttaggataggaggactacgaatatggatatatgaatataatcccatcatatcctagattgcagtatattgggacgaaaggagtagtgacttaagaaaagatatattggacataaccttgtacaatatatcaagatatccttattgtaataggttatgtctgatcaactcctagattttatatttcgggacaggaaagtaatataactgaggtgaactattgtcttccctagtgatttgtacatgtcatccaaaatgtaactaaaaagattttttttttaaaaaaacaacaagatagataaatataaaatatatctgtagcgcccgttccgtcgtggcgcctagcgggaaaattatctcttaaaaaccctaattgcgaaatttgtttctttgcttgttgtctagtgtccgtgccatctcaagatctcaatccccgatctatcgtcgagttcaattccgaatccaaatccctccaaattaaattcctccgcaaaagtctagtttgcctccctgggttcgatgggccgaattccgctcggcccatctctccccggccccctctctcccgggcgccctcgccctccttctccgccccgcccgcgcgccctcgcgcgcgcgcgtgcgcgtgagccgccgcgccgagcgccccctcccttttccctcgctctgtcgcgcctgcagccgtgcagccgctcggccccgcgagccagcgtgtgcgcgccagcgcggacgccgcccgttgcctcccgtgcgcgcgtgccgtggtggccgaccgcctggtcgccgccgtcgtcagcgcctgccgcgcctgtcgctcgtgtcgccgctccgctccataccgcccgccgtcatcgccgtcgtcatcgcccggcccccgccactccgcgcgcaagccgccaagggacggaggccgagccctcctttccccctgccgcgtcgcccccgctccctcctccttttcccgattcggcaaaggggcgagccccctttctctccctccttttccccttttctccatttttcccctctcgccggcgtcacctcctgtcgccgctttggacgctagccggagtgccagctcgccggcttgaccgcccatgtcggttcctctctcccaaaccgacattgccgcccatttaaacccgtcttccccctcccttcctttcctctcccattcgtctcctcgccattgccgccgccccgtgctctgtctcgcctccgccgtccttcgccgagcgccggaagagccggtgcgttcgaggacgcggaaggggacttcggccgcgccctcttcttccttttcctcggcccgaggccggagagatcactcccgcgccgtcggcctctcgtcacagcgcccctcctcacctcggtagtgcctctctccgttcttcctcctcgctccatctcctccccctagctttcggtagtagcttgagtagcctccccgtagttagccggcgccgccccgaccgttgccgtcacttgccgtgtgctcaccgccatcgccacccgagctccatagcacccgctcatcaccagtctcactcagcatagttccacccaatccaacgctagcatcgagttcccaaagccacttatatgctctcaccgccaggaatcaacctctcatgacctcatcaccatttccctcttctcccgccatcggttgccgccgccgcaatccggcgccgtcgagcaacctccggcgaatccaagccgttggctcgcctccccttgtcacgtgcaaccgcccggtgtgctcgctgttgcccgtatcaccgtggttcgctccgccgctcgccgctgtcgtccgccgtccgttccggccggcgtcgtcgtctacctcccgccggcccgcgtggctgccacgtaggcgccacgtcggcgccacctcggccgcgaccggatcagccgacccggccagccgctccctccgttttttccccgtgcgcatggtccgcggtgagccgtgaggctgcgcgtgggcccgccgcatccgttcctccgcgaaccgcgcgcgtgcaccgcgtcccagctccgcccgcgcgcgtacgccgcaaattccctccgcacggtgagccgagccgctgccaagcgggtcccacccgggaccgcgcgtggtgagcccggtccaccggactctctctcctccctcccgcgcgcgcgcttgggccgtcttgggccggccggcccgttaagatcggccggtccgctccatttcccttgggccgcgccctagccgcccgagagaagtctacttctcctccctcttcctttttatttttctcaaaaaggatttaatttaatcctttttcctttagatcaaaaatccaataatcttagaaattcaatatcttcccaaccgtaaatccgtttgactccgttcaacttccaaaattccccaaatctcgagatctatctaatggcacgcttagaggtcattaatagggctttatttttttcgccgtttgttgagttgtcccgtttcgcgtgtagtttcagagcccgaagacccgcagtgcgaggatttcgaggatcaagctccagatctcgagcaaggcaagccacctttgaacatcttgaacctatatttgaaatttaattatgttgcttgaaaaaaaatattatgcattgataggatcgcacttaatctgctgtcccgtctgcaaggcagattggcggacttacccaatttgttgcatttgatccttccattgttaattgctatatctggtccccttgtaaccatctagttgcgtctcgatattcgtgcaccccgtgcgagtatcgacggacgccttcaaacttaaaatctgaataccaacttgggtaaaactggagttttacaaaagacttggaaaacccgacacctgggtcggtgcttgcgaactaaatgaatttccaaaaccgcggaccggggaacgtaccgggtgtacggtttcccgctctcgcacttaaggaccgattccttggaatttcatccaaacataagataagtacgaccacatgggtggaatgggacacccctggctgagtaactagcttatcaggggagccttgatgccgagagacatgtggattcaccggggtggtgtcggggaggacccctgggcttgctggcacagtatggtctgggacctaccctgttgttggtctgggacccctctcgtcggcatatggtaaacctgtatcggctttcgaaatgccttgtcatgaaagcttggaggtctcccgacgtggctgatcccctcgggctgggtgatccgggttagtaatgtcgtgtgggtaaagtgtaccccctctgcagaggttaacaaactgttcgaacagtcgtgcccacggtcatgggcggatgtgaggtgattcctagcgtagttttgtttgactactgattgtgaaattgctgtcgtgaaaatgggttcgacgtctgaaaaatcagcagctgacgggatcagctaggcccgggtggccgtttgaaaagttgttggcccgggtggccgtttaaaaagctgttggccgggtgccaatcttgtttcaattctaaagagctgatacattgcacatactccgaccggacgagacgcactgtctcatccgtgtcgtttgagaagcactcacctagttgttttagaaaagagttcaaataaaaccaattgcaaaaacaacagcctttccttgaagcctgcattaaacacttatttcccctggcttgctgagtactcccgtactcacccttgctctagataaataatcccccccagttgctgaagaagatgaagcggatcctgttgatgtggagttcttccaggagcaagccggctacgatgagttttagggtttcggcctagttcccaagtcgcgcctgtgatgattggtccaagtcctggcttccgtttccccttttgtattgcagttgtgatattctgtcttcctgtgataccagcactgtttcctgggactggtatcgattaacaggttaatttggagcgtcacgggctagttccagtcggggctagttcggggcgtgacaatatctttacaaatatacaactttaaatttgacatttacgaggagaaaaaacatatttgaatgcgaatagtgcattattcacaagaaaattgttgtttttatttttagttgtgtatgtcaaattcaaacttgcatatttattatggaagaacacgttttcaaaaagttatatgactatataggagatataattgtctacaaggatgaaaatactctcacctaatataacgaataattcacttgatgggcatgtcatcgcttattaacacacttgtgacattttgtgctctttaatttatggagaatatggtttgtgctcatggttgggatttttcttgaaacaaagccaaaatttattgtattatcggtggagagcatctaaaaaactgccgtaagtttttctagtaaaaaaatttcagatgtaactatagtataattgaagtgtaattacatgtagctgcactataaccagggtttgaaattttagtttgaaatttccgaaatctcgcccgaaatttcggtaatctcgccccccgccggcatgctcaaatctcatccgaaatttttggctttttgcaaatttttgtgaatttggtcaaattttattcaaattcattcaaaatcaatcaaaatttcaaataatttcgttccgaaatttccaaaatttcagtaacccttggcataaagtccaaatttgaaattgtcaaccttgattataactacgttgcaattacggtataacttacataaaacttgtattcaactgcgctttggttaggttaggtagtactgaaatcttatgcgtaacatgtataaaaatttctttccagcaatatttttccttcatgtataaatctcaagatgatccgatggtcataaatccgaaagttttaggggggaaaaaaacttgtggaagtttttttggcaaatccgctgtaaaagttacacgctcgtgatgagtgccgtggagtgctgtatatatagagatcgcgcagagctagctgcttttgccaacaaccaagaagctagctagtgatcgcgaagagatggcgtacaacgacgacgagcagactgctccgacgagcaccgccaccgagccggcgaggccgacggtggggatcacgggccaactggtgaagcaagtgcgtctcaacaagtaccacaacgacgtcgcgtccatggcaccccatgaccaggagctgctgctcgagctcaggggctcctcctcgtccaccgacagggcgggcctggacctcgtcgccgtcatcgacgtcagcggcagcatggacggggacaggatcgacaaggtgaagaccgccctgcagttcgtcatccgcaagctcagcgacctcgaccgcctctgcatcgtcaccttctgcaccaacgccacccgcctctgcccgctgcgcttcgtcacggcggccgcgcaggccgagctcaaggccctcgtcgacggcctcaaggcctacggcgacaccaacatgaagggcggcctcgagaccggcatgagcgttgtcgacggccgcagtctggccgccggccgcgccgtcagcgtcatgctcatgtccgacggctaccagaaccacggcggcgacgccagggacgtccatctcaagaacgtccccgtctacaccttcagcttcggcgcgagccacgactccaacctgctggaagcgatcgcgcgcaagagccttggcgggacgttcaactacgtcgccgacagcgccaacctcacggggcccttctcccagctccttggcggcctcctcaccatcatcgcccaggacctcgagctcaccgtcacgcggttccatggcgaggtcaccatcaagagggtggtctgggtggacgcggggacctacccgcagaccaccgccagcgacggctcctccgtcacagtcagcttcggcaccctttacagcgcagaggcgcgcagggtcatcgtctacctcgcgcttgctgacaagaccgcctcccctccgtacgacgccaatgtctgcttggcacagtacagattcaccttccaggcccagcaggtgacctccaaccccgatctcatcaccataaaacgcagaccgagtgctgcaccaggcgcggcgaggaagccacagccggtggagaacgagctggcccggcggcagcacgccgacatgatcagggcagccagggacatggccgaggccaacaagatggaggacgcgcggaacaagctggaggaggcgcggaaggcactggaggagaatttcaaccaggcggcgaacccgacggtggccatgctcctggaggagctgcggcagctgcgggggctcatggagaggcagtacctctacaacaaggagggccgcccctacgccgcctcctcgctcgcctcccacgaccgccagcgcgtcgccaccaggggccaagccgacggcgtccggctctacaccacgccgcacatggacacctacctcaagcaggccgagcagttcgagaagaaccccgacgaggcgccgccgcccgccacgaagcacgtcccggagccggatcaggtggtcgatcaagagccgccggcgccgcccgccgaggccgacgtcgtcccggacgtgccgcgagacatggcggcgggggacaggaggacgctgtcggcggcgctgcgggtggcggcggcggtgctgagcctggcggcgttcgtgctcatggctagtgtccggacgtccgggtgggacagcgaccgctacgacctctacgaacagtactacaggttattgcatgatcacttgcctgttgcgtctaaacatcatgcattcttaacatgcaacaagtctagatgctagcaatactcccttgtatagttgtatgtagatttatctcaaaattaagtacttcctctatattatagcctgggatggaaacggtcaaaaatcaaccattgccataatcatattttttttctcggaaatgggataaaacatgataaaaattaaaattaaaattgtatccgaaatatcgggaaaattgaaaaatggaactgtacgaacgaaaacatgttataattgatcggaaactagtaataacgtcaaaaacattaatttgtaaaatcatatttttacaaattgtctctcttttagccttgcacccaagtttggaatttcattgagaaattgatggtactctaaaatttggattaaatagagacctcaatcatggtattgggtatttaaaatacagtaattgctatattataaaaaggataatttcctcaataataaggtaaaatttggaaatagcaaaatcttttccattttttatttatattttttactgttttaattttcatctatgttggttacgaccggtagaacttggaaatgagagtcggtaggtcaggagtttccttgaccaagcattgttagtaggttttgtaaatattctacaataaaagttagggggtgtttagatcccaccctaaaattttacgccgtgtcaaatcaaacgtttgaacacctgcatgaagtattaaatataggctaaaaaataactaattacacagattacgactaatttgcgagacgaatcttttaagactaattgctctatgatttgacaatgtggtgctatagtaaatatttgctaatgacggattaatttggcttaataaattcatctcgcggtttactaacggattgtgtaattagtttttttattggggcaattgcgcatttgaccctcttttgaaaactacctaccaatttgacccccttttttcaattttgcttatttgacccttattttcagaattaaagatacggtatgaccctattctgttaagggctactaacggtgttaactgaagcacaaaaggtcccttttgcccttactcatttgaccctattacatgtgggacccacctgtcagttctctcttctcctctcctctcttctctcttcttcttctgacgccgcctccttcattcctccgcgtcgcttcttccctccggcgccggctgccatcgccgccgcccctccctcccttcttcgcgcgccaacctccgcctccctccccgctgcgcgcgcagatgccgacgccaccgccaccgccaccacctccgcagacgccgatgccaccgagagccgccgccgccaggcccggctcccctccctcctttcgccggcaccggtctccgcctccctccccgcacgccgatgcagacgccgccgccgccaggcccggctcccctccctcctttcgccggcgccagcctccgcctccctctttgcgtgctgatacagacgccgccgccaccgccgccaggcccggcttccctccctcccttcgccggcgccggcctccacctccctccctatgcaccgatgcagatgccgccgccgccgtctccgtcgccaggcccggctcccctccctcccttcgtcgatgccggcctccgcctccctccttgcgcgccgatgcagacgccgccgccaccacctccaccgccaggcccggctcccctttctccccgcgctgcgcgccggcctccgcctccctccccactgcgcgcgacgctgccgacgccgccgctgcaactcgctggcaggagagagagacatggagagacatgtggatagggttagagatgggtatggttttctcaagggtattttgggcattataaattttaattatatttcgttcttttttttaaatcaaatcttaacggtgttaagaaaacagggtcagacggaaggttcgtttttgaaaagcagggtcaaataagcaaactaaaaaaaatagggtcaaattggtagttagacttcaaaacagggtcaaataagcaattgtcccttttttattagtctacgtttagtacttcaaatgtgtgtccatatatctgatgtgacacgctaaaactttttatccctagatctaaacacagccacccaaatgttttcctggccatcacattcattaatgactaaggtccagggagcagagagtcttcttcaacctctagatagaatagatgaagaagcagaagagcaagtagaagaactcatcgacaacttgttccggcgatggtgcaacaacagtgatggtccgaaatccagcaaacacaacggaatagatttatcagggttagaggttgatgtgtaagggtggtcaatggaggggcagctttagaggatgaccatggaaggcaaggcaccgctgcccttgaccacagtagagagagaagtagattggttaggagtcgaataacggtggatctagcggtgtgatccccaaaggaactagccagttcctagcttcactacaaagtgatcagcttctcctttttaatttaggtgaataactaatctaatcctttaagtttcaccaaaggtttaatttggttcttcaggttttattttatccacatagatcactttactattcacccttctcatttcatctattatcctttttagttaaaaatattctctcttctccgccaatgtactatgacaggtatgccctcggtgtgaatctgatagtctgcgtctactcgaccgcgcaagcagtggtcgaaatcgggcgcctcatttcgccgaggtttgctgcttctctgaacccgataacctactgcgtcagcctcttcctggatcaggcaagcccaatacacacaatacatcggttcttcatttttcttttgaaacatctatcaacccatcaattcttctgctcaaaatgcgccattgcaaagctacggccatatttatattcaaacttttttctacaaactttcaacttttccatcacatcaaatgttttgatacatgcatgaagtattaaatgtagatgaaaaaaaaatcaattacacagtttgcatgtaaatcgcgagacgaatcttttgagcttaattacgccatgatttgacaatgtggtgctatattaaacatttgctaatgacggattaattagacttaatagattcgtctcgcagtttacacatggaatctgtaattttttttttgagaattacacagtacaacgcagacactcacaacgcacgcgcactcacccccatgaacacacgcacgcaaaccctacccctatgagcataacccctatgaacacacgcacgcaaaccctacccctatgagcatcttcgaagactgggcttttttgagaattacacagtacaacgcagacactcacaacgcacgcgcactcacccctatgaacacacgcacgcaaaccctacccctatgagcatcttcgaagactgggccgacaaattctgaagagattgacgaagtcaccacagacgcctctctatcgacgggtacgtcgcctaccactgaaaccacaacgccgttaaatcctagaaaattcgctctgtaaccactaggctacaggccctttcgctctgtaatttattttattattagtctacgtttaatattttaaatgtgtgtccgtatactttaaaaaaaatttggcacacgaactaaacacaacatacgtgttggagaagcagaagtttttcagcgcacacgcgcgcgcggctaattggtttcatttggctgcaggtgttggcgtacctcctaatgtcagcctcgtcgacggccgcgttcggcaaggagccactcaacacaaaaatcaacaacgcagtttggctatcgttccttgggttccttgcgctggccgccagcgcgctcatctccatggacaatctcttccgccgcatgctctgattgaccaggccgtcgacaatctactcacatgcttctccgatcctcatgcaaacttttaattacatatatttgtgcaaataagtgggacgcgtatgagatatacgttgttcttgtcgtaaaaaaaaaacattctttcttttctaattaggagtacacattggggcatttgtagggtatatatgcagatgcccacgtcatgagggcatttgatacttcaggcgtctgtagaggatacacacgtatatgatggtgtgagtatggcatgtcttagttgtgggcccaattgcactctctctctctctctctctctttttttttttgaaaactcaattgcactctcttaaaagcacatttctagtttgtaaggctagagtggctatatatcatatatgtgtctcaaaggtattgtttgttgtaacttgtaacaattaaaatggctaattgtttcaggaaacatatgcgatcatttagcctcatctcatcgacgctctcctgatcctacataatatgcttccataaataacttatactattttgtatacaattttgttgcttctattttcataaatataatctctatatttttggcagacaactctatttatgaatcttaagaaccataatttagaccccaccatgatcaaatgatgcatacatacatacatacatacatacatatacatacatacatacatacatatatatatatacatacatatatatatatacatacatatatatatatatatatatatatatatatatatatatcattttcttcaatttataacttggtaataatttctagatctttagacgcacggtgaatgtgatg

SEQ ID NO: 5651 - DNA, 58946 bp, Oryza sativa
  unsure (1)..(58946): unsure at all n locations
aaatagcctaggggttatggaatcggttttatcggtaatctacgtttaataatcttaaatagcaagattctgaaggactatttaatagcccggaggatccaaacaaggctataacagtaacaccaatccgaatgacacggcgagagagctagggaaccttccatcacgtgaatttggatgctagactgctagagtgtgagaggcagaatttgccttacagttcaatattagtgctgatgcaaatccctctcgctgcatattaaactgttttatttacaaaataaggaccacacctatgcatggaacatgaagtatacagacagatctagaatgcgaggcccacatgtagggcccctttgaatcgcaggactgagaaaatgtaagaataggaaaaacgtaggattttgataggaatgtaagtgtaaaacagaggattgcaaaacacaggaatgaccatttaattgaaccacagaaaaaacacaggaattggatgaaagagatagcctcaaaagaaagttagtaagaggtcgaagctcttgctaaattttttccaaaatctctataggattgtccattccataggaattttaaaggattggataggattcaatcctttgtttcaaaggacttcataggaaattttcctatagaattaaaatcctttaaaatttctatgtttttcctccaaatcaaaggagaccgtagtagtatcgcgtagtagaggatttgctggatcgggggagtaggacaagattcaatattttaattggattgcaatgcgttaccaaattaattaatcagtggtcagtgtacaaatttaacaacatgaaagtgatactactgttttgcaccgagatacatatacaatcataacacgatgatagccatgagacgtacctgacataatagctaccgatcgagtgacataggctgtgtgtttagatccaaagtttggattcaaactttagtaattttccatcataacaacctatcatatacacacaatttttcagtcacatcatctccaatttcaaccaaaatacaaactttgcgctgaactaaacgcagccatatacgggaagctacctggcaactcgcataacgccaacacgtaaatttgaatcctacagcattctctccatctcaaaataattttatttttatctacttcacacataacaatacaaaactaaaaaaataaaatattcttattttatcaaactccgatgcaattctttctcactttatctattttcaatgtatttatcctatatatttataaactccgatacaatgattactcaccaataaaattattcagggacaaacaaaagagataaaaataaatttattctggacgctgggatgcctgtagattaataagcagaattgattgttacgacaggagctatatatatacattttgctctttcattatctataaaagaacacacgattgacaaaacatcgacgcgaccgtcacggcaagccacaggcgaagcggcacgatgtagaggtgccgaagcagaacgcgctcccttctctcagaagctttctacagatttacgcggcttaaccctcaaataaagcgagatcagaggcgtgatttcctcatttaatagccttccaatgaaactgaaccatttctaatcaagagacttttccaagttttgtctctactgtacaagtgtacagtgatgtacagatgtgatagatagcttagctggggctttaacgcggtgagactttgatatatactcctttcatcctaaaatgacgaaattagactcatcttaggcagttgtctggtctcattctagattatactctctacattttatattataagactttgtagtattatccacatttatatagattttaatgaatctatacacatatatgtctagattcattaatatatgtataaatgtgagcaatgctagaaagtattataatatgaaacggagggagtaatattttaggacggaggaatcatctagcaattgaacggagctctcgtcgactcgttcctctttcaatcgattacatcgaattgagttttacgaaatgggtgtacaggattcagtgctaccactcatgcagacgacaacaagggggtgagacaccctcactacgcccaattaggcgtgaaccaaatgaacgaacaacgctacttcagccccacatctgtaaatgtcgtcgtcaccatcaacttcatcacacaattgccgaaaatgattctgatgaagcatgctagaagaggtcggcttaggcagctagtattaggggtagacaaaaagcctcaaaactcgggacttggataggcttgtagtcagcttggatcggatgaattggcttggagccatagttttaattagttagccttttagctgtaagcttaacgagctacctcgcgagctgctcgtttagctcgtcagtacaagatatcaccatacttttatatacttaatactttctccgtttcatattactccctccgtttcacaatgtaagtcattctagcatttcccatattcatattgatgctaataaatctagacatatatatatatatatatatatatatctatctagattcattaatatcaatataaatgtggaaaatggtagaatgacttacattgtgaaacggaggaagtataagactttctagcattgtccacattcatatatatatatattaatgaatctagacatatatgtatacctatatttattaacatctatatgaatatgggctagagcttagtctagtaattacattaaaactatttatatttagtgaattctttattatttgatgtttattattatggtaatatgtaataaaatgataaatttgaaattatcaatatataataagaaagataaatagctcggtaacaagtctaacgagccagcttttgagccgagcaagatagccttttagctcgttaacgttaaaataacgagcttgaacaagtcaagctggcttgttaatccaccccttaagcaagatttagggtctgtttagggagcttctagctgctgcaccttcttctagaatctccaggtcccccaaacagtccagattgccactcaaattttgagagtccaaaagctgaaaaacccagctttctagattctcagaagttagctaccaaccagcggattctcagaatcttccccaacctaggccttagaggcatcgaggatgattgcattttggagttgttccagaatttcgagacgcgggtcgaatggaatatgaacttgaaatgatcatgaccatagctactcgcagaattcttttgccccgattcggagaatggccacgcgtccctcgccacgtccgatttcctgctggccacgaaaccaaataatccccccccccccccccccacgagatgcgtattccgaaaccgtacagacgccggcctgccgccctgtgtgatcctacgaaccgaccgaattaactccccagcagcttccagcttgcttgacaagcaaccacgtcgatcgaccgtccgtcgtcacgtctcgttgtaggcaaccgccaagcctcttccagaaatatcgtactagtagcaaaacatgtgtaaaaccgaaaaaaaaaaacaaataacccccgttcacacggaaacgggaaccttgccaacggcacaccgcgtgcctcacgagtgacgtgttccgtcgccacctcgaagcccaaacagcgcagcgcaggcagggcatcgagataaaagcagcgaagtgatgaaggcgaccttcgagaaggtcgcgtcccccctcgatcgatcgcctatataaacgccacgcaccgttggctgactagttattagttggtgatcgcttggggcagcttccttccttccctcccaaaatccacctcacaaccacacgagacgagagccaaccgcgacgcatcgtcacatcacagaggaggcggtggccatggaagagagacctcgcgatcgcaccgtcgaggaggccgcggcgttctccggcgatgagtccgatggggaattcgagttcccgttcgtgagcagggagacggacgccgggggcgtggccgacgagctcttcgcggacggccgcatcagggcgttctacccggtgtttggccgcgtgctcgacgacgtggcggtgacgcctgcggcggcggcggcggaggagcggaggccgccgctcgggaggctgttcctcgaggaggggcggacctcgtccgtcgggtcgacgtcgtcgtcgtcgtcgtccacggacatcgccgagctggacggcgtgtcgcccgacagctactgcgtctgggtgcccgggtcgtcgccggcgtcctcgccgtcgcgccccccgcggaagagcgggtcgacggggtccatcgcgcggtggcgccgcatcagcgagctcgtcgtcggccgcagccacagcgacggcaaggagaagttccgcttcctctccgcgccgtcgtccccggccagggatcaccccaaaccgaagcccacgacgaagggcggcgccgccgccgccaccaagctccacaccgagctcgacaccatcgccgccggccaccggctgtcctactcccccaaccacaaggcgcacggcggcgcgacgcggcggacgttcctgccgtaccgccaggatctcatgggcatcttcgccaacgtgaacggcctcagccggactcaccaccgccccttctgatcgccggacacaagccgtcaccgtcagggcgaatgaccacttcaactcaaaaaagtgagaaagagagatttcgagtttgaattctccgggatttgaagtttcgaacctttgacttgaagcctactgcaatttgaagtttgtgtgattagcgtaatctatagctttgctattgcacgggggattaatgaagtcaaaattggaggcgtgaagtcagaacaggcgaaatgtgggggattcgctgaggaatacagctctgcaagtcggtttattgcgaacgacatgtgaagttgtgaacgtggtagggaatcacacacggggaagttgtgagagaaaaaaaagaagagcttccatgtgattatttgtacttgtacatatgtgtatgtgtattattggatatgtagattgacaggagtcgtttttttcccccttgtttgcacaatctaactactggagtagttgtgttgctttttctgcatactttgtttgccctatatttctttctctgttgggtttccgacaatgattgggcgtgcgattagaataacttgtgaattttcgcctaatgaaatggtatgaagagctacatgcgactatacgagtaattgattgcatggaaggtgaaccgcattcatgccaccaattgtttcaatcatctcgtgatcatctagaacattgacctttttccctttggaattgacagaactaaaaaaatcaggcgatattttgtttgctaagagcaatttcaatagtatagccaactgctgactaaggcctgtttggtacagttccaactcttaaaattaacttcaggagttgagtatggagtggagttgttgagctgcctaaacctagctccacaactctagtatattttgtgagagaggtccacccaactctactcccagttttggtggagctgaaactgtttgcctgagctccagctctaggaggggtggagctggagctggagctgtgccaaacaggcccgtaacaaatcatctgtagctaatctaatagcccattcattcaatagttacgtataaaaatatactacaccattaataccaggtcctacctctcatacacacataacgtcttggagtccgtgttgcagtcggctacaaatctgtagcctgctttcttctccctcttctcttttcttctcgatacgtggttatagcttgcttatagtttgctattgtatttgctctaagattcaacaggcatgtacttttattttatttttttttctatttttgctcttttcaaagaacccacttaaagtaactgtcattcaattatataccgacatctttggctcaattttcaggtctgctttagttcccaactttttctttaaacttttaacttttttatcacatcaaaacttttctacacatataaacttccaacttttttcttcaaactttcaattttagtcaaacttctaattttgacatgaaactaaacacagccagttgttttccccgagtgtaattgctctctctccagatgtaaatatgcttcaacatttccttatcttctctttcaagtagataataaattatttttattcttaattctcttatacattgtatattagaaaaataatatattttttcgaaaagaagaaaatacaatgtaaattttgaaacttaccatgtaactgcagagtaagttttgaacgttatatagtataattctaatataagtggatcttcaagagtggctatttttctatcagaatgcacaaattacatagccatatttatgtttcactacaacagtatctataatctctacattaaactgttcaatcgaacaatagatcccatttgttagactctctttatttattcttcctctctctccatctagatctttcccctcgccaaccactccaccctgcctcactagtgagacgtacgctggatcgaaggccgacggccgcgatgctgatagcatcattgcaagatatgcagcagatcatggtccccatcggttgatctagtcttattataagccataaggctttttagcgattacaaaatgatacgtgagtaaaacttttgtatatatgtttttagtgattgaaaagccaaagttgaaaaaaactatgttgaaaaaaaatcaaattcaaattcaagttttaaaattaaaattttggttttggcttataagccataaggcaaacgatgaggccccatgttgacggcggtgcttggcagatgggtgaacggccggatataaaaagcgttggcgaggaaccgaagctgcctcaggtcgtggcacccaccttttggcaaagccggaatagatagcaagctagggggagtggtttggctatcaaaatagcatgttgcttggagacatgtttctctatagactatatgtttgccaaattttgacatggagagtcaaacaacaactctcctggagttacttaaaaactagcaaatgctagcttgaaaaaaagttacttaaacatgtcaccgataacccatacctccattagcttttcagaaatgaccagaggagcctcttttgttcaaccctcaagtataatccacctctaggaaaaagcaacaaagagtacggcagtttgtgatgcttacagatcacaaactatgagtcctatctattcctaacagttccattaatctaggcgcatgattaatttgaaaagttgggttctaagcatgtgaatgttgtacccaaaatatttcacatttcgtggcatgtgaattaaccacttgattgtgcaccctcatttccaactctccattactacggggagacgggacaccctgacctccccggaaaagcggagcccctcgtcctatcagacggagcctggacatagcccggactctaatccgtcgcctgttgcttgctcccgacttctgctgcaaaacgagcgctgctgcatcgcggcatgcgtcgatgcatatctgagcgcctggtcaggcaggttccacggctgctacggcatcatccagatgatgcaaacagcctctcaatccagggaggaaaacacagagcgtcccgatgttacagcctgaagaaagaaaaacagagaagtggatactcttgcagttttcccaaatcggacgcaacctgcactcaatcacgagttgtttgatcagtgtagtgctagtaacgctcagctgtagagtccgaactgatcaatgccatctccacgacgacatgatcagtgagaattgatgggtgtcaaacgtatttgtcagttcagttttcaggtcaggtgtgcgtctgtctacgttcagtgatcagggtgttcaggcaggtattttccatcacctgtgtccgaatggtggtacatcactacatcagcagcagccaaattaattccgaaagccattatgcacgggtttgatgtaaatctctcgcaatcacatgctctgataattactctccatcgtcatgtgtaatttcagggtttgcctaacacccaagcacctaacagttaggcgcatatacactgaccctgcagctagcttgtttaacccgaggagatgacacacgttagccgtaatcctcgcctcatcccaagctcacgaaatcaactgctgcaagaaagcaccatctcattacctctgaaactgctcctgacctgagctgctcgaacagagagcagtgactagctggtatgaaatgtcaatgagtatccgttgccgtttcagcgtcattctttttcttcaattcatttatcccgaaattaagcatgcctgtttgcttacggatatacatgtatgcggacatgtggattcagtggatatatgcacgtacgtcatcttggaccggtcagtttattgacacgccgataatgcatgccttagctcactagctagattatggttggtgtgatccaggttaggttggttattggtaagtactagtagtacgtactagcttacgctaggtttgtggctaatatagatcagagcttcatgaaaaggcagaaaaggacatgtgctaacacatatatttctcacaagatattgcaagaaagaacatgtcaaagtgaacagctggaagctagtaactgccggattacaacatcagcagcgggtttcttgcgatctacgcgctcgagatcttgatcgatctcgcggataaattcaacggcagattaactacagagaatcgtgtgatccatgcgttcgcacactgcgcatagtgattatcccacgggagaggaggaaagcatcgtcatctcgtgcgattattacatggagccgcacgtaaatgaacacgaaaaagaatgttattctaatccatagacaattttgttctggtgcagtgcgttttgcgtaagtacgtgcgtgatatcagagatgagaaatgttcagcatccggagagtgttcagacatgtttttttttattttcctttttagcatgactgttctttgtttggtggtgattaattgttaatgtcctatgtaggtcagtatgcactacaaatatatctatctatctattatattattaaaacagctttgaaagaaggcaccacgttcgctgtgaaagctagaaaaaattaccacattaatcgtagaaaaagaaaagtaaattaaccattggattgtgataattggattgtgataagtctagattttaatggctaagatttattggaggtatgttggatcagaatcgtacagagaaataccgctaataatatatgaggagttagagtaggctgatgagttaggaatggatacggacgtcattaaacagtacggacttaaagcacggattagagtagaacttgaagatggatacatccaattcaaaacagtatgcgcatgtaggcgaaggcaaagaccaagacaactcatgcgttcctcagccaaaaatcgaatataccatgcatgaaaaagaaaaaaatgactaacaatgtggaaaaaaaatcattcaatgaagaagatcatttgcagatacactgtaactaattaaaatgtacagcggtataaatagatcatggatatatataaaatattgttatatttattaataaaaatatacgatgacgtagaaaggttgtcaggatcgggatactaggtagtatcgttttgctcaaagtaatatcgtatcgtaggatcgggatactatgagattttttaaaaaaattaattactatttatattaattatatatagacattctatataaaaaaatatagtaatgatatatgtcattcaaatagagacatttattaagagaaaccacgttggttttgatatatttaactgatttttatataaatttgagcatatttatttatattataaaaataacgaaattcagaaaaatgagaagagttcaagtaggaatacaatttaaaaataactgaaatttgaagtttaaaataagaaatattgaaagaagagtccatacaagaatccaatacgagattaattaaaattcagaataaaaaaataaaaaatcaaaattagaaaaaaggataataaaagaagagttcaagtaggaatacaatttaaaattaactgaaattcggaattaaatataagcaatattgaaccaaatagtagattaattaaaatttggaataaaaataacataacatccgaaattgggcaaattaaaaagagagttaaactaggaatacaattgtaaaataactgaagttgaatataaaaaataaaaacatcaaaaaaatataatacaaaaaatgaaataaatttagaaattagaaaaagaaaaaaaagatttcaactagaatacaatttataaataactataaaataattaagactattgaaagaaaatactatctaaaacacatgacgagattaattaagtaagaggcctatagaggagcagagtggtggcggttgatgaaatatcgaaaaacaattaataaaacaccaagtagaatcctaatgatgattaaaaggaaagacgacgggcatgtcgtgaagcaatcggtcaatacggttggagaggacttctagaaaataaaaaaataaaccccaatgataatcatatttaatttttaaaatctcaattacaataaaaaagagaggctgtgggcgggtcgtataggaataaaatggcagagccaccgatggttggtgggtcttctagaaagtaaaaaaatgaattccaatgttagttatgttcgatttctaaaattccaatgacaataaagagtatgcggcgaacgggtcgtagaggagtacagtggctgcgtttgacgagatttctaaaaattataaaaaacatgaaactcaacgagacaataaactcaaaaactataaggtccaatttttaaatgttcgtgcttctaaaaagtaaaaaaaaataaaccacaatgttaatcatgtttgattttaaaatctcaataacaatagagaaggacggcagcgggcgagccatagaggagtatagagacaaagtcgttggcgttttggcgaaacttctagaaagtagaaaaatgaacataaacgataattatgtttgatttttaaaaatatagagaagatgcagtggacagtcatagagaagtataatgacagcgtttgataggacttctataaattataaataagaagcccaacgtgataataaactctaaaaacttactatccaatttttaaaggtttcaaggagaatgaatagaaacagtacggtagattgggtaagctaataaagaataatatgacagaaataaagggtagcaactggtgtgacttttaaaaactataaaattaattagaaacacaacgatgataaggtttggtcttttaaatcttaagacaacgagataactatttaataaattttaagtaaaaatatattaaaaatatataattttatatgggtgctagccgcgcaattacgcgggccacccagctagttgatgtaaaagtagaggttatttggtcagttttgggtttgacggatcaatgtcaaaccgttcttattggttaagaagcttgtgatgacacggaaatggaacacagcgcctacaaaattgccggggaaaggcaagctgagagtcgtcctagtaaataaattacgctccgacctcttcaaatatttgacgtgatggtccatgtttgctttcgtgttagataaagagcagagtgtgcttttacctacttcctttgagatacactaggtagtgcaatgggtgtaaggtttcaactccaaaatccagttgttcaacatgagattaactgagcgctgtaaggtttggtcccattttctccttaaaatgtgatatcttcttcttattataaaggcaaaatttgatacaggacacccaaaaaacgcgtaattagctgagggacaccgagaaaacgtggaactgctctaggacactacaaattttgtaaaatttgccgtaggacaccgagcttattattttatcatttcccgactgaaagtggcgagtattttttttcaaaatacccagattgcccccgtgtcccaaactcggtcgccacacaccactcggcggactgcatcacgtagctcgccgccggggagtccgcaccaacgtgctcttcttcggctgccaggacacccacaggacaggcggcaccaccacggcatcaccgccgccgtttcgccgcagtagtcgggacacggccgaacttacacacaacaaccgccgtacgccgctttcctccctccctccctctctcctcgtaaaaatacttgctccaaacgccatccatccatccatccacccacccacacacagccgcaatcgccacctcattctccgcacgcaaagccgtcacgtcccgccacatcggcatttcggcgaacacctcacgcgcgcgctcctggtgtcggtcgtctgcctcgcggcgggctgcaacgtcgtgacacgctcctcctcccatggccggtgccagcggcgagcggccggcgagcaactgggactggtcggactatgacgccgcattcactgaggaggccgacggggcgatcgccgcgctgcaggacacgggcggagacgggctcgccaccaagcagctcctcgagaggtaccacgcctcgccgcttgcccacactatcctcgcgcaatggtacttcgcgcacgcggatcagcaaaagccgacgaatcacctcaggagagcggcatggatggccccgcgctgcctgcacatcgcctttgcgctcgccttggtgctcatcgagatgggctccttcgacgaggcagacatggtgtgtgcccacagcctcctcgtgccggatctcaccgacccggtgcacaacttcatctccccgaaagagcaggttgatgccattatcacctccaaagctccagagtatagattgggacgcggggcaatctgggcattttgaaaaaatactcgccactttcagccgggaaatgataaaataatgagctcggtgtcctacggcaaattttacaaaatttgtagtgtcctagagcagttccatgttttctcggtgtccctcagctaattacgcgttttttggttgtcctgtagcaaattttgcctattataaaacgtcggcaacagcctgaccgttcgaaaaaaaaatctcatgttcaacttctaacacactcgcaattttttcttaaaaattatttggaggatgtctctcccctctaaatcaccttggaaaggttaattgttctttcttaaatcaagttcggtggaatattccgaccacagaaatacgacattttgtgccaaatcttgatccaattttggtcaaattgcattgttttgaatttgaattctcgaaaccaatctaaatttcattcggtattaacattcttcctgcctctagcttaaaattttgcagttaaaaccatgcggtgcatacccaattacagatgataaatatattgatccgatccagcaaaaaatatcccgatgtaccagtacctcactatactaaatcgttttctatagttggatctaactccaaatcgtttcctatcgttgaatctaactaggcagaatggccattgttaaatcctagtaatcgaaaataatcttggtaccaagaggtactgagctattttttattggatagaaacaaatcttaaatgtcaatgtttaatgtttcttaacaatatctgggctgcaaatgagtcgaaatgacgactgaactagaacctttcgacccatatccccgccaaaatgtaatagagccggacagccggtagggattgggcctggataggcgccaaaacgaggcatgaattgggcctgattcgtacacacattggtaacagaataaggcccaggtgttgataagccacacatcctcatctggtactccatcgtagtaggctgtagacttgtagtgtaccaaaccaagaaaacaagaaaaaaaatgttgtgttttaaaagagtgattttacaatgcttgaagaggtaccgggattataatttgggacctcacgatatcttcggcactataagttccgaaatttgcattaaaattttggtaaatctaagtacttattaaggactataaaattacttttcaaaaagataaagtactttagcaaattctcatcactcccagcgtattcaacggattcggctatatccatttggccctgctgcagttcagaataagggttgaatttattcaaatatcataatatataagtagagactatttttagggcatatacaatagtctttattagtgatctctctctattgttatgcaaataaatttgatgacataaaagaaagagaaatgaatatggttgttatgcatgacaactgctcagagttgactcttagcatttattagagcaaattttgttgcatggtgatgaaaaaaaggaaagaagagtaagaaaaagtatttttatatattaatgattatagaccatattgtctctaactgttgtaggatgctagtctctagataatataaatctcatatctaactgtatctttgtacatgcacttaggtcgccaaaattgggttacatgaatgagacggccgagttacggtgatgccatcttggctatttcccatggcttctccgctctactcttgtccctgtttggatgacgccgtccagaccaagacatcaaaacggggcgacactgtgaggttacggtgtcgccattcgccacaatgagctcaccatgtcaccttgtcgacatttcgccgcatacaagtcgctgtgcgaccgccaggtgggccccactgtgagcagcacgagtgtggcgcgtatataaatttgtcggatggagaggcagctgaaggtttttcgccatggcaactgcgtccttcgacatctgcgcgaaggttgggctcggaatttcgacaggatactcacagcgaaatcaatactctgctatggcaaatggtacgcactcgtttcgattgttctgccttcttctgttttattttttttcccgtatgtagctgtagctgctgataaacgtgccatgtattccatctcgttcttgcaagcagtttcttagatgagttaaaatatgtattccatgtcaactgttcactttagttaggtagaactttcttacattatgattagttatctacttactctctctgtccgataataattatcgcattgattttttttataatgtttgatcattcgtcttattaaaaaaaattatagaattattttttttattttgtttgtgacttgctttattatcaaaaaaataatttaaatatggcatatctttttttatatttacaataatttttcaaaaaagatgaatggtcaaacgttacacgaaaaaatcaaagcgaccactattttggaatggaagtagtacctgtagagaaaaattaaatattagttcttaagtgagtgtggaccgaaaaaattccttatttatcataaacacgttttccaaacttttaaatgatatgtttttttaaatatataaatgaacatgttctttcaaaaatcaaataaatcactttttcaagtttgtactgattaatactagactaatcatttgctaattgtttatattgttttacttgccatcataactcatgccaaattgcttttccaaacccaccattagccgctgtggcaagctcagttgctagcttgaggaggactatacaaagttgcacacacgccatggtactaacgagaactggaaaatatgttgactggaaaaattgtatcagttcatattagaaacaaattactgtcagaatgaggaaaaactcagtccatgccactaaaggcatcagatgcgaattggcgctcctttctcctttcaaggagtaggcataaacataggctctgcagtagtttcatctgaaattttaagatcagctgaggtcttccaagaacccatgttcttggaaatcacatgttcaagctttaaaatgcattgataaaaggcggatatcatggtagcggccattttaaaatgcattgataaaaggtggaaagaaaaaaaaaacatctccaagtgtaccttggattgtgagaacgataaatattctaacaaaaaatttgaatgctagaacgacaagtaaactgaaacaaagggagtattagtgaagattcaaagcagtagtaagtaactaatttgaatgttcataatgatgatattgtaacataaacaatgatagaatataaggtttaaggttaagttttcataacacactataccatttatatttcatttccggagtccaaacattaccgaatcggaataaaatggtccttacaaaacggggacaacctatacggtcaaaaatctcaatatggttttcattcatgttttaggttgtgttcttttggcagttgagaacattttcctagcatgcaaaacgaagcaatggacaaacgtatgattaattaagtattagctaaaaaacttaaaaaaatatatcaatataattttcttaaacaactatcttatataattattttttaaaaaaacacatcgtttaactgttcagaaaacatgcgcacgaataatgaatatagaacttgggaagagggagtatagaacacacctctgctaccgtacgtaaaagtggcgtagtggtagaggcactactacagaaagtgtttttcagtacaagggggttattagtttacatgcgggcggcttaaaccttataaatttctgtacgagggggtcatactatggtggccaaaatctatctattaacttataaaagtaatagaaaaaggaggctccaagttcgctcttatgacttaaaaattctcacattaattagagaaaaataaaaaaaagagtccatattaaaatacattttataaataattaaaatttagaactaaaaaaataagaaatatggaagagaagactagagtccatgtagatatacaatttagaactaattaaaatttagaattaaaaataagagattaaaactagagtttagagtctatatacaaatataatttgtaaatatataaaattcaaaattaaaaataaataatattgtaagaagagtctagagttcatgtatataaaaaaaataaaatggctaaaatttgaaacaaaaaagaaaatattaaaagatgggtttagagtccttaaagaaatatattttacaaatgaaataaaaaaaaagagtccatattaaaatacattttataaataattaaaatttagaaaaaaaaaagaaatatggaagagaatactagagtcgatgtagatatacaatttagaactaattaaaatttagaattaaaaataagagattaaaactagagtttagagtctatatacaaatataatttgtaaatatctaaaattcgaaattaaaaataaataatattgtaagaagagtctagagttcatatatataaaaaattaaaatagctaaaattcgaaaaaaaaagaaaatattaaaagatgggtttagagtccttaaagaaatatattttacaaatgattgaaattcgaaatgaaaaataaggaatattgaaagaaaagactagagtctaggtatgcaatttagaactaattaaaattctgagataataaaataaaaataaaagtagagtttagaatccataaaaaatacaattttttaaatactaaaactcaaaatttaaaagtaattaatattggaaaaagagtttagagtccatacagtaatataatttaggaatagctgaaattcaaaatttaaaaagtaaaaatattgaaaaaggggtttagagtccatatgtcagtgttacggtccaccttaggatttaggaacataaactgacacatcacaggtggccatcttaagctaatgggccagccgcccagctcgtttctatctgcaacataaggcagaaaaccaaggccttgacatttcttttaggacacacgggctggaacggccccggcccaattaattaaatcctgctattgaaaaagggttctgtaattagagttcctactactatacatacttccgcaaggtaatctagcacccaaatcaaactacagccaacgtgtatcatcagtagattccaccccaagatcgtgtgcccgctccgatcggcagaacctaatcacgaccaatccgtcgccaacacagccacaaacccacaattacgcggcggtgcattctcgttgctttgacggcttcgctaaacgaaagatatttaccgtggctaagcaagccctgatcacacgttccacacctcgcagcgccaccacatccgagccgatcgaccggcccaacccccccgtgagacagactccagaggccgcgagcggtggcatcgtcatcgcaatatcaaatccacatccacatctccatcgagcgatccacccacaacctgcaacggcgcgacccaaccgcaaagccgctcgcattgaaacccgcgtaggttgccttcgttttccgccccgcggcggcccatcatccgcgcgcgtgtggaccaggacgcgcgggcggggaaccgttggccacggcgccgcggcgcgttatcgcgagcctatccgcgcgcgtgtggcgcgctgggtgggtgaggcgccgagtggcccggatccacccgcccagccgggccgcacgccccccctcgccccagccacccggcgccgcgaacgacccatcaccagtcacgtacgcaccgctcggcgctcgctagctgccaccatctccctcccgctgtccgggggcgctggttgtcggcacgcgggggcgcgggcgtctatttgttgcgcgcgcgggcgcggcggcgagacgcgtgtgtagctactgctataaggagcgcgccgtgcaccgcctctcacaatgtcgaccgccgccgccgccgccgctgcccagagctggtgcttcgccactgtcaccccgcgctcccgcgccacagtggtcgccagctagcctccccatcaccgtcctcctcctcctcctcctccaacagcagcaacctcccggcccccttccgccacagcataatcctcacccccacagtttttgccgccccagtcgcccccgccgcggtacgtgcattatgcatggtcacgccacccctgcagctagctgcatgcatatatacacgccggccggcaccctttgatatctcaagcttttttgacacgttcggtctcatgctaatttagctataacaaggctgcatatacatacacgatacgtgcatgcacgcgcctcgtgctgcattaggcccgacacatgcacgggtcgtacgtagcttgcattcctgccgctctctctagctctacgtacacacaacatgtcatttggttttatccatacctgcaaactgtgcaagaatggctacatgcatgcatgcatgcactgcagtgttatatctaagactaatagtctaatactgtgtgtctaattgtccatacctcgaaacatagttgtttatgcgtcaatcccacgtaccatcatcacacacaccccgcaactcggcaaattgtccaactaagcactgttccgtgaccaccgactctcttagttttttaagcaatcattgaacagtgtacagcaaaagaaaatgtatgttcaatttttaatcaacactgacaacatataggagtatatattgcatattgcccttcttatgcttttttcccaatttgttttctgtcaatcaacgtgcacgtcaacaaactctaaatagaatattcgggaggagaaaaggttcccaaacagttggccaattatattgttcattagagataagaaagcgctttggatataaaagatacccccaaaagtcttgagtggaatgaacaaagctccaagtacattaagaaatcaaacatctaggcggcttttccctcaaacgataaggtaaagttctagcagggacagatagtgttcgttttctactttgtttctttttcgcttgaggagaagcgtccatgatttagctttagtaatggactgtcgagtcactatcaacttcgttattttaacaattatatattttccattttattttgaaaaatgatacggagtattgtctttagtttctcaagccatataaagatcatagtatctagtatatacagaaatgctagaaaggtcaagtttgctgtttttctaggcaattttttatttctccaaacattaaaaagggaatttcactgtaaatggttgaactcaaaatattttttatattaattttatttcgtacgtggtgatctgacttgttggggtaaccagtacaagccctgatttttgttgcagtcaaggtcaggctgagcttgacgttgaccctcaccaaaaattgagtggtacaaaaccattcaagaccattaactgatgttagatgcacagatgagatgtcaacaagaaaatccacctgttatcaaaaccggtttgaaatgtttccttaatatttagggaaattgagctttcattaatcaataccggcgagggtacatccaacatgaaaatatattttttttatttaaagagtcatattgggaattaatttctatcaattaagctctaccaaaatttgcctaacagtactgaaattcctggttcatgtatacaagacaagccccaacattaaaactagcttgcaatactgatttgtcaacctatacagtcatacagacgcatacccgaaagaaacacctactctgtaggaatatgcctgtggttgcagttaacggattagggaccaaaaccttcccatcttgtggcgaaaagctaattgtaccttgcatgatgtactactagtaggggacctctatgccatttgtgtttagtcaagtaatatgggcgcaaagataaggaagattccgcgaaagagtagttggccgattggctcttccagcttgcaaagcgacctctcgccttgccgaaaacttactgttccttttcagatcagcctaagtgcctaactctcccgttaactgggatggctgcatactgatgcatgcagagtagttagcagttgtttttgtctaagtactgcagatagatggataaacagaaaaactaactgctgagtagtgacaagatcagttccggattaacgcgccagattgcgcaaatccagcatagattgtgtagcttgctcccgtactactggtactgatatagtagttattcaggcatatgggatactatgaaatggttcttggtctcgtttggagctattgtttcttggatcacggagccagtagctgctccatgtactttggtcacctgatgcaccaggcaaaacggctcttaagatgtgaggatgcagtagaaaactgctcaacctggcaggcatcctgctgacgcttccgaggcccaaacagcgcaaacaacttgtagcacttggatcaccccagaatcccagataaatcttgctgctgggttcatgcatggtgaaatctgcatctgatttagataatcttgtatttgtcttgcaaacaaatccactttcaagatttgtctgatgcgtgacataagtatagtagtaagaggttgtcaatgtctgcaaagtaagagaggaggagagctgatgatcgaatcagaattttgtgaggtcgtgaagttgcttcagctttaacttcaactatcaacaatcagatactccacaaaagaagtgcctaacgaggcaaccctactgctaagtactagcacacacaaacactagatcaacctgaacctttttccttagcgcgcacatgatttaatcaaaacaactgccattcttccacaataagaaagccgtgcacgcacacatgctagttagctagtagtttcatttctgggatcaatagtatagccgtcacgagtcaaattcaaaaagaaaaataaaggacgatccacacgaccgtttatatgtgtatacacactagcaaggagttgttgatcatctggatgcatcgacttaaggaaaaaggcatatgaccatttcgtgtgactaatcatactcccttaaaattaatcgatctccatttttgtaatcataatcctgcatcatgcaaccccatttcttacttgctctgccaaaggaaggaaattaaacaaaacccgcaaaattatgtttggctgaacagcataccaaaacagggggagggctcttgccattccgatcggccatttattttggccacaaaaccagcccctccatccatccatcgctgctatatttttacctctttgctagctgctccaactcaccgcgttccacgtggcgcatgcatgtttgctagtgatccgggaggccgcgacgaccgccagcgaacggaagggaaaaaaaaaagtcaaaaactagagccgatcgtttgatccattcgatatagggaagatgagtggatgcctctgcctcccccgctataaaaaggccccaaacgggacgccatcgccaccaccaccagcagcagcggccgaagcggaagcagcagcagcagcagcggcgacgaagccgtccatagattcttcttcctccccgtcactcctcaccaacaaccatcccccaccctccaaggtccgtccccctgtctcctcctcctcccgcaccatccgtcaatacagttactgctctcatcatcatccatccatcctcttctcctctctctctccttttcttgattcatccgtcgatcgattcgcgcgggcgtggcttccttttttgttgggcaaagagaaaaaaaagggagatcctttgcatccgctttagatcgccttttgtgcatgcctcgcgtgggcgcagggaacccacaacgacggcgatatcctcctctctcgcatattttcatgatgcatatgggtgtataaaaattttcacgcgtttttgtgtgcgtgtgttcttggtttgggattgggatggcatgagagctgatcggtgtgattaattatttttgcttgcagatggacgccgccgtcgaccgcctcaaggatgggttcgccaagttcaagaccgagttctatgagtaagccccccttgcctatagatggttaatttgagaagaatttgggtagccgcgcgcgcggcgtgagatgaaactgacatgatcaccttgctgtttgtctttttgtctcctccgcagcaagaagccggagctcttcgagccgctcaaggccggccaggcacccaaggtacgctgctccgtccatttcctgctcaaaatttgttcttctttgtctactagtgagccaacccagccagctggagttttacggttactcctccatggccgctacaccgtccatccctcagctcgcaaacctcgtcagcaaaagaaaagccccaaccttttacccccgatctctgcggttgatttggggattcgtgaacacaccttggcccacagattcctaccggtctagatactactgctactcccaggtagaaagtacacgcatgcttgcaacctgcaagcaaggcaaccaggcaaagcatatagccttgtgtttgcccatccggtgtacactgtttacggtgcccacagcatatatggccatcaaggtcaaactggacaaaagttagcagcaactggcctgtccaagttgcctggccaaagttatataagaggatgaacagcttgtcgccggcctgttaggccggggctggctgatcagttatatacgaggatatgataagtacaaccaagattataaaaagagagagggagattagattagattagaatgctccatttggcaggcgtacgcagcgcaatcttaattagtagctcgggtattggtaggccaggcaaagaagctgctgtagtagtggaaatccttcctcataatgcacgcacccaccaccgaagaagacgaggctcgcacctagtaacatgcaggatttcttcaccgtcccccatgtgcttgcccatgttgtgtttccgccgagatgtcgccttcctcgtatagggtttagcatccatcatcactactgttttccttttgatttcttcgttgcgtccagcttaattttagaatagtaagagcaagtttaatagtacagccaactactaactccaattcatatatagctaatctagaaactcattcatacaatagttacatactacactactaatacctgatcccacctgtcatacacacactgtgtcttggagtccgtgctagagctggctacaaatttatagcccactgcttttctctctttttatttagcttcttaaaatatgtttacagctagcttatagcatgctattgtacatgctctaataagctaattaggtcgtcgatcgaggctagggtctcctggcagcgcctcggtctaaattggcgtacgtcgtcctaacatttgggtacaaaaatttggaccggccggcaacctcgctgtacgtgttgatgaatttcaaagttcatttggacacggccattctcatggggatactgcaatgatgcccaaattaatttgggcgatatcatcgtctttgctgaccccacacaagctagaacgtaccgtgaaccacaagttctcttttgtttatagcaacggagaagaaagaaacagtggataaagccttgcagcttgatatactccatactatagctgtagctaagcaaaagtatttcctgtacgacatggcccggaggacatcacataattgtgggcccagcaatcacgcatttgtttgcacgtccaactcaacagcctttaacgaaagtttaggcgcatatccaaccttttgcttacactacattttggcatctgcctcgctatacagtaacttggattggccagccacacgcattgatgagcaggtgcaaaagtccagcagtttgcattacaacatgcgtacatatatactttattaatatcaaatctcctctcccggaaaatgatggcccccatccaaaaacattaatctacgccgcaactgactgcctgctgctgctgctgccgtaagcccgtaatcgatcggccccggcaatttgctaaagggtggggcctgatcgccatgagcatgctttggatgcgtcagctcgcgtcttaatctaatgctcggttatttggccgtttttgtctccgtcggcgttgtcgccagtgggatcgttagttcattaggattagtactaatcagcgcaacagttatatgccccccatgggccatgaactcatactcgtccgtgtcgtgggttatccttgcgtatccgttctgttttctgggtggaaaaagtggtcagggaaaacagagcagacaggtcaaaaagctggcagctttgggggcaagagaacgggaaaaaaatgtcagattcctgtgggggttgtgggcactcggatacgcctatcagcatctgctgcctccttatcgataagagcagtagtggtagtactagtagaacagatgctaatcgcctaatcctaatatgcttattgatctcctgatatggctgtgtaatcgcaaaattactactccactactagttagtgtggagtaatgaactgagctgattgttgggacaaatgcagtacatggtgttctcgtgcgccgactctcgcgtgtgcccgtcggtgaccatgggcctggagcccggcgaggccttcaccgtccgcaacatcgccaacatggtcccagcttactgcaaggtaaccaacttcatcgtacgcgttttcgtcgccggccggtcgattggtaagctagctattccggtcggtcgccgcggtttgcattgattttgacccccctcgtgtgtgtgcgtcaactgcagatcaagcacgctggcgtcgggtcggccatcgagtacgccgtctgcgccctcaaggtcaactctctctctctctctctcacagatagtgctctattatgtcaactatatagtacccgttgctctaattgtgccggcaacttcacacaccggatcagagaaaaatattttcgtacaggctgagaaaaatgggtcgtgtctgacgccagatggtgtgtgaattattttattgatcaagaagaatcttcccttccccacataatccatccagcttaggtttatgtagggtgtgtaacattcatggtgaaggtggtacttgcgttacatatgaatcttgtcaaatcaagcagggagcataattagcgcctttgtttagtatatttggacggtgttagtaggaaagcaccgtactttggtgaaatctattttatgctcatacagcacatgtatgcgtaaagtgtgcgtgcacgatttgattgtggggtattgacctggatcgaataatctgcaggtcgaactcatcgtggtgattggccacagccgctgcggtggaatcaaggccctcctctcactcaaggatggagcaccagactccttgtaagttgctgaacaaaagaaaacttagtgatagtactatagtattggcaacttgggcataactgtatgcagacaaacaaagggttgaagaaataaaaatgttagcgtgtcttgatcatcgtttgtttctgactcgggtttgcactttgattggttcagccacttcgtcgaggactgggtcaggaccggtttccccgccaagaagaaggttcagaccgagcacgcctcgctgcctttcgatgaccaatgcgccatcttggagaaggtaacgcacgtactagtagcatgacaaccactatgcataaatcaaaatgttaaatgaaattggaacatcagaattaattacattcataggaaggacaatcgaactgtctgaaacttgcgttgtctattcaattcagcactgactgaatttctgcgtccctgatcaaaacaattgatctgatgatctgcaggaggccgtgaaccaatccctggagaacctcaagacctacccgttcgtcaaggaggggatcgccaacggcaccctcaagctcgtcggcggccactacgacttcgtctccggcaacttggacttatgggagccctaaatccgaccgtccgtccgttcagttcgtcagtttacgccaacgcttttgcataagtactacctgaggatatcgtccccgatcatcgatgtgaacgcgtggagtactactacgtacgtaccggatggttcgatatatgtgaatgctgtattaagtaataacaagaaatatatctcctctactttttcctgacgcggagttgtactgcctatgatgcataatttgatcgcagtgtgatcaaaagacatcagctataatgtcttaataatattattatgaagagtttacctttttactaccttttactctggtatttctcgctggcgccagcattttcttttggtgtgcaagattgtcaaaaagctagatatcgtgcaattttttttctcataaaaaaataataccaaccatcatccacatgtacaataaggttgtgttctttcatgggtgatctggtgattgtgagtgagttttgtttcgtttttcgcgcacacgcttcccgaactacaaaacggtgcgttttttgcgaaaaaaaactataggaaagttgctttaaaaaatcatattaatccatttttaaagtttaaaatacttaatagtcaattaatcatgtgctaatggctcacctcgttttacgtatctttccaatctcctctatctcctctcctcaaacacagcctaagaagtgatgataagtagatgctataagaagtgatgataaatgcatataaagaagagaataactaaaatggtgcttctatacatcacccctaacatgagttgcattatattccaaaagcaaattagcatccatccctgggtcatgctttaatagctatcaaaattgtatcaatgcttaattcagaacataattaaggttcattgctgttgcaggctaatactaactgattatttgactatatagttctggttgtaatcggaatatatatacacggtttatagctcaatatcatctttttactaatcaaagaatatttcgatcaaaacaatttgccacctttcaacatttaatatataaattaggcttctgcccaactatgctgaatcgtgaaacaatattaatctacaattattaacgtgctttagttgtcgcatgtcaccagtcatctaaaatggtctatatatatatagcatatactcccttcattccaaattgatctacatatagttttttttaaggttattcctaaataatctatatatttgtgttcattcattaagtctattcgttatttgtgcactgaagtaaatagacattgatgcatgtatccatgcacacaaatttattacctacatacaatatcttgatttgctattgactaggaaatagtggggatggcgcatgcattgagtttgttgctagagcctagagtaaatatagtatgagagagttattagcttttcttgatcttagtataactataaaatatgtatatcaatttggaatggtgggagtactatcaaattctccacgttggattgttggtaggagctaagtgggtcttttacaagtgcctagttgaaacacattgaattgcacgatggtactacctccgttcctaacagtttttaaatgttctaagataaacaaaaagtttactgcttatatatatttaaaatgcaacatacaccttactcccttcggttctataataattgacgttttggacaaggttgaggtcaaacttttataactttgaccattaataacttcaaaagtatttagtttaaagaaactagaacaacatatatagatttgtctttcaaaacactataataaaagttaacatgcatttatttattgtgtatattataatagaaaaataaggtcaaaggtatattttgtagaccgtgtcattgtctaagacgtcaattaaaataaaactggagggagtatgagttatgacacggtatctccttaggtatataatttttcttttagaaatataaagtgattaaagtttaaatataaatagtagccgataacaagaatatgtatgtgggaacagagagagagagcaacatagcttcaaaccattgtgctatgctggctaaatttagggaattggagatttagctgcaaattcagatggagtgccatgtatacctttttcttcctagactgtgggctaccacctcaaaggtctcatgcatttacttcaaaatacttaaaattaaataattaaattgaatctgaaaaggcatcacctacaagtgccaattagaacaagaacatcgagtattttttttctaataaaaggataatataatagtaatttgcttatgagtttcataattatagagacccctttctaaacactactaagtactaccgtcgtctcaaaataagttcatttttggtttctgtgtccaacatttgatatctgtcttaattaaaaaaattagaaaacaaattaatcacaaataaagtacttttatgttttatcatctaataacaataaaaacattaatcataaatttttttaataaaataaagagtaaaacgttgtatccaaaaactgaaaaatgaatttttttatgagacaaagatagtaaggcttcaaaccaaagtatcctaaaactagtacaatttgataataaaaagagtgacaaaatttagctttagtatatgggttgaaagccttaacaaaatgtgccaaaatttaatattactatattctgttagggttaatagtggcaacaaaccttttatgcctcttttgccgtaacaatttactgaagaaaaaaaaggggagaaatttgataggctcagcaaaacccctgtccgattcccgttccgcacccgtcggaatccacagtagcactcgtcgccatgtccggctgccgccgccgccgccccagccaaccctatcccggcccctcgttactcttcctcggccgccgccggccgtagctctgcgcctctgccgcactaaccctcaaccccacttcccttcggaaactgatctcctcctactccccggccgccgcggcgccgtccacctccagactccccgcatggcatgccggagttacatttgggggggaataccaaataggcgaagccccaacctctttgggagccagtctggctgggaatgtgttctcgattgatgtcgacgacggccgccaccgactccctgaccgcctccaccccgcagccacggcggcggcggcggcagcgccacatatacgcacgacgaaataaggtactcgattttccttcttgcgtaatcctgcagattgatcctgaaatttatccgcaacctatttaaatcctctgaaacctatacggttttcgttataaatgccgtaaattaagtcaagttaacgtatctgttgcaattgcaaacgaagaggtagagtccaagtgattttctgatttcacccacgggcctatctgtttcatggctactaggttcagagtttgcctcctcattagtgcgcgcttcttcttcgtttgtcgccgatcgtttttgttcgtatagcgactcgcggtcgcggggacgcatcgaggatgggtgcctgctgctgctgcttcccggtctacaaacccgcgagggagaacccgatgcggtcgaccagagagtcactcatccagcacaagccgaggcctaccacgccgtaccatccaccaccacccccgtttatcacctacactgacaaggtcgatttccctttctcattgtcggtatgatcctcctgttgttgtcgctgatgggccgcccttatgtcgtgttggctgcttgattcttgcagggcatgaacgctgtcgagcgcttcaagactgggttcgagaatttcaggaatactatatacgagtatttttctgatgccctgagagttcgtcggtgtgtttaatacgattttgtgctaaatcgaatctatttgtttttgtcggttttcagcaagaggccggagctgtttgagcggctcaagactggccagtcaccaaaggtatagtgctgccatcagattaatagttttatacatagattatgaaacctataatttgttctttccagcacacatagaatgcgccggcataatttgctgtctctactaagaattatgccatttggagggtgcatacctcacattacgctcttttggtttgtttgtggactgaagtcaaactcgactaaggaattctgatgggaacagctcattaccattgtgaccattgagcaatatatattgataaaaaaaatagttgacaaaattttcatcttcagtacaaagtactagtggaatttcttcaaaattctacattagaggaactaacatgaacaaaagcacagagcggcttactatagatgaccaatgacatggttcctgcatatgttaactttttttttttttgaaggacagacccgtctaaataaatgaatatttttgttttcttattctattagcttgcttaggttctaagttttttcctttatgacttgcgtgagaagggctagagatgtgatttctagtgctgtagagtgtcatgtggggaatgcactacgtccgcaggcgcaaggatcagcgacaacagcaaaacggcaaacagtagatatgcaggatttgttttcgtttgtttcagagtctgttaaagtttgttagtttgatctttatctctaagagtttgttagatggcattgtaatctttacttaaagggccagtatggcgcatggaataaacaagcaatcagaaaaccaatctatcgctcctttcctgccttgctagtgcggcgccggtcacggcacctccgcgccggcgaggtccaggaccacgcccggttacttcgttcaaatactcccttcgccgtaaccctccttccaatctcctagcccgtgacaacttggtatcagattcctctggttccgatccaatggcctctactcagaatcaactcgatgaaatcgcgaagaacctcacctccatggcggcgcaaatctccgatctcgccaggaagatgagcaccttggagcccctcgtgccgctcgcggcaaaactcgacaagctgcctgatcgcgtcacgcaggtgcaggcgtccgccttcgagtactcggagcaagtccgcgctctcaacctcgccgtcgagcgcgtcgaggcttcccagcgcgcggccacgacgaacccttctggcttggtctcacgtcagccacgcgacaacacaccgccacaagatgacgctgacgcacgctcgcgacgcgaccaacacggcgacgacaccgcgatcgacaacagcttccttcctcgcgccaaactcgagttcccgacgtacgacggcaagggcgacccgctgccatggctgaaccgctgcgagaccttccgcggacagaaaacgccggagacacgcaaggtgtggtatgcctcattgcatctaatcggggacgcccagttgtggtattacaggattgagctcaattctggcgaaccgtcgtggcggaggttcgtccagttggtgcacactcgtttcgggccacccatgacggacagcccgctaggcgagctcacggccctgcgtcgcactggcacggtggagaactacgtcaacagtttcctcgccttggcgtgccgcgacgtcgagctatccgagtcccagcaggttcagctcttcacggctggcctcgtcaacccgctcaagactgatgtcgccctctgccgcccgcgatcgctggacgacgccattatgctggcacgcgcgtacgagcagcgcgccacccttggcccgactgatccatccgcgccgcgcacgggacgagtgccgcggccttcactgccggcgtcgtcggccgcatccgcatctgcatcgaccacttcggctgatgttgccgcatcgaccgctgctggcaagcagcccctggtgtcggatctgccccgcaagcgactttctccagccgagatggcccaacgacgctccgaagggctatgctacaattgcgacgagaagtacgtcgcaggccaccggtgcaagaagtcgttcgtgatcgaggttatcagtttcccggaagacaccggggacgaggaggactccacgccagaagcacacgccatcaccctcgacgagccgagcatcttcctccacgccctggctggtatctctgctcctaagttcaatactatcaaggtgtgggctcgtctcggctcgcaggaactcgtcgccctccttgactccggctcaacacacaacttcatcaacgatgccatcgcgcaccaggctagcgtccctctacagcgccgccccggcctcagcgtagccgtggccaatggagatcgcgtgccgtcaccgggcaggtgcccgccacagcgcgtctccatcggctcgcacgagttcgacatcgacttctatgcactcccgcttggcggctacgacattgtgctaggtgcacagtggctcggcaccctcggaccgacgctatgggatttttctcgacaatccctcgccttcggacccgcccacgaccgcgtcacgtggacaagtatcgacgccgcaccggcgcccgcccttgctgccgccatcgacggtcagccgggcgacctcatgaccgatctgctcgacgtcttgaaagacctcttcaccgagccgcacggactaccgccagaacgccatctctgccaccgcatacgactggaggcaggggtatcggctgttgcggtgcgcccgtatcggtacgcgcacatccagaaagatgagctcgagcgacagtgcgacgatatgctccgccacggcgtcatccggcccagctcgtcggcattctcgtccccggctttgctgatcaagaagtgcgacggctcctggcgcttctgcgtcgactaccgcgccctcaacgacaagaccatcaaggataagttcccgatcccggtcgccgaggaactcttcgacgagctgcgcggcgccaaattcttcaccaagttggatatgcgttccggctaccaccaagtgctgatgcatccggacgacgtgcacaagacggcgttccgcacccaccaaggcctctttgagttcttggtgatgcccttcggactcacgaacgcgccggcgacattccaagccttgatgaacgacgtgctgcttccgttcctccgccggttcgtgctcgtcttctttgatgatattctaatatacagctcgtcttggtcggagcacctccgccatgtacgcacggtgttgcaaacgctgcaagatcattgcctccacctcaagcgctccaagtgtgagttcggcctcacctccgtcgcatacctggggcatgtcatctccggggacggtgtggcgatggaccgtagcaaggtccaggctgtgctggactggccggtgcccaagacggtgcgcgctgttcggggcttcttgggcctcgccggctactaccgccgcttcatccgcgacttcggcgctatcgccgcgccactgacggcgctcctccgtaaagaggggttccgttggtccgacgaggcggcagcggcgttccgcaagctgcaacacgctttgacggcggcgccagtccttcaacttccggatttcaaccgcgacttcatcgtcgaatgcgacgcgtcgggtacgggccttggcgccgtgctccaccagggcggcggtccagtcgcgttcttcagcatgcccatcgccccccgtcacgccaagctggccgcctacgagcgcgaattgatcggcctcgtcaaggcggtccgtcactggcgaccgtacctctggggccgccgcttcatcattcgcacggaccattatagcttgcggttcctgctcgaccaacgcctctcgaccattccacagcatcattgggcgagcaagctgctgggattcgattttgccgtcgagtacaagcctggaacggccaatgtcgtcgccgacgccctatctcgccgcgacgaacacttggctgaagcgtttgttctatcggcgccgcacttctcgctgctcgacgacgttcgccgcgaggttgcctctactccatccctggcaagcctccgcgacgacatcattcgcggcgctaaacccccgccgtgggcattcaaagatggactgatcgtactcaaggatcgggtgtttatcccggagtcgtcaccactgctacccgcggtcctggagttggcgcacggccacggccacgaaggaacccagaagaccatgttcaggctccgcgccgatttccatgtgccacgcgatcgcgtgctcgtgcaagatttcgtgcgcgcctgcctcacatgccaacggaacaagacagaacatcttcagcccgccggtcttctccagtccctcccggtgccgtccgcggtgtgggctgacatcgctatggacttcgttgagggccttcctcgcgtccatggcaagacggtgatcctcacggtggtggacaggttctccaagttcgctcatttcatcccgctgtcacatccatacacggcaaccacggtggcggcagcattcttcggcgacatcgtccgtttacacggtgtgccgtcctccatcgtcagcgatcgggatcccgtcttcaccagcaagttttggacggagttgtttcgcctcgccggggttcagctgaatctgacttcagcgtttcatccacagtctgacggccagtccgaggtcaccaacaaaatcattgcaatgtatttgcgctgtctcacaggagatcgtcctcgtcaatggttgaggtggcttccgtgggcggagtattgctacaacacgtcatatcaggcttcgctgcggacgacgcctttccatgtagtctatggccgctcaccgccgagtctgcgttcttatgagccggggagtacatgcttgccagccgttcagcgctcgatgcaagatcgggatcagtttttggtagccatccgtgatcggctggagcaggcacagcaggtgtacaagcaggcctatgacaagaagcatcgggagttgaattttgatgtgggcgattgggtttggctgcgccttctgcatcggccgatggcgtcgctcgacacgaggggccgtggcaagctggggcctaagttctatggtccctaccagatcgtcgcttgcatcgggtcggtcgcttatcgtcttcgccttccgccaggagctcgtctgcacgacgttttccatgtgggactgcttaaaccgtttcggggtgagccgccaagcactctgcctccgttgccgccgacgcagcatggtcaagtctgtttggaaccacagtcagtctcccgcagtcgtttggctcgaggagtccgtcaagtcttggttcagtggaagaacaagccggcggcagacgcatcgtggttgtcgctggatgaattccgtgcattatatccggatttccagctcgaggacgagctgcttctcgagggagggagagatgtcatgtggggaatgcactacgtccgcaggcgcaaggatcagcgacaacagcaaaacggcaaacagtagatatgcaggatttgttttcgtttgtttcagagtctgttaaagtttgttagtttgatctttatctctaagagtttgttagatggcattgtaatctttacttaaagggccagtatggcgcatggaataaacaagcaatcagaaaaccaatctatcgctcctttcctgccttgctagtgcggcgccggtcacggcacctccgcgccggcgaggtccaggaccacgcccggttacttcgttcaaatactcccttcgccgtaaccctccttccaatctcctagcccgtgacaagagtaggtctccacaaaaaaaaaaggcccaaaatcggcaccacattttttgagaaatgtttcctcataagtcataactgagtgatttgccgatccatgatttatttggtatgattgtctccgttttgatttggcctggattaattgttctttcttgcagtacatggttttctcgtgtgctgactcacgtgtgtgcccaacactgaccttcggtctacaacctggtgaggccttcactgtccgtaatattgccagcatggttccagcctatgacaaggttcatgtttatgtacattatatcttgtctttcttcatgtactagtcagtaactttggcctgtgtattccaggtgtaaattactaagccccgtgttttcatgttgattgcagagagggcagtgcagcattgggtcagccattgagtatgctgtggttgtcctcaaggtcacatcttccttgcgaataattaatgtccttctaatctaagtcgcatgtttttttggtttaggaatagaacggcctcatgatattttgcagttaacttgtattagttatagaaaaggagagcagtggatatcgtagtatcacctgcaataaaggcacatccccattatgtcgaagtcataaacctaactggtgcacttgtaatgtgataagtggataaattattacccaatttcgtgatgacatcatacacaagacctttgtttggaaaaggagattaattcctgtttcacttacccttctctaatttgttctagaaattatcccatagaagtaaagaagaatcttgcgtcccttcaagggcatgtgtaggctctctctttcatttggaaagcatcctgtcaaatgcaaatgggtttaccattaggttttgtcggggcaatgtatacacaaatcaagtacccctggtatgatttagggagtgaacttctgttttgcatttcgaaactgtatgttctttgaaagttttagaaagaatgtgcatacacatagcagtgctagatatttgtgcgacaaccatcatacagtccacttacttccatattatgaataatagagtctgtaacattcatcatgtgttaaatgattctagcatggacgagttagctttcagattatagctgtaattcggagttctgtagagcactatagctgaactccgttagctgtatttattctcatttaaagtgcccaaatggatatggaagaattccactctagaataaatttggtgaactcacacattcgccccttcaacagttaacaaggatcttattattctccatgaaaggcacatgttgacagacatccatttggcaggttgaatgtatcattgtgattggtcacagctgctgtggtggaatcaaggaactcctctctctgaaggaagatagacctaacaccttgtaagtgaacatatccatactcggttcaagttttttatatgctgaaagcagtcaaaggattcagataagaccatacttacatgtccaggaagaatctgtcccacccaaacaaggccaagaaggaagaaacattttaaaatttaaaataaaattactgttgtataaatacgcttctttcacctatccctttttgcaatctcatttttgtttgattacctagccacttcgttgatgactgggtcaagattggtctggctgcgaagaagaaggtcgagagagaaaacatgttactgccttttgacgaccaatgcaccgtgctggaaaaggtattattgcttggaacaacattatattatttctagtagaattgaattgtgagtcttggactaagggttcactgctttgacccacggacattgagcaaagcgggctaaaattccctcacgccgatatttgcttatctgaataatgttaggtttgcaagttaactcccatggaactgagctttactgtgtggatgtaacttttttaagataatggaaatggtttacattttcgggtcttccgtgttcgtcgatagcgacacatccaataagtgtttgggtgagctacagagtgacaatagattttaagttgaatattagcatgctaaatattaataaagtgaattgcatattgggctatttattttttatcatgattttagattggaccacccttaatccaatgctttcgcattaaaccagattttcttaccaaaagattgcagttaggaccagtggctcacttgtcaatattgcctctctctcatctctctggtctccattgatggctcgtggtcaaggttgaggtcaagctaatgccggtgtacgggagcagaacctcgagcgcaaggttgatgtcaatgaagcttgagtggaaggggaccttaagctcgacctacatccacaccgtgtcacgcaagcttgaccttcgtcatcgtcacgcttggcatgggctcaatcacgacctccatccacacagtccctgggcttgagatcctcttcgcctgtcaccccgactttcgccccgccgtctcctggctcgcgatcctctccaccattgtcttcctctcctctctagctcaccctcgatctcctcgcacgccatccctagactcgattcctctccgccagcattggccccaagcttgacattgacttctgcttgtgcaatccttaggctcgtacttctgcgcgcctgccttggagtcatgaggactcgccagagtgatagaagaggaggtcgatatgctctctcaagctcccatcacgatgcttcgttttttagtccctatttaacctcactgacaggtgggtccaggggcagagccatgattttaggtcgatggtgtcattcgtcggctctaattgacgatcatggtttaagtgaaacagaaatacatatgaaaaatacaaaaaattcctcgcaatagtggttgctcaacctatgtttcaccaaatcactcaagaaaacttatgatgcacgaactttatttagacattgtgcatagtcttgttgaattagccgttgtgtatggtcaaataactataaattatagtttgctagcagttattttgttgatgctgtcaagttgtccatgtccacataagctaaattgtctaatgaaagtgcaaaattattcacacgttggtgtcacaaatcaaaatttactagtgtcattcattgaaaaattagaaggataccttaactaatagatgggtcattgttgtccggtgacaccactgcttgtatgccagctccacccctgggtgggtcgttagtccaaagtgtaaccttttggcaacaaagtatggtgtaaaatggaaacgttaagggaagaatggttcaatgtaaatctaaggtaaaataatataacccaatatgcaatttactatatattaataataatacacaccttattcgtcttaataaaaaactaaaaattgactatgaacgatcaagatcgaaccgacaattttttttataaatatctaattatgtgttatgattagatttctaatgataaaagaatactttattaatatcctatcgggagatatctattactaaactgtattgagggttgaaacatagtcatcacatttgcctctaaagtctaaagaactagaaattactgagtatattaagagaggttgaaatggagtcatcacattcaccgtgcgtctaaagatctagaaattattaccaagttataaattgaagaaaatgatatatatatatatatatatatatatatatatatatatgtatgtatatatatatatgtatgtatatatatatatgtatgtatgtatgtatgtatatgtatgtatgtatgtatgtatgtatgcatcatttgatcatggtggggtctaaattatggttcttaagattcataaatagagttgtctgccaaaaatatagagattatatttatgaaaatagaagcaacaaaattgtatacaaaatagtataagttatttatggaagcatattatgtaggatcaggagagcgtcgatgagatgaggctaaatgatcgcatatgtttcctgaaacaattagccattttaattgttacaagttacaacaaacaatacctttgagacacatatatgatatatagccactctagccttacaaactagaaatgtgcttttaagagagtgcaattgagttttcaaaaaaaaaaagagagagagagagagagagagtgcaattgggcccacaactaagacatgccatactcacaccatcatatacgtgtgtatcctctacagacgcctgaagtatcaaatgccctcatgacgtgggcatctgcatatataccctacaaatgccccaatgtgtactcctaattagaaaagaaagaatgttttttttttacgacaagaacaacgtatatctcatacgcgtcccacttatttgcacaaatatatgtaattaaaagtttgcatgaggatcggagaagcatgtgagtagattgtcgacggcctggtcaatcagagcatgcggcggaagagattgtccatggagatgagcgcgctggcggccagcgcaaggaacccaaggaacgatagccaaactgcgttgttgatttttgtgttgagtggctccttgccgaacgcggccgtcgacgaggctgacattaggaggtacgccaacacctgcagccaaatgaaaccaattagccgcgcgcgcgtgtgcgctgaaaaacttctgcttctccaacacgtatgttgtgtttagttcgtgtgccaaattttttttaaagtatacggacacacatttaaaatattaaacgtagactaataataaaataaattacagagcgaaagggcctgtagcctagtggttacagagcgaattttctaggatttaacggcgttgtggtttcagtggtaggcgacgtacccgtcgatagagaggcgtctgtggtgacttcgtcaatctcttcagaatttgtcggcccagtcttcgaagatgctcataggggtagggtttgcgtgcgtgtgttcataggggtgagtgcgcgtgcgttgtgagtgtctgcgttgtactgtgtaattctcaaaaaagcccagtcttcgaagatgctcataggggtagggtttgcgtgcgtgtgttcataggggttatgctcataggggtagggtttgcgtgcgtgtgttcatgggggtgagtgcgcgtgcgttgtgagtgtctgcgttgtactgtgtaattctcaaaaaaaaaattacagattccatgtgtaaactgcgagacgaatctattaagtctaattaatccgtcattagcaaatgtttaatatagcaccacattgtcaaatcatggcgtaattaagctcaaaagattcgtctcgcgatttacatgcaaactgtgtaattgatttttttttcatctacatttaatacttcatgcatgtatcaaaacatttgatgtgatggaaaagttgaaagtttgtagaaaaaagtttgaatataaatatggccgtagctttgcaatggcgcattttgagcagaagaattgatgggttgatagatgtttcaaaagaaaaatgaagaaccgatgtattgtgtgtattgggcttgcctgatccaggaagaggctgacgcagtaggttatcgggttcagagaagcagcaaacctcggcgaaatgaggcgcccgatttcgaccactgcttgcgcggtcgagtagacgcagactatcagattcacaccgagggcatacctgtcatagtacattggcggagaagagagaatatttttaactaaaaaggataatagatgaaatgagaagggtgaatagtaaagtgatctatgtggataaaataaaacctgaagaaccaaattaaacctttggtgaaacttaaaggattagattagttattcacctaaattaaaaaggagaagctgatcactttgtagtgaagctaggaactggctagttcctttggggatcacaccgctagatccaccgttattcgactcctaaccaatctacttctctctctactgtggtcaagggcagcggtgccttgccttccatggtcatcctctaaagctgcccctccattgaccacccttacacatcaacctctaaccctgataaatctattccgttgtgtttgctggatttcggaccatcactgttgttgcaccatcgccggaacaagttgtcgatgagttcttctacttgctcttctgcttcttcatctattctatctagaggttgaagaagactctctgctccctggaccttagtcattaatgaatgtgatggccaggaaaacatttgggtggctgtgtttagatctagggataaaaagttttagcgtgtcacatcagatatatggacacacatttgaagtactaaacgtagactaataaaaaagggacaattgcttatttgaccctgttttgaagtctaactaccaatttgaccctattttttttagtttgcttatttgaccctgcttttcaaaaacgaaccttccgtctgaccctgttttcttaacaccgttaagatttgatttaaaaaaaagaacgaaatataattaaaatttataatgcccaaaatacccttgagaaaaccatacccatctctaaccctatccacatgtctctccatgtctctctctcctgccagcgagttgcagcggcggcgtcggcagcgtcgcgcgcagtggggagggaggcggaggtccggcgcgcagcgcgggaagaaaggggacccgggcctggcggtggaggtggtggcgcggcgtctgcatcggcgcgcaaggagggaggcggaggccggcatcgacgaagggagggaggggagccgggcctggcgacggagacgcgccggcggcatctgcatcggtgcataggaaggnaggtgnaggccggcgccggcgaaggaagggaggaagccggggcctggcggcggtgcggcggcgtctgtatcagcacgcaaagagggaggcggaggctggcgccggcgaaaggagggaggggagccgggcctggcggcggcggcgtctgcatcggcgtgcggggagggaggcggagaccggtgccggcgaaaggagggaggggagccgggcctggcggcggcggctctcggtggcatcggcgtctgcgaaggtggtgcggtgacggtggcgtcggcatctgcgcgcgcagcggggagggaggcggaggttggcgcgcgaagaagggagggaggggcggcggcgatggcagccggcgccggagggaagaagcgacgcggaggaatgaaggaggcggcgtcagaagaagaagagagaagagaggagaggagaagagagaactgacaggtgggtcccacatgtaatagggtcaaatgagtaagggcaaaagggaccttttgtgcttcagttaacaccgttagtagcccttaacagaatagggtcataccgtatctttaattctgaaaataagggtcaaataagcaaaattgaaaaaagggggtcaaattggtaggtagttttcaaaagagggtcaaatgcgcaattgccccaataaaaaaactaattacacaatccgttagtaaaccgcgagatgaatttattaagccaaattaatccgtcattagcaaatatttactatagcaccacattgtcaaatcatagagcaattagtcttaaaagattcgtctcgcaaattagtcgtaatctgtgtaattagttattttttagcctatatttaatacttcatgcaggtgttcaaacgtttgatttgacacggcgtaaaattttagggtgggatctaaacaccccctaacttttattgtagaatatttacaaaacctactaacaatgcttggtcaaggaaactcctgacctaccgactctcatttccaagttctaccggtcgtaaccaacatagatgaaaattaaaacagtaaaaaatataaataaaaaatggaaaagattttgctatttccaaattttaccttattattgaggaaattatcctttttataatatagcaattactgtattttaaatacccaataccatgattgaggtctctatttaatccaaattttagagtaccatcaatttctcaatgaaattccaaacttgggtgcaaggctaaaagagagacaatttgtaaaaatatgattttacaaattaatgtttttgacgttattactagtttccgatcaattataacatgttttcgttcgtacagttccatttttcaattttcccgatatttcggatacaattttaattttaatttttatcatgttttatcccatttccgagaaaaaaaatatgattatggcaatggttgatttttgaccgtttccatcccaggctataatatagaggaagtacttaattttgagataaatctacatacaactatacaagggagtattgctagcatctagacttgttgcatgttaagaatgcatgatgtttagacgcaacaggcaagtgatcatgcaataacctgtagtactgttcgtagaggtcgtagcggtcgctgtcccacccggacgtccggacactagccatgagcacgaacgccggcaggctcagcaccgccggcgccacccgcagcgccgccgacagcgttctcctgtcccccgccgccatgtctcgcggcacgtccgggacgacgtcggcctcggcgggcggcgccggcggctcttgatcgaccacctgatccggctccgggacgtgcttcgtggcgggcggcggcgcctcgtcggggttcttctcgaactgctcggcctgcttgaggtaggtgtccatgtgcggcgtggtgtagagccggacgccgtcggcttggcccctggtggcgacgcgctggcggtcgtgggaggcgagcgaggaggcggcgtagggcggccctccttgttgtagaggtactgcctctccatgagcccccgcagctgccgcagctcctccaggagcatggccaccgtcgggttcgccgcctggttgaaattctcctccagtgccttccgcgcctcctccagcttgttccgcgcgtcctccatcttgttggcctcggccatgtccctggctgccctgatcatgtcggcgtgctgccgccgggccagctcgttctccaccggctgtggcttcctcgccgcgcctggtgcagcactcggtctgcgttttatggtgatgagatcggggttggaggtcacctgctgggcctggaaggtgaatctgtactgtgccaagcagacattggcgtcgtacggaggggaggcggtcttgtcagcaagcgcgaggtagacgatgaccctgcgcgcctctgcgctgtaaagggtgccgaagctgactgtgacggaggagccgtcgctggcggtggtctgcgggtaggtccccgcgtccacccagaccaccctcttgatggtgacctcgccatggaaccgcgtgacggtgagctcgaggtcctgggcgatgatggtgaggaggccgccaaggagctgggagaagggccccgtgaggttggcgctgtcggcgacgtagttgaacgtcccgccaaggctcttgcgcgcgatcgcttccagcaggttggagtcgtggctcgcgccgaagctgaaggtgtagacggggacgttcttgagatggacgtccctggcgtcgccgccgtggttctggtagccgtcggacatgagcatgacgctgacggcgcggccggcggccagactgcggccgtcgacaacgctcatgccggtctcgaggccgcccttcatgttggtgtcgccgtaggccttgaggccgtcgacgagggccttgagctcggcctgcgcggccgccgtgacgaagcgcagcgggcagaggcgggtggcgttggtgcaaaaggtgacgatgcagaggcggtcgaggtcgctgagcttgcggatgacgaactgcagggcggtcttcaccttgtcgatcctgtccccgtccatgctgccgctgacgtcgatgacggcgacgaggtccaggcccgccctgtcggtggacgaggaggagcccctgagctcgagcagcagctcctggtcatggggtgccatggacgcgacgtcgttgtggtacttgttgagacgcacttgcttcaccagttggcccgtgatccccaccgtcggcctcgccggctcggtggcggtgctcgtcggagcagtctgctcgtcgtcgttgtacgccatctcttcgcgatcactagctagcttcttggttgttggcaaaagcagctagctctgcgcgatctctatatatacagcactccacggcactcatcacgagcgtgtaacttttacagcggatttgccaaaaaaacttccacaagtttttttcccccctaaaactttcggatttatgaccatcggatcatcttgagatttatacatgaaggaaaaatattgctggaaagaaatttttatacatgttacgcataagatttcagtactacctaacctaaccaaagcgcagttgaatacaagttttatgtaagttataccgtaattgcaacgtagttataatcaaggttgacaatttcaaatttggactttatgccaagggttactgaaattttggaaatttcggaacgaaattatttgaaattttgattgattttgaatgaatttgaataaaatttgaccaaattcacaaaaatttgcaaaaagccaaaaatttcggatgagatttgagcatgccggcggggggcgagattaccgaaatttcgggcgagatttcggaaatttcaaactaaaatttcaaaccctggttatagtgcagctacatgtaattacacttcaattatactatagttacatctgaaatttttttactagaaaaacttacggcagttttttagatgctctccaccgataatacaataaattttggctttgtttcaagaaaaatcccaaccatgagcacaaaccatattctccataaattaaagagcacaaaatgtcacaagtgtgttaataagcgatgacatgcccatcaagtgaattattcgttatattaggtgagagtattttcatccttgtagacaattatatctcctatatagtcatataactttttgaaaacgtgttcttccataataaatatgcaagtttgaatttgacatacacaactaaaaataaaaacaacaattttcttgtgaataatgcactattcgcattcaaatatgttttttctcctcgtaaatgtcaaatttaaagttgtatatttgtaaagatattgtcacgccccgaactagccccgactggaactagcccgtgacgctccaaattaacctgttaatcgataccagtcccaggaaacagtgctggtatcacaggaagacagaatatcacaactgcaatacaaaaggggaaacggaagccaggacttggaccaatcatcacaggcgcgacttgggaactaggccgaaaccctaaaactcatcgtagccggcttgctcctggaagaactccacatcaacaggatccgcttcatcttcttcagcaactgggggggattatttatctagagcaagggtgagtacgggagtactcagcaagccaggggaaataagtgtttaatgcaggcttcaaggaaaggctgttgtttttgcaattggttttatttgaactcttttctaaaacaactaggtgagtgcttctcaaacgacacggatgagacagtgcgtctcgtccggtcggagtatgtgcaatgtatcagctctttagaattgaaacaagattggcacccggccaacagctttttaaacggccacccgggccaacaacttttcaaacggccacccgggcctagctgatcccgtcagctgctgatttttcagacgtcgaacccattttcacgacagcaatttcacaatcagtagtcaaacaaaactacgctaggaatcacctcacatccgcccatgaccgtgggcacgactgttcgaacagtttgttaacctctgcagagggggtacactttacccacacgacattactaacccggatcacccagcccgaggggatcagccacgtcgggagacctccaagctttcatgacaaggcatttcgaaagccgatacaggtttaccatatgccgacgagaggggtcccagaccaacaacagggtaggtcccagaccatactgtgccagcaagcccaggggtcctccccgacaccaccccggtgaatccacatgtctctcggcatcaaggctcccctgataagctagttactcagccaggggtgtcccattccacccatgtggtcgtacttatcttatgtttggatgaaattccaaggaatcggtccttaagtgcgagagcgggaaaccgtacacccggtacgttccccggtccgcggttttggaaattcatttagttcgcaagcaccgacccaggtgtcgggttttccaagtcttttgtaaaactccagttttacccaagttggtattcagattttaagtttgaaggcgtccgtcgatactcgcacggggtgcacgaatatcgagacgcaactagatggttacaaggggaccagatatagcaattaacaatggaaggatcaaatgcaacaaattgggtaagtccgccaatctgccttgcagacgggacagcagattaagtgcgatcctatcaatgcataatattttttttcaagcaacataattaaatttcaaatataggttcaagatgttcaaaggtggcttgccttgctcgagatctggagcttgatcctcgaaatcctcgcactgcgggtcttcgggctctgaaactacacgcgaaacgggacaactcaacaaacggcgaaaaaaataaagccctattaatgacctctaagcgtgccattagatagatctcgagatttggggaattttggaagttgaacggagtcaaacggatttacggttgggaagatattgaatttctaagattattggatttttgatctaaaggaaaaaggattaaattaaatcctttttgagaaaaataaaaaggaagagggaggagaagtagacttctctcgggcggctagggcgcggcccaagggaaatggagcggaccggccgatcttaacgggccggccggcccaagacggcccaagcgcgcgcgcgggagggaggagagagagtccggtggaccgggctcaccacgcgcggtcccgggtgggacccgcttggcagcggctcggctcaccgtgcggagggaatttgcggcgtacgcgcgcgggcggagctgggacgcggtgcacgcgcgcggttcgcggaggaacggatgcggcgggcccacgcgcagcctcacggctcaccgcggaccatgcgcacggggaaaaaacggagggagcggctggccgggtcggctgatccggtcgcggccgaggtggcgccgacgtggcgcctacgtggcagccacgcgggccggcgggaggtagacgacgacgccggccggaacggacggcggacgacagcggcgagcggcggagcgaaccacggtgatacgggcaacagcgagcacaccgggcagttgcacgtgacaaggggaggcgagccaacggcttggattcgccggaggttgctcgacggcggcggattgcggcggcggcaaccgatggcgggagaagagggaaacggcgacgaggtcacgagaggtcgattcccggcggtgagagcatctacacggcgatgacgacggcgctgacgacggcggtggccaggcggtcggccaccacggcacgcgcgcgcgggaggcaacgggcggcgtccacgcgggcgcgcacacgctggctcgcggggccgagcgggtgcacggctgcaggcgcgacagagcgagggaaaagggagggggcgctcggcgcggcggctcacgcgcacgcgcgcgcggcgcgcgggcggggcggagaaggagggcgagggcgcccgggagagagggggccggggagagatgggccgagcggaattcggcccatcgaacccagggaggcaaactagacttttgcggaggaatttaatttggagggatttggattcggaattgaactcgacgatagatcggggattgagatcttgagatggcacggacactagacaacaagcaaagaaacaaatttcgcaattagggtttttaagagataattttcccgctaggcgccacgacggaacgggcgctacagatatattttatatttatctatcttgttgtttttttaaaaaaaaaatctttttagttacattttggatgacatgtacaaatcactagggaagacaatagttcacctcagttatattactttcctgtcccgaaatataaaatctaggagttgatcagacataacctattacaataaggatatcttgatatattgtacaaggttatgtccaatatatcttttcttaagtcactactcctttcgtcccaatatactgcaatctaggatatgatgggattatattcatatatccatattcgtagtcctcctatcctaggttgctacatattggaacgaagactgtatattttaggacaagaagagtatgtgagaagagtgggtgccttgaatgagaattaaatgaagctaggatgcacttaattagtacttcctatgtattgtacggttatttgttaaggaagaaaagaattgatctagagtagacttgacatgcaacaagatctgtcgctcatgatcaccatgcagagcaaaattttaggaactatctatatatgtcgtcgtatttttataaaaaatagtcggcatatatttatattgtaaattcttaaaattatatatgtaagtgaatataagtagatgtaagtacaatctaacgaacatatattgtaagtcagattcttttccagctcgatattacccaggggaacttgctcttctggaattcgaagacatttctttaactgggatacgtggaacacgttgtgcacatctgcgagaccttcaggtagctcaagctgataagccacttcgccacgtctggcggttatgaggtaggggccgatgtagcggggtgctaacttgccggacatcccaaaccttctcataccatggaggggtgatactcgcaggtatacatgatctcctttttcgaactcaaggtcacgtctccgattgtcagcgtaattcttttggcggttctgcgctgtcttcaaacgttctcggatcagcttaacttgttcttctgctgacttgagtatgtcaggaccgaatactagcgcttcgcccacctcattccagcacaagggagtgcggcactttcttccgaacattgcctcattcggcgacatctgaatgctggcctgatagctgttgttgtatgagaactcggcatacggcaaacaacgatcccaagtgccttcgaaatccagggcacacgcacgtagcatgtcttctaggatttggtttaccctttcggtctgaccatcggtctgcggatggtaggctgtactaaaatttagatcagttccgagagcttcatgcaactgcttccagaaccttgaggtgaactgagtgcctcggtctgacacgatcttcttgggacagccaaatctacatacgacatgggtcatgtagagttctgctagtttctttccatcataggtggttttcactagcacgaaatgagctgatttcgtgaggcgatccgcgattacccaaatggagtcgtacccgctaggggttcttggcaaaccggtgatgaaatccattccgatctcttcccatttccactcgggaatcggtaggggttgcagcagaccagctggcctctgatgctctgccttgactctttggcaaatgtcacacaaggctacgtattctgcgacatctcgcttcattccagcccaccagaagtatgccttgatatcttggtacatcttcgtacttcctggatgaatggagtaggcggactcatgagcttcttttaggatgagatctcttaactccttcttggccggtacatagatgcgtggaccgcaccaaactgtgccttgatcgtctatggaaaaattggtgtctttcttctcctgtattctttttattaactcttttatcccttcgtcgtctttctgtgcctcccggatttgcgactctagggtaggctgtactgtcaagctggcagggacacctgactgtaccatggtcagccttaacttctccaattctctgcacaggtgatcttggtcgggccgtatttgagctacgttgcaataggccttgcgacttagcgcatcagcgaccacgttggctttaccaggatgatagtggattccaaggtcgtaatccttgattagttccaaccatcttctctgtctcatatttaactcggtctgtgtgaagatatacttaagacttttgtgatcggtgtatacttcacatctgttcccgattaaatagtgcctccagatcttaagagcatgaaccacggctgccaactcgagatcatgggtgggataattgacttcatgaggcctgagctgcctggatgcataggccacaacctttcgttcttgcattaggacacatcctaagccttgtcttgatgcgtcacagaagatctcgaaatcttttcggatatctggcaaggtaagaactggggcagtggtcaaccttttcttcatttcttgaaagctgtcttcacaggctgcagaccattgaaatttcttttccttctttaacagctcagtcataggtctggctagcttagagaatcctttaatgaatcttcgataatatcccgctaagccaaggaagctgcgaatctctgacacattcttggggtatatcaggatgtcatcgatgaacaccacgacaaactggtccaggtattccataaagattttgtcattaagttcatgaagaacgctggagcattggtgagtccgaaggacattactgtgaactcgtatagaccataacgcgttgagaaagcggtcttcggaatatcttcagatctgattttcagttggtggtaacctgacctcaagtcaatttttgagaaaactcttgctcctttgagttgatcgaataaatcgtcaatccgtggcaacgggtacttgttctttatagttacttcattcagggctctatagtcgattaccattctctcagagccatcctttttcttaaccagaagcactggggctccccaaggggatgagctaggtcgcacataacctttactctccaattcttcgatttgtcttttaacttctgctaactcattagctgccattcggtagggtctctttgcaattggggcagtgcctagtgccagttctatggcgaactcgatctctcggtctggtggcattcttgttaattcttccggaaatacgtcggggtatgcacagactatgggcaccgactccaaggaggtgacttgtaaacaggttagaatagaccggcttgcggtaggggtgttaggggtaaagcggatttgctttcctccaggtccttgcaaggtgatggacttttcggcacattctatctgtcatttgtgcttagccaaccaatccatccctagaatgatgtccaagctttgcgagtctaggactatcggtttggctaggaagtcaacttcctcaattctaaggttaacttccgggcatatttgagttgcccttatattcctcccaggggaatgtactatcattggtacacgcaaattttgggttttccaaccatttcttttcacaaaagcttgtgatatgaaagaatgagaagctcctgaatcaaacagaactattgcgggtacggtgttgacagagaacatacccatcacaacgtctggagcatcctgagcggtttcagcttgaatgtgattcacacggcctcgaccaaagttgttggaagcacgtgaaccttgtccacttgcctgagagctaggacgagactgagctgccgctggagtaggagttctggcagtgctgccattagcatgtcctgagttggtgttggtaggattctgaggacactgtctagcatagtgacccatctggttgcaccggaaacactgaactgctgacggtccctgtggtgacttgaaagaggtaacactgtttggcgcagtgttgccactaggggcacgctgctgtggcggaggtgccggacggttcatctgagggcgaggggcgtagcctggctggcggttagcctgagtgaccgactggtggtattgcatgggttgaccgtagcgagggcgaggtgcgcctcgggaagaatttccctgatggttagacttgcgtttcttgtattcttcggtagcctcttttctggcatcctcaagtagaagtgccttgttgatcatatgttgaaaagtggggaagtcatgcgcaagcaactggagtctcattccaactgcgatccctttcaagaatttcctaatcttcttcttgtctgtgtccacttcctcaggggcgtaccgagccaacttattgaactgacttaggtactcattgacactgctgttgccttgcttaagtctgttgaattcttctttcttcatgtcaatagtgctttcaggcacatgagctgcacggaaagccgtagcaaactcatcccaagcaatgttagtgggttcaaggtgtgcattgcagtaattctcccaccaatctgcggcaggtcctcttaactggtgagaggcgtagagcgtcttctcaaccggagtacactgcactaagttgagttttctatcaacatctttcaaccaatcgtcagcctcgacgggctcgacggtctgagagaactctggcggacgagacctcagaaagtctgtcagcttggatctgttgttgcccatgtgagggtggccatttccatgcgcattatgctgaaaactggctatggctgtggttagtccttgcaagatttgtgtctgaactgccattaagtgttgcatgttgttttccacatgaggtggggaagggaggcgttcttctccagaattgtgactggcagtgtggtgagagcggtgagactgttccatctctgcatcacgggaaactgtgcgatgcgagcggctgctgcggcggggttgctcaacctctgcgttgcgggaaacagtacggtgcgaacggttgctgtggtgagactgctcattagctgattcatgatttgcttctggttcgactctaccatcttcaaaaccaaagcgggctggcgcacgagctgtacggcgggggcggctagccatctaaactcccagaagagggcggggtaagagtcagataagcacttaggagggcaagaagcaaagaaaatagcaactcagatagcacacactaggcataaactggatttttcaaatcataaaaacacctgatacaacgggtatggacaagtcacagagctacgccgagcttgactgtgcgcacaccacctaggagaaccagactaccaaacaacacccacaacaaacacacgcacgcactacctcgccacgactccaaaagagttggcggcggaacaaaagggcctatcacacggacggctgctgaagactgcctcctctactcctcgtcggcctggctgcctcctgtagtcggctcctcagtcgaagaaacgtcgatcggctggcgcgaagggaccggcggaacctgtcgagggccggcagcagcacggaccgctagcggtgggggagctgggtagtggaaacggaacacggtggaagaaccaacaacacgcttccgcgcagtgcggataaagcgtgggccacggcgggaggaagcaactggggtgtgtccgggggtgtaggaagggctaactgggtgtgggtagggggagtacactggtgagtacggcgcacgcgagctgggggagcgcgggccactgggagtgcgggcagagccgcgggagctgtgggaggacaggtggctggcgtggcagaggcggcctgagtcccaagagatagtgtcaactgaggtgacaccctcctcggccagacaggcctccaaggcggcgtagcggcgggcaagggagcggtaagcctcaaggagtaggtcgtgctgagtggcctgagcctccgaaagctcaaccatgcgagtcagcactggctgagactcgctgtacggacaagggtacctggcgtctgagtggccagaaggaaggcgtggaagctgccggaaggcggagcctccgagacggtggctgtagtcgtgggccaggcgacgaagcgcagtccaggagaggtcctggtacgcgatctagagagtgggcctggccacagtgaagtggtgtgggcgaaggccagctccgtgtatacctccacgggggtaaaggtacacagagagctcacagtgagggggaacacggtccacggagtaccccgtgtactcgggacacgagaagccaaggaaacgggcgaggtcacgaagctgagcgacgtggtgaccctcaccaaaaccgtgggaactgaagctggcgttcactgccatctacaattttgaaagagggagaaagatcagtaaccattttagaaacaaactattgaaaataaagaaaacaaaagaaaccttagcttttcgcaagtagttttgaacttagtatccttagggtcgtcctaagcgtcgggtttcgccctagggccaagcctgtgctctgataccatctcttgtcacgccccgaactagccccgactggaactagcctgtgacgctccaaattaacctgttaatcgataccagtcccaggaaacagtgctggtatcacaggaagacagaatattacagcaacagaggtctctttattatagagttggaatacagttatgttgggctacggacagatcccgagctcacaactgcaatacaaaaggggaaacggaagccaggacttggaccaatcatcacaggcgcgacttgggaactaggccgaaaccctaaaactcatcgtagccggcttgctcctggaagaactcctcgtcagcaggatccgcttcatcttcttcagcaactggggggggattatttatctagagcaagggtgagtacgggagtactcagcaagccaggggaaataagtgtttaatgcaggcttcaaggaaaggctgttgtttttgcaattggttttatttgaactcttttctaaaacaactaggtgagtgcttctcaaacgacacggatgagacagtgcgtctcgtccggtcggagtatgtgcaatgtatcagctctttagaattgaaacaagattggcacccggccaacagctttttaaacggccacccgggccaacaacttttcaaacggccacccgggcctagctgatcccgtcagctgctgatttttcagacgtcgaacccattttcacgacagcaatttcacaatcagtagtcaaacaaaactacgctaggaatcacctcacatccgcccatgaccgtgggcacgactgttcgaacagtttgttaacctctgcagagggggtacactttacccacacgacattactaacccggatcacccagcccgaggggatcagccacgtcgggagacctccaagctttcatgacaaggcatttcgaaagccgatacaggtttaccatatgccgacgagaggggtcccagaccaacaacagggtaggtcccagaccatactgtgccagcaagcccaggggtcctccccgacaccaccccggtgaatccacatgtctctcggcatcaaggctcccctgataagctagttactcagccaggggtgtcccattccacccatgtggtcgtacttatcttatgtttggatgaaattccaaggaatcggtccttaagtgcgagagcgggaaaccgtacacccggtacgttccccggtccgcggttttggaaattcatttagttcgcaagcaccgacccaggtgtcgggttttccaagtcttttgtaaaactccagttttacccaagttggtattcagattttaagtttgaaggcgtccgtcgatactcgcacggggtgcacgaatatcgagacgcaactagatggttacaaggggaccagatatagcaattaacaatggaaggatcaaatgcaacaaattgggtaagtccgccaatctgccttgcagacgggacagcagattaagtgcgatcctatcaatgcataatattttttttcaagcaacataattaaatttcaaatataggttcaagatgttcaaaggtggcttgccttgctcgagatctggagcttgatcctcgaaatcctcgcactgcgggtcttcgggctctgaaactacacgcgaaacgggacaactcaacaaacggcg

SEQ ID NO: 5652 - DNA, 24584 bp, Oryza sativa
  unsure (1)..(24584): unsure at all n locations
tagaatgacttacattgtgaaacggagggagtaccaatttaaccctactttttggagtttgcttatttgaccctccttttaaaaaacgaagctcctctctgaccctattccttttaggtgagttcatggtgttaagttagaggtaaatagtccattttgcccttgcttatttgaccctattatatcttgcttgtttgaccctactatgtcataccgtgtatatatttgaatactttgacatatttgtaataattttttcataagtttcacattgaagacaagtttgacagatttgtcataaatttggcaaatttgaatcattttgtcaaatttgatagaattttgacaaaataaattaaacaaaatttgacacagttatgacagatttggtgcgcgccttctcgggccccatcgtctccattgtcccgccgaaggcgcgtggtgggagccacctgacgcccgagccgccgtcgcccaaggtctcctgcatcggccaaatcaagaaggccaacgccaagaaggtcaaggcgtgctgcaagaacggtgcatgccgctgccgccccggccgccggccgactccaccgctgccacagcgcgcagctggcagaagagctcgctcgtcaggcggatgctcttccgccgcagcaggtcgaggaaggcgtcgtcgtcgcccccttcctgcgcttcccgccgccgccgctcccttcctccatgagccgccgccgcccctttcctccgcttcccgccgccgccgctccttcccttcatggccgggcgccggcgtggatcccgccgccaccactcccttcctctgcgagccgccgccgccgccccctttctccgcttcccaccgccaccgctccttctcttcaaggctgggtgccggcgcgggtttgccgagcgggggtcggctttacgccgccgtcgcacccgcagacgcctcgccgcttcctcagagcgccgccatcgccgctgcaccacctgccgccgccgccgcaagcccacaagcacgagagatacaaagagctgtggatagggtttggatggatagggtatacgagggtactttaggcattacgaataataatcacatttttttttaaaaaaaatcaaaccttaacggaggagtggagacagggtcagacgtgagctttattttttaggggggggcggggggtcaaataagcaaactccaaaaagtagggttaaattggtagttagagtctaaaacggggtcaaataaggaattgtccctaaatcttttggtcgtgtatattcaaaggggctattttgaaggctaactatcaatttgaccctacttttttagtttgcttatttgaccatgcttttcaaaatcgaagatgaaagtagaccatattccattaagacaagttaacattgttaactaaggggcaaataagtcccttatgcccttccttattcgactctattatgtcaaaacgtgcatatattcagacctttagacgtagttgtaacgaatttgacatatctttcacatttgacacaagtttgatagatttggcttcaatttgataaagttgaatcagtttgacatatttttgacaaaacaaaataaacaaaatttgacacaaagtagcccctcctcgctccgtgctgccaccttgccgcccccctcctctctctgcaccgacacccgcgccgctatctcctccctctaggcgccagtgctgccaccgctgccgccacctccgacctaatgtgaccatggatactatggatacaaccgttgcttatatcatggatcaacaagaagacaacaagatcaagtcctccaagtgctggaattcgattcggccacctactacattgttgacttcaaacggccgccaaatatgcatacgagctccgttttgggtccacgagtacttgatggaaagctctcggagttctctttccaaggatccaacctcattgtgaaattccatttcatttagccgcaattgaaaaaacaatgtgatgtgtcacctgtaatgggtctatgggcttgtaactttgtctgggatcccggcccaagtggggcccacgtagggtgtgccccaactttcacgcgcctacactggtgccacctcccttcattcgaggcataacgttaggcggaggctacgcccctcctccctccgtgccgccacctgcgctggcaccaccgccctcctctcttcgtgccaccaccaccccctcctccctccgcgttcggcgccgccgtcccctctctacacgtgttggtgctgctgttgccaccgcctcaccctccgtgcacctacgctgccaccccgcgagtcggcgccaccgcagctgccgcttgcaccgagagaaacaagagagagagagataagggtcatgtattgaggtcgggaaatgtataagattaaagggaggtaattttggtttgttagagaataaataatttttttcttttgcgaaaatgaaaccctaaatggtttagtgcaaatagggttcgattttgagatgtaggagttcaaattgatagctagcatttgaaacagggtcagataagcaattgttccatatttaaaaaaatacatacagatagatgaaacgaaacacaacttccatgactgcattaagatatcgataggaacaattttttttgaaaggaatatattgataaaaacatatccagtttctttttcccaaatcttaagtcatagacttcctaatcctggatagtttcaaactctaggaagcaggatcaggatacttgttctacaatgcatccgtttagtgcaacaaacagctctacgggtggcaaatcaaatgcaagtgacaagaataggattttaaaagaagaatagaaaacacgtagaatattcataggcatgcgaatgcaaaacaaataaaaaacacaggaatagtcattcaaatataccgtaggaaaaccagaaaaccataggaatcaaatgaaagatagaattgaagaaaatttttcctaagatattaataattgctaactttcctctaaaatctctacatgattatccattctaatagaattttaaaagggaaataacagaattcaatcaaattcctatagaattaaaatcctttaaatttactatattttttctacaaatcaaatgcgcccttaaattggtattcttgatgcataaaatttcagaatctccattacccaacaagattttaaacttatttgctggtcttccaccagaagactctaacgaaagatctgctggtctcatcacccaccggctcagaagaatgcacaagatcggtaaagtcggatgacctgtgcggatcatgcccccatcaacggacatcaatcttagattgtgtttagatttaggggtgtaaaagttttcatgtgtcacatggaatatatacgaacacccatttgaagtattaaataatccgtcagtaaaccacgagataaatttattaaacataattaatccgtcattaacaaatatttattgtagcaccacattgtcaaattatagaacaattaggcttaaaagattcgtctcgcaaattagtcgcaatctgtgcaataagttattttgttagcctatatttatataggtgttcaaacgttcgatgtgacatgattaaaattttggggtgggatcttaacacccccttagtggacaaacagaatatatctattctaaatgcagttccgcaaacccgaccaaaattcacaagaatgtatattagactttctcctgagaaattttaccttcagaacaattgatgataaccttcaaaggcaccgattcacacctatttggcacgctatattaaacacagatcctagttgtggcatggcaggccagtcctatttgtggtcaacacggatcctcggccgaatttgtgtgacagcaatcaagtcaatcccaccgcaaccacattacattttcttcggagctaaagttcctatgcaatcaatttatgtttggagctaaagttcctaacaatcatatttacccttttgagagggttcctaagcaattactaaatcttcacaagtcacaacatgtgttgtgaagactgaagacatacattcctgcgttggaagtcacaacatgtgtgtagcagcctagcaggagaacaggtgatcagatgccaatgcatttaaccagatgctgtttactgcagccgccagccaaacataatgctcagcaaaggcaaccaactatccctctttcatcttgtcttctacttcatcagaagattcaacttttggagcagcctgtgcctcgcccatttggacatctgaagctgaagctgaagctgaatcattcagggttttgaccggtgctgctggcaaggtagcagcaggcttgcctgttggctcttcttggtcttggttagaaaccatggttacctcatcagtgttcacatccatcattttgtgctgctttgggggtttctgctccgctgagctcttatcattgtgcgacaccaaatcaaccacagcctctttagccatacctgctgctctagcagcatgcagaatctgaagcctgtagtcagtttctggtcggcgacataccttcctcagtggaacaatttcctgtcattttaaatggaattttaatgattgtaaacgaatcagagtaaaacacaataaggttttagttttattcaacaaagtgaaataactagcaaaagcccggtaaaatacattattttaggtagttcggcaataaaaaataagaaaggcgcaagacagcaggatgcatgggctaatatcatatgaacttggaaaatctatgcatgcatacttaaattttcagagatgatgaatataaatttgcatggtgtccttaaaattccacatctagagcataaataaaaattgcttaaacttctacaggaacctataggatgatgctacaacatatggtactcacgggtataacgtgcacaagctaatatcatatgcataaggtcgttaaacttgcacagtaaagcgttgatggaattgcgtatgcaagttcaggaacttaaacaacgacgctttacttatgaagtatatcattaaagccataatgtaagagaataaattagattcttagagcatgcattactacaatagtcacacaacattcaacgggtgaatgcagtgagtaaaatacctcagagtgatcatgatcgtagcgaacaagaaatctacagcgacaccctcgtacatcatgtctacgcctttgagcatcaaggacacaagcatcgaaatacagagcctgctctttgccttcctggtcaatttaggacagatgtatttgttcatgttagacaacaatttgagtaaatgtgatacctaatcataattataaatagcatttcatcaagataatcatcgaagaacatatatttatgtttagatttctttatttaaaaagcaggaacctaaatgtgtgttcaattactggtttacagttttacaccccttggtgttttgtgcatcaagtatcaaatatgcatgactttttttggccatgttttaaggaaaatctgtgatacatttttttagaacagaacaaacagaaatcaatcttctaacttaaaattaaaattttgaattcaactacacatcaattctgaatctgtgacatgtagatacagtacataggtcaagaaaagatgtctaagatggcaagacctgaaagcaaagtatgaggtctccaggaagaacagcaacacattcagttgattcacacggaagagaacgttgccgcacacatttacggacatttatccattcatcttcctcggctccaaatccagaaaagcgaactcgtacttcctaaaatattaagaattgctcatgtgagacaaattatttataccacatgttgtaactaggaataaatgtcattgtgtatacacagttttataaaaataccggcacaacaacgcaggcatgtcatattggcatatgttggaaaaaaattattcaactgtagtgccaattttagatataagccagatttttttaaaaaatacagaatgttctgaaagtcatactagaacaccaataatgcagtagaaacttgtttttaaaaaataattaaagaaaaaggattgagtatgcaaccgcattaagataaatgatataaatcgaatcagctacaggttcaaagctagcaaagtgctttcaataaagaaagccagacatgcatttagcaacataaattatatctaataaaaaaactatgatccttactggatcaccagattcgaacaaccgatgagacaggaaggcagcaacatcatacctgcacataaaagcttagttatacacaaaaaaaaatgtaaaaacacagagattacaatttttcaagaacatagtgtagaaagtatctgaactcgttgattcatttgcatttgtagttaatgatcaggcacaatattcgttgagcacaaatatacatttgtttaggatggctaccactaccatagaagtgaacttatatgaatgacagaccataagaatgctgatatacttaatcagatgttaaaagagatcttgcgtaaccagttcccctctacattgggttgaatgaatttagttggatcttcaattcaaatccaaattgaattcgaattgtcatctcaattattttcattgtgattggttgccaaaggcatctcaaatagaaatgacctctcaataaatatccagtttaaggttggatgcaatacgcaaatgaattggcacattggaagcaaacaaacaaaccaggaggcctgatgttccttcttgggtagttgccgaagtggtggctggagcatcactggtgtgctgaccagagcaatcaatggccacagcggctactagggaagtagacagcttaacagcagattttgtcagggacgctgacaaccagagttgagaaagatgaaggatgactgctagagttaaggaagaaggaaatggccactggagtggtgaaagaagggatggcagctgtaggtctagaaaatagaccgtgaaacagtgatagtggcacaagaaattggtgaatggtcaccagtgaaagatccagtgaaagctccaatcatagtgctctgaattggtggaggaccaatttagttgtccaccgattcagtcggaaatggcctacaactccaaatcagaagagcaaccaacgacggaattgagagatccaattctaattccccttttctagcctcagttctggcatccaaatggggtcttgtattcaactttgtagatatgaacacaaacataaaaaaaaaacacagatcaataaagaaaactgaaacctaatttaacagtatctgacaattctatagcaagcaattctcttcataataaagtcagcaaaactgagatacaaacctatataacaaacaagtatgctgcttagaagttagaatggtgattaagaagcaatcgttaaacttaaactcagtatagagcatattataaagaatacagaacaaagaaaaccatccaaaacagtgaaatactaaattgcaagatatgacctgtgaatcactcagtcacagatggatcattcggccatcagtcaaaccacatgctctattttataataagaaagctatcaatttgtgatctgtgcaggcaaggttaatagaacttatatttctcacttacaatgttaaccaataacacaggtgcatctggaggtttactgttgtccatgctatttttgaattttactgaannnnnnnnnnnnnnnnnnnnnaaccccaccaggctgtaggaaaactggtcagttcagctatgatttgcaggccaatatgggaaacaatccaattagacgggctgatcaagccagaactttaggttcagtttattccagtcagaccactagtttggtccaagtctgataactatgtgtcaaacagcaagcaaaacgccatgaacctactcgtacatggaaatcaaaagacaaaagacatagaagtaacatggataccatgcgccatctctagccgactttgcttcaaattcaacctggccgctctccaaagaacccttccctgattttgaacaccaaagatcaacaatcagaggataaaaaggaatgataaacaatgatcatgatgcatagatggaaggttactaacatagaaccaatacacggatctgacatatggccgaagtatctcattacttatagggttaattggatccatgacattataaatttgcctgttttgaaaaataccattactattcgtctagtcggaacggtgccattataaaattgttgaaaccggagatataccactacctactcctaatagcaagagtaacatgagcaaatgacctgagggcgagccggagtgcgcagaggcagagggcatagccctgaagggaggcgacttgtgctcgtcggaccccgtgggcagcatcttggtctgcatcagcgtcggggggcccctggagctcctggagcggtgcgagtacctccggttctggaaccagttccacacctgcgagtgcggccggatcgagatgaggcggcgaattccccgccagggagggggaagaggaaggaggaggggggaggaaaaccctaatggtaacctgcttgggctggacggcgaccttgccggagcgggcgggggaggaggtgaacttgtcggcgagggcctggatgacggagcggtgcgggatggcgttgttgagctgctgcaggcgggcctccatctcggccacctccgcctgggtgaaccggaacgccgggccccccgtgctcggcggccgccccatcccgaccacgccggcgtctgcggctgcgaggggaggggattagttggatggatccatgattccatgggggaatcggagaggaagcgagcgagcgagaggagagatagacgttaccagtgatgcagcgatgagcgattcctcgttcaggcaggcaggcaggcaggcagccgctgagagaggggatcggtggtggtgtggtgtggtgtggtgtggtggctgcccccctattactcgtgccgaattcggctcttttttcttttttcttttcttttttaatcgttggatgtgtcacgtgggtggcctatacattggcttcaggtccatcaattgttgtaacgcgtatctatgcatctgttcttaaaaaggttaatttgattcataccattataaatgtgtctattcatataaatatcgttataattcgtttattcataaccatgtctctcgaattttataaaattagaatcataacagcactgtcactttttccatcttcttcctcatctacacgtgggaagcacctgtcagattcatcttcttcctccatcttcccctcttctcttttcttccctattctccaccacttgttagcatcctccccaccaatccatcccgaccccctcctcgctgcagagtatgcctctaccctcgccaacgcgggagtccacgtccctgacctccgttgcctactcaatcaatgcaagaactactcgatgtttggtgcacgactgtggcaacgagttcgacctacggccgggagaagcaccaatggatgcacgatgacggcacgctcgcctactcaatcgacggcgtctagtagcgaggtactcccacttgctctggcggcctgttgctgtgtgcggcaaggaaggatcaggatggatgtatgtggaagaggctgagaagcggtggataaagatgggaaaaaaaggaatatgggaggatgaaggaagaagatgaatctccaggtgggtcccacgtcaagatggaggaagatggaaaacatgaccgtgatgataatgttctaattttataaaatttgagtagcatagctacgaatagataaattgtattgatatttatctaaattgtggagattatggataccccatacccacatggcatgtatatccgactgggtatgggggtaccatgtatagatagatagaatatctttaaagggtttcgggttaaattcctaaacttgtatatcaaggaagcacccgggatttcagtcggttacaattgtattttatctataactgcctattccgttaggaatatgggctgtactttgtaatacggactccttcccctatataaggaggggtccgggtgcctcttggggcacgatttttctctcagatcatacgatcaataatatactcggcggatcaatcctcggacaggagtagggtattacttcttattaagaaggcctgaacctgtataaaattccttgtctctaaacccatccacttttctagcttgatagccacccccttttagtattgccgaaatcttgtttcgacagttggcgcgccagataggggtagcgtcaagttcttcgccgactagtgcgatgggtttcgtctccggcatcgacgacttcgtcttccctcccgagcaggtgttcctgttcggcagcctcgacttcatcaccaacgactttggcaagatttctctccttgactcggatccgaaccagtcagggagaggccaggtctccgtcccgttcggtatcccaaactcggccgagatctactccaaaatcatctcaaccgagttggcttcaaaccactcgaacgagatccaatctactccgacacgacctgatcaagatgatggggcctatccctcaatcctgatgaaactccccgacgatttggccgctgttttcaccacaaggacatcttcttcccgtaggcctagacgggatccggccttggccccgatccaatctagctccagggaagtcggcgttatactccaacctctcgggacggttttgacggaagaattagatggctaccttagcaaccccggtgtcgattctcgaccgacggagatcctcgagtacgacgacttcggctaccactacgactacagcaacctcgacgacttcgacgaaagctacgaagacaactacacgcctctcttcttcggcattttcatggctgacaacgagacggcagaacagcgtcaagcccgagaagcagaagaacagcgcgcacgacaagaagccgagcgttgccgactggaggaggagcgactagcataggagcgagaccggctgcagcgtgagcaacaggagcgtgaacgggccgcaaaggaggctgaggaccggcgacagcgcgccttggaggctgggcgacgagcacgagatcttatcggacaacaagacattgaaaggacggcggtttttcgcaccctgcagcagaacgcggtagccgcgattacccttctggacactctacttcagcaagatgcacctgaccacgtcgtcaacatcttaaaccagaccaagaccatgatcgtcgcctcggtcccagtgattttctcaagcgtccgtatgccgactgacagccgagttccacctcttcgatctaaagactatcaccaaccaagccttagcgttgccggcgcgggatctagtcgcaggagcagggatcatggtgaacgatctgttcactcacctgccgaccgacacagggagcgtccggctgaacagcctcgctctccacgttgcaggcgtcccatcgatcttcgcgatactatcaaccagcgtcgtgcggcgagaggccacattccctaccaatcactagatcgttacgacgacgatgtggatggagttgccgccttcacaagtgacttgcgtcgagtggattggccagccggcttcaagccgactggaatcgagaagtatgacggcacgacaaatcctgagtcttggctcaccgtctacggtctcgcaattcgcgcagcaggaggagatagcaaagccatggctaattatctgccagtgaccttagcggactctgcccagtcctggcttcacgggttaccccgtggcacgattggatcttgggcgaagcttcacgagcacttcatcgccaacttccagtgcacctttgaatgccctggtacctagtttgatctttacaatgtcatccagaagtccggagaatcccttcgagattacatccgacgtttttctgaacaacgtaacaagatttctgacatcaccgatgacgttatcatcgccgccttcactaagggtattcgccatgaactcttagtcggcaagtttggacgcaagcctcccaagacagtcaagcaaatgtttgaaaaggccaatgagtacgccaaagtagaagacgctgtcactacatccaagcagtcgggcagcacctggaagccaaagaaagatgcgccgactacggggggagtggaagtgccaatcacaaagatcgcaagcgtaagcccgaggaacttgtggcaactactacaccatcctcccgacagcggtcacacatcaacaccttcgacaagatcatgaatgcccaatgcccgcatcatctgaattcaaaccacgcagccaaagattgcttcgtctacaaacagttcacagagcaatatgccaagaacgcacggaagtcgattgacagagatcaaagcacgtcgaagaagaaggatgatgaagacgatgccccgactggttttcaagactctcgcaaggaactcaaccatatctttggtgggcccctagcttacaaatccaagctgaaagcaaaagctgactgaatgggagatcaatgctgttcagctcgatacgcctcaatatcttcggtggtcagagacagctatcaagtttgaccactcggatcatcctgactgagtggtccactcggggcggtaccccctggtactagaccctgtggttcgcaacgtcaagctccgacgatccctcatcgatggtggcagtgcactcaatatcctttttgccaagactctggacgacatgcagatccctcggaccgagttgaagccaagtagtgcgccctttcacggagtcattccccggctatcttctactccactcggctagatcaccttgccagtcacctttggcactcgggagaactttcgcacagagaacatttgcttcgaagttgctgactttgagacagcgtaccaagctatactcagacgcctggcgttacccaagttcatggctgtcccacactatacctacatgatgatgaagatgccaggacctcgaggagtcatatctctgcagagtgacatcaagcaagccgtcacctgcgacaaggaaagctgcgagatggcacaaacacgcgagatcacgctcgctcgagaggagattcgactggctgcatcaacagcaaccgaaggagaagtgcctgcacccaagatatcaaagagcggagaaagcgacggcaagactaagaaaattcctcttgatccctctgatcccaccaaaactgctgtaataggcgccgagttagactgtaaataggaaagcgcgctcatcacctttcttcaagctaataaagatatttttgcgtggaaaccatctgatatgcctggtattcttagggaggtgattgagcactctttacacgttaaggaagacgctaaacccattaagtaacgactccgccgttttgtgaaagataggaaagacgcgatcaaggaggaattaaccaagctgttagcagccggcttcatcaaggaagtcctacatcccgattggctggcaaacccagtcctggttcagaagaagacaggacaatggcgtatgtgtgtcgattacaccgacctcaataaatcttatcctaaggatccctttgtgttacctcgcattgactaggaagttgactcaacggccggctgtgagttactcagttttttggattgctactcgggttatcatcagatcagcttgaaagagtccgactgcttgaggacctcattcattacgccttttggggcttactgctatattactatgccttttggattgaagaacgccggagcaacttatcagtgcatgatccagaagtgtttttcaactcagattggtcgcaacgttgaagcttatgttgatgacgtagtcgtgaagaccaagcagaaggatgacttaattgcagatctagaagagacctttgctaacatccgcgccttcaggatgaagttgaatcctaaaaagtgcaccttcggagtaccgtcagggaagccgcttggctttatggtatcccgtaggggcatacaagccaatccggagaagatcaatgccatcctcaacatgaaaccgccaagttcctagaaagatgtccaaaagctgactggatgcatggcggcgctcagccggtttgtctcacgactcggcgagcggggatgccctttttcaagttgctaaagaaaaccgacaatttcgagtggggacccgaagcccagaaagcctttgaagacttcaggaaacttctcacaactccaccagtcttagcttcaccacatccgtgagagccgctgttgttatatgtgttggcaacatctcaagttgtgagcacggtcctggttgtcgagcgtgaagaagacggccatgttcaaaaagtccaacgaccaatttacttcgttagcgaggttttggccgactccaagacaagatatcctcaggtacaaaagttgttatatgatgttttaattaccgtcaggaaattatcccactattttcaaggtcactcggtcacggtggtcacattgtttccactcggagacatacttcataatcgcgaggcaaatggacggattgtgaagtgggccctagagttgatgtctttggatctatccttcaagccacgaacctcaatcaagtgccaagctttggcagatttcgtcgccgagtgaaccgagtgccaagaagacacacctacggagaagatggagtactggactatgcattttgatgggtcaaagaggcttttgggcactggagcaggggttgtcctaatttccccgactggagaaaggctaagctacgtactgtggatacatttttctgcatcccataatgtggcggaatatgaggcgcttcttcatgggttaaggatcgcagtatctttagggattcggcgtctaatagttcgtgaagattctcagttggttgttaatcaagtcatgaaagaatggtcctgcttcgatgataatatggctgcttatcgacaagagatacgcaagttggaagacaagttcgatggcctggagttaacccatgttctccggcatgataatgaagcggcccacatactggccaatttcggttcgaaacgagaaacagctccttccgatgtgtttgttgagcatctttatgaaccaaccgtaccaagaaaagaaacgaccgaggcagtggacactcaagaagtaagcatgatcgacaccgactgcagagagcccctcatcaagtttttgaccaagcaagaactccctcaggataaagacgaagccgagcggatttccaggcgcagcaagctttatgtcatacatgagaccgagctgtaaaggaagagtccatcaggaatcctgcaacgctgtgtttctttggaggagggaaggctattgctaagagatatacactcgggcatctgtgagaatcacgctgccgcatgaaccattgttggcaaggcttatcggtagggttttttcggcccactgctgtatctgacgccaataaaattgtgtgaacatgtgaaggttgtcaattttttgccagacaaactcatttaccagctcaggagttgcaaactatcccattatcctggctgttcgcggtttgggggctcgacatggttggccctttcaaaaaggctaccgatgatttcactcatctttttgtagctgttgacaagttctcccagtggattgaagccaagctagtcgtcacaatcacagcggacaaggctagagatttcttcatcaacatcgtgcaccgcttcgggttacccaatcgaattatcaccgataatggtactcaattcactagtggtgtgtttaaagatttttgtgaagactttggcatcaaaatttgctatgcctccgtagcgcaccccatgagcaatggaagttgaacgcgccaatggtatggtacttcaaggtatcaaagcgcgagtctttgaccgactgcgtccttacgccagcaaataggttgatcagctgccatctgtactttggtccctacgcactacgcctagtcgggccacggggcaatcaccgtttttcctggtttatggtgcagaagcaatgttgccgagtgatgtagaattcgaatccttgtgatttctcaactttaaggaggagcgttacggagaagactgagttgatgatctcaatcgactggaggaagctcgagaggcagccttgatctagtcggcccggtatttacaaggattgcgacactatcacaaccgcaacgttcgatcgcgggttttcttagtcggagacatggtcttgaggaagattcaatctacacgagatcggcacaagttatctccgttatgggagggaccgttcataatttctgaagttactcggccaggttcttatcgactcaagcgtgaagacggttctctcgtcgacaactcttggaatattgaacatcttcgtcgtttttatgcttaggcattacttttgtatcttttttccctcttttgactactaacatcaagttgcttcttgagttatcagtcaggggctactatagtaataatggagtgtgattcttatcaattcaatttggttacttggtttatcattgccttgtttggttttttggcttagtcaatgaggtctgagagttttttaacaacttttacgggttctaggctcaataaggtttgacaaaaacttttaagaaatcaggagctgagtttaaattatcaagcacagcataaatacatcagtactgtacaaattgtgcctccatcatcacaagtcacattacacaatgtcaatcagactcagttttttcatcatcagatacatcagccctagtcggaccaagattggtatcatggaatctctctacgacatctacaacgatcttgtccgcagttttctgggcatcattaataagatcaagggcatcttctttacttgttccgtctgcaaagccatcaatatcatcaatattgatcttcggatacaaggatttagtcatcgccaaagccatgcttgctcccatactcccagcttctttaatgttcttgaaatacacatccggagcggtcctcagcttgtcgaagatttcaacagcgttgaataaactcggaccattgttattaaaaaacatagcctggatgagtggtgtagcagtgtcggtgatatgggcccgggggtatcgtgtttagagggaggaggctgccccctaaaggtggggtggcggccactccctcccaaagactagtcggaggaggctaccccccaattccacgtggccctcccccgaggggagtaaggcccaaggtgggatggcggtcactccttcccaaagactagtcggaggaggctgccctaaaatttttacattttggtcctttttgaaaacttattttacaaatagacccctgggaaaacttaaaccggaaatggtcctttttggggcgctagagtggctggcgccgtaccccaacatggtggcgccagccatatttgcgccgtgcccgtgccaccatggcactagggctgttgtggaggtgctaactgggcagaaggggggcgctagccacactggcgccgcccctcataccacggcgccagcatggctggcacgccccttctctgtgggccgcccccttaaaccccatgggccccgccacctttctcctccccactcccattttcgcccaagcactagcccgagctgagcagcggcagctctccccctctctctccccctaacctccccacctcaaatccactccattcgaactagtttttcgtgggattttttgtggaaatcgaagagaaaggtagactcctccattcccccctcttttttttcgtttttattggttgaatttgtagatcgaagggtaaccctagaaaccctttttttgcccaaatttgtgatttttagcatttgttcttgggatttacttgttgtagtgctacatgtttgcaatgtactcattggtgtcacgatttttttaaccatatatgtggtaatgttaatttttggattgtttggttggatggatggatgaaaaattagggttgaggcatgaaagtaattttaatttgatggagttgatgctatagcctataggttaaacttttaaccattaattatatgaaggggagaaaactttgattgcattatagaaattgattatagttaattagaactaggttgggttgtatgacggagtatttgtaatatttcgatgtgtaatgcactagtaaacttgctgatagttgtaggtggattaaatattttttttggagtagtagctttgggacaaattaagttatgcattggttataatatgtcggtttggactacgtttaggaatgaagatttaatttttgttgcaaagttacatttgattttttggtgtagatggatagaattgttcgtgtttactatggtggtagagtggtggaaccttatgttggtgcacatgttgagtttgaggatatgtcattgaagaccattttgtttcccacccacccaactctagatgaactaaggtcacgagtgaaagaagttcttggatggactgaggataatgtggagattcgtttttatgggagatacgatgttggtcaagggcataagtatatattaaatgtgataggtcagttggaatgggaagtttactttgatttggtaaaagagtctcagtttagatctctagaggtgtttgcatcaaagttggtacgtaccgtagaaaatttggatctaaacaaatctccttcttatcattacattgagaagaattttgtgacatattcttctcgtcgtggaggggctgcaagtaagactgagttggtacgagaagacttggagggggaaggagataagaagagacctttgcttggaaatgatttaggggaggcaggaccatcaaagaaacattgcggtagtgatgatgtggatgcagcgaaggagatgaaaagggagttagtacaagaagggcttgatctaagtgacatttgtcggagagtgtgcattggtcgttgtacagaggcaaccctgaatacccgacagaagtagcaggccaatatgtggatccagatgattactttgatgtcgaattgagtggtggccacgattctatctcagtagaagtcaatagagaggaggttgacgaggaggcaagtgctgagcaatatgatgttgaatttgctgaagactctgatgatgaccgtccattccctccactaactaacaatgacaagttagcattagaggaatgtcgtgcgtttgagaaggtgtttgggaggaagccggacattcctgagtttagggacctaacacatgcccatggtgcaatactagatggcggcatcaacctagatctgttgccagaaccattccaggtggatggtctcagaaagggtttagagttcccatccatggtcgcattgaagctatggctccaggagtacgccatcgtgcaccatcgtccataccgtgttgtcaattttgccgcaaataggaggtacactgttaaatgtgaaaacccacggtgcaaatggaaggtccatgcaactaagaggtctagtggcacgtggaggatatcacgggttggtaaggaacatagttgtgctactgccgaaggttcagggagccaccggcagctgacatctaagttcatagcaaataggttatgcaatgccataaaactgcaacctacactctctgcttctgcgttagctttatatatatttgaggttttctagtatagggtgaagtatggcaaggcttggagggcacgagaggaggctatgaagctcatttacggtgaatggggtgaagcgtacgtccgtttgcccactttgctgcaagccattaagcagagaaatcctagtatggtctaccacatcgatactcatcctgatagggttgtcaacgttgatggagtgaccaagaaaatttttatgcgtgcattctggtgctttggtccttccattgaggcttttaagcattgcaggccattactagctatagatgcaaccttcctaactgggaaatatggtggtgccttgatgactgcattatcagctgatgcggaggaccaacttgtacctttagcttttgccttggtggagaaagagaattcacgagactggcgctggtttatcgatcttgttcgacgggttgtggttgggccgcatagggagctttgtattatctcagatcgacatgctggtataatgaataccatgaggactcctgttctaggattgccaccggttcaccaccgatggtgcatgaggcacttcagtgctaatttccacaaggccggtgcggacaagcatcagacaaaagtgctcctaaggatatgtcagattgacgagaagtggatatttgagagggatgttgaggcactactgcagcgtattcccgaaggtcctcgtaaatggcttgaagatgagttgttggataaagataagtggtctcgtgcatacgatagaaatagctgctggtggggttaaatgacaaccaacatggccgaacagttcaatagcgtgctagttggtgttcgtaagcttccagtgacggccatagtatcatttacattcatgaagtgcaatgattactttgtgaacagacatgatgaagcagtgaagcgagtccagttaggggagcgttggtccaccaaggttactagtaagatgaaggtgcaaaaaagtaaggcgaacaaacacactttaaggtgttttgataagcagaaaaagacatacgaggtcacagagaggggtggtataacgcgtggtggtgttagattcggcgcaagagccttcaaagttgaagatgaggggaactcatgttcttgccaaaggccattgctctaccatatgccttgctcacatcttatccacgtttatctgattcatgcaattgatgaggaatctcccaaccgaatgccgtatcatttctcttcaagagccgttgtgaacacataggcaagtcgctttgagccatacctcgaccccacacagtggccaccgtatgatggtgaagaatttgttgctgacccaaatttgaagattaaacaagagggaaaaggagatcgaagcgattcaagaacgaaatggactcgggtcttggtggttctggaaggaaaccaccatcatgtgttcaacttgatgctgcgccggtgcaaaatagatgctcgttgtgtcaccaggagggtcacaagaaacctaagtgtcctaagcatccaaaaaagaagaagtccaaaaaaaaatagaagtgttagggaggtaaatattttgttttcctacttaagtcaatgcatgttttattcttgtctatttaatgtctatttatttattttggattctcgcattcattttcttttaatatatgtcatattggtaactaacggtgaatttattactttttcatgtaggatggccaaggagggacaaccgccgacttacccagccttggaggcgtactacgaggcccgtcatcgcggggctgcgatcgaggcggggagggtatgaatcagcattgattcacttgtacataagtatcggtagcgtgtgtttgacattatattaactaattgttttacaattgctactgcaggtacttcaaccgctccgagttagagctcatgctcccccagtgttcgacgataggtacatcccatacctaagggcggccgggttgctcggggtggccttggtcgtgagcagaggaatgccagtgttcaacgctcctgtgttgacagcacttgtggacagatggaggcctgagacacacagcttccacctccccagtggtgagatgaccatcactctacaggatgtggctatgatcttggccctcccattacgggggcatgccgtgacgggcagaacaaagaatcctggatggcgtgcacaagtggagcaactgtttggcattccactgaacattgagcagggcaagggggcaagaagaagcagaatggaatacccctgtcttggctgagtcagaacttctcacatcttgacgatgacgctgagccatggcgtgttgagtgttatgcccgtgcatacatcttgcacttgttgggaggggttctgtttcctgatgctgggggtgacattgcttcggcgatatggattcctttggtcgccaactttggtgatctgggccgtttcagttggggctcagcagtgttggcatggacatatagacaactctgtgaggcctattgtcgtcaggcaccatcatccaacatgagtggttatgtgctattgattcagctgtagatgtggttaagactaccggttggaaggcctaagtggaggcaaagcttcacttcttggtcctacaatgagcccgacatggagaagacagtggcctacctttttgagagtactgccactgcacatgctcaccgggatgtggcatacaagcattatgtcaatgagatggactgcttacagcctcaacatgtaagtacttccaatatcacttccagttagacatttacttctttaattgagatactaaccaacgacatctcttcaatttttgcagattgagtggttaccataccacacaaatgaggcttcaagcctgaccctgaactcaatgtgcaatcgagactctgactacttcatgtaccagtgcccattgatttgtttctgggcagttgagtaccaccttccgcaccgtgtcatgcgacagttcgggaagaaacaagactggccggttgaggacatctcaactggagttgaattacacaagtaaatatttcttatctttgtttgctttcattgtcaatgttcaattttgtaccatttaacccttgtcgatgctcactattatttcatcaccttccacttgtctaggtatgacagggtgagaacaaagaaggtgaaagactgggggctagagcataacagatacattgatgaatggaggacagccggaaggaacgacaggtacatcgagactatacaccaaaatcatcttttctcagagtaccttcgttggctgcataggacatatagactgttcctccgccctacttggacggaagccgacatagaggatgaccgcgattccgatgaggggcggaatccctatgatgtccggactagagttggatatcaaatggagcacgccccacttagagacagagtcgtaagttttcttgcatttgtcaaagttatttccatttgcaccctagaccctaacatatatcttctcacgctttccgtcgagagagctcctcaggagtgtgaatgaaatggggcatgccctccaagctccgaggggtggtgagaacacggagaacacactccgcaatgttttagaggtaaaatttatttagcactttgcattacttgagttatgcctaacaaacttcttttttttttgaaatgcagaaagttcgtcaaaggtgccggaaacttgcagcaagattaggttgcaggtcgattggattggacgacgtgtaccaaccgcggagattaccaccaccactacctcaatccacgcgtccaagtaccgctcgacactccatcaggatagaagagcgtgaagaagttggtggctcgtcgtcgtcacgcattccgcaagggagggcaaaggggaaggcgccggctccacctagcgacgacgatgacgacgatgacgaggaggatgaggactacgtcgcaccagacgctgaggagatagacatgtcgtagcttcccgacgcgcctcaggggacgcaacccacgcaatacaacttgcgatccactcgggcagtgaaaaagaggtaaaatgagcttaccattctcaaatgttatttgattttcctcattttgtttttaaaatgttttaaacattggattttcaaatgtaggtacactccgggtttgcaagctattcggcgccaacggaagaagtgatttgtatgaagttaatctatttgttggtagtatgacatatgtggtgcactatgtgatataaaatgtgatggactatgtgaggactatgtgatggactatgtgaggactatgtgatggacttttgacattgtttcatctgtggaatataggatggacttttggcattgtttgatgtgtcgaatatgtgatggacttttggcattgttatttgtgcaattggaacttgttttagtctgtatgaaactgtgaattgtgatttgaattgcgaactgtgaattggtacatttgtgcaatatggatcttcaatttgcagggaggcagagggcggcgccaatcaccctggcgccacggttggggagggcagcgccagccactgccacgaggcagaagggtttcggggtggggggagggcggcgccagctacactggcgccgtggtccatgagggcggcgccagccgaggcccggaggcagtagggtttcggtggggaggagggcggcgccagccaccctggcgccgtggtccatgagggcggtgccagccgcggccaggaggcagaagggtttcgggcgtggggaggagggcggcgccagccaccctggcgccgcggtcttgggggggcgccagcctttgcccggaggcagaacag

SEQ ID NO: 5653 - DNA, 13150 bp, Oryza sativa
  unsure (1)..(13150): unsure at all n locations
taatatgcaagatagttaaaaaataaatgaaaatatggtgatacctgcaacgtgaccactggcgcaagcgtcagcaaccgcctgggtatccatgattgctccacgagcattgttcacaatggtcacacctttcttcatctttgcaatcctctctttgttaaacatacctctgaacaaaaaagcatacaaattcagataagacaatgtgctagcacagaaattttggaacaataaacaagaacgcaatgaaggacgataaaccttgttttctccgtaagaggcatgttgatcacaacgacatcacactttggaagcatggcatcgagatcctcctcatacttggccccaatctccttctcaagctccgggtcaatcttcaccctgtcatggtacatcaggttgcagttgaagggcttgagacgctgaagcaggagcctgccgatgcgaccagcaccaacagtgcccacagttttgccctcaagatcataggttctgtgggcaatgcccgcgacattccattcgccattaacgatctgatgggtgataataaaaaacctaacattttagtctgcgaaattcaaggactgagtttaaaataggataaactgaatttctatttctatttaaactaaaaatatacgagggctagatagggttgtaaaaggactagtgaagcttaacacattacctgatggtgaccaggcaagaagttcctgagaagaagcaggatgcgcatgagctggtcttcagccacggagacggtgttgctgccggtgatctccgccacggttagacctgctgccgcggctgctgggagatcgatgtggtctgacccgaccccggccgtgagaagaagctccaggttcttggccttcttgatcctctctgcggtgatgtaggctgggtggaatggggtggtgatcaggacgtgggcatcctcgatgtgcttctccagctctgggaattgatgtacaacagaagcgtcagttgtgtgcgcaattcagacttaagacctatatatttagtcagagaaattttatgatccttcagatacctcaaggtatttagtatctggagatgtactcagacgtactaaattttactgtaaaaaatgtgatgcctattgatatgttgttaaggatagaaaaattacccattatgttgttatagggtttattttttcaacgaacagataagacatcagacaaaaaaggaaaaaaatataatgcatgtttgaaacatttgcgcaaaaaactggtcatacaggaatttgaattaactgaacatcaggccagcatgaaaaacataagataaaattaattccagccggctgccaaccaaaatacacgtctacatgctgatagatgctacggaatgctcaaaaaaagtttatcgaaattgttcgtagaaactacctcttgatcacagctaatactccttcagttcaacaacataagctttgactaagaattactcttaatttcatgacataaatttgatcttatttgatttgtattcaaaagtagtctttaagtattatgtgaaggctttattgtactgaaacaaaatacatacttcttaatttttagacggagggagagtactactaaccgcagtttatcccctccttgtcatcggtgacaatgtagcgatgccccttagattcaagccagccgcgaatgccgagagcggagtcgacgcagccgacgaagttgggattcttgtcggcatactcgccacccttgtagaacacacccacgaccttcttgctgcctgctgatgtctgcggtacaaagagggaaaccaaaaggtgtcattcgtcatatcgagctgcatagaacaaatttgttgatcaagtggatttgttatatttaggggtgtaagtgggtcagttgtgaacaacttataggttaaaataagcgggttgatggcttgttttagcctataagtggatttcgcgggttagccacttacactcctagttatattggttatgattatttgtccatcaccattcctgagaaaaaaaaaggaaacatttctcgggaaataaagaaaacccgacaggcaggggtataaacgtgacaggtattttcagcccgtctgctgaccagatgtttatggcaaggatacggtaaagaaaaatgattacctggtatgatccgtgtccaaatccaaattcgaaatatatgaaataggatatgggaaaatttgtattagccgaaatgttttgtattatcaaacatacaacaaaaattatgagtttatgatttcacttgtgaacatggataaaagatttgttaatcaccatttgatgagcttacaaattaacaatattgtgtattttttctgatatgtcattaaatagtttttaacactctacttgcattgtttggtcatatatgttatatgtagtgcagatacaaatgtgactgtctgggcctacccaaaaatatggaatgaaatagtgtgttcccatcgtgtgcaaggtaattactattttataaggttggtgctgtgtgacgaattaaatgtgtctaccaaagaggagcaatagttaaaagccgattacattgggatgaaaacggtcagaaacaatattatttatacagaaccgattctcgatcggtcaaaaattctcatatttatcaatttatcaatttagtggcgattgcaatatgaagtgaaaagaaattaaaaatatatataaatgttatatatagctaaaaacagaaacaatcaaaaagtgtaccagaaacagattttcgttgccattttctttttgattacagaacatttggctatgttcgattgtatatttttcaacttctatatatactttccctttttcacgcgcatccttcctgaatagtgagaaacgagaggactggagcatagactggtcattgaatttttaggtgattccccgtgcgttgctacggaaatttctggataatggctttttgatttttttggtggggctctaaatgtgaagtttgttagtataaatcatgttgtacagttgtttatgtggagtagaatattaattacttctattggaatatgacaacacgtgaaaggttactgcttatttctcaacgcgcttagtacatgtgaatagcaaagtaaatgagtaatcaaacatgaaatgaacttctaaacatccaaatgaaattcaacggatgataaattgacaatgacaagagtcaatgtggtggcttctttaccagagtaactaggtgaaacccccgcgcattgctgcgggaatttagtatgataacaataaaaaaataacgtgtaagatagctagataatatcagattaagtaaattaatgtagtttatgataatataaatttaaatagtatgtagaatgatgattcaaacgtaaaaagtaaggtggtacgactttatgaaagaagaaaagtagggatatagtttagaccgtagattaatcatctaaaagctaaaaacaattgatgtgatatgacttaattagaggaaagaaggagaaagataatttggaccatagaatattataaaacataataaagatatgtattgaaacattatatgaattatgttggatgataatttaacatgtttgtatttgaaaagctcctaaattataaaaactataaagatatagcatgtttgcatgatgtttaaatgtgatgattgttagtggataatgatgtggcattttgttaattagtggatgatgatgtggcatctttgcatgttaagcttaaggagttagtgggggataactttatagtaagataggattatattaagtgggttgcaactatatatatatatatatatatatatatatatatatatatatatatatatatatatatatatatatatatagaggtttgaacctagaggttcggatctcatctcatccgttatggaaaacgagatagttcattagtacataattattaacttattagtacatgattaattaagtattagtaaaaaacataaaagttaatataacttttttatagaaaatatttttaaaaacatattgttcaaccgtttagaaagcccgcgcttgagaaacgatgggccagggtttacgattccgacaggcccttccgtttcgggcactggcggaattcggaatttcgcgaaatccggtggaaaactagtaaatttcgaacaaatttcataaaccaaaatttgaataaaaattccctaagtttgccgacaagttcttgaaaaccggtcggttttggcgaaatttcgatcactaatccggtccatctaagtgttttcctttttttaattctttattcttttctttcctgatgtaagtttcagtaaatacacacaatacatcatttttttggaaaaattatatcccaataggttctatgaatatcatagtatttataagattttatttgattttttttctttttttatcaattcaaatttaaatttggatgaaacttctcgaaatctcatacggtttctactttcgagcctcgtcgaaatatcgaattttcgcgaaatccgaccaaatgtcgtcggaatcgtaaaccctgcaatggctataagctgagataggaagcgcggaacatagctaggaaagagaaggatacgtacctgcgcagccgtagatgcaagcgcgcggccgagcagctgccccgccgccgacggtgccctccacatcgccatggaggaaaggatatgaaattgagctcagcaacggcgagcaagcgagagagtggcacaagaggcagtgagtgtgatggaatatcgatcagtattcagtgcaggcaagcagccgactcgatcgatgcgatggaagtggaagcctggattggaagggatggatatttgtagctccgcctccgccacctcgcgccgcccgcgtggtggcccctcggctgctgcgaccgtgcagtcagcgtagtgcatacccccagggccttgcctttgtcaggtaaaacctgagcataggtggattcatggaaaggcaaatactcgcgtgaaaggtgcgttctaatctatattttctcaacttctttctcgttgtctacatacacgttttttccaaattattaaacacgttttttccaaattattaaacagtataattcctctattccaaattagacgtcgttttgactttttttaacgcttaatcattcgttttatttaaaatatttgtgcaaatataaaaagagacaagttatacttaaaatacttttaataataaaataagtcacaaacaaaataaataataattccttaatattttgaataagataaatagtcaaatattaaataaaacttaaaacgacaagtattttgggatagagttaattttttaaaaaaaactattaaaaggtatctttgaaattttatattaatctatttttctaaagctttttaagctaatgattaataataagccactctattttacttgcttctttagagaaaaggttcataacacctactgccacagaccgacatccgtgacatgtactcaacaggccagggcccagggccagtgaaccaccgagtccaaggtaaaagccatgaggcgctggccgcctgtaataattgttctgttccatacgtctctcgcggtcgttccaatcgaatggctcttgtttcacaggaggaaagctaagaattgatttttgattcctagctaggaggaaagctacgagacacatgcaggcaaaacctaaaaacgcagatgccacgaggtgttagccgccctctagctagtatggttgtttcaatctgtttgctgtaactaagggcagggcccgtttagttcccaaaaattttttctaaaaacatcatgtcggtgacatggggccgggggtatcgtgactagaggcttggatagccgcggtcacccacgtggcctgaccccctcggggggggggggggggtcgggcccgagggtgacacggccacccctccctccgtctccccgaggggtcgggccgcccctgtttcggccccgagggctggggcgccccgaccccctgtggttttggcgccacttgtgtgggttaggtgagcacagcggggctcacctaaccgcatttatagcaggttggacgagcgcgccacgccgcatttaatgcggcgcagcgcacgcttatccggtccgtgaccagtcgcggtgtgtgagaccagtcagatcgcgggttaggtggcaacaggcggcctgtcacacgcctcgccccgtcccgtcggaatgatgagagcttcctggctctcgtccctagccggagccggcgtggtaactcctggagttggcatgtcagtcccggtcagatccattccaggcttcatcgcaaccatggcaaggaagtcattgtatgaagaagggcagacgtgtggcatgctaaactgacgcgtggtggacaagaatgaccggtttgtgactggtctaacaccggtcacgtcatcggcagacaaccgtgctcccacgttgcatctgcttccggcggagtggaggcgagtgacggcgctgggcctcactcaaggacaagctgtgatttagcttccaggcgaaggcgcgagccaagttttggtcaagatagggtgggtccccacccaaaagaagagtaggtagaagtggtgcatgtggtatccccttgagatataaaaggaggaccttgcccacgggaactctgagagagggggactctcagacgactctgggaatacctgagctcgtagaggagagaaaggggaagaggggttctagagcctgaactctcttgctctccggctctctgtaactccttcacacacagatccaccagaacacaggagtagggtattacgcttctcagcggcccgaacctgtctacatcgcccgtgtcttgtgcatttgctctctcgcgaacattccacagatcgagggtgaagaacctcacttagcgcccccggccgaaccggcaaaggggggcctgcgcggtctcccggtgaggagccccacgctccgtcatctggcgcgccaggtagggggcgcgtgtgtctttctaagccctcgtcctctttcgtgtgcgccaagcttctcccgctcagcccaatggccgaacgggcagtggcgcacaacctctctccgagcgctagcggtgacgacggggagcagaacccgcgccgtcgagctcgtactccaccgtccccctctcgccgaagtcttgggcgggaggaggcgctcgagagggtcgaaagatccgcgacttcgccgcctgcgggcgatggagaaggacggcgagacggggagcgtcgcctcctcgtctacggcgatggcagcacgccccagagcgcgctccaggctgcgggcgcactcctgcgtcacccgcccgtcgtccccgatccagagactccagcccgacgttggctggatgacatggccgacttggtcatgacggcgccgcagcgcctaggcgccggcgggcggtcctccgccaccaaggcctctggcgctgctaccgtcggctccgtgtcgtcgaggcggagggcgcggcgagcggcggccgttacccgccgttcgtccgccattccctcgtcaacgcctccgacccaagaagatgtgcgtggggggccagatgcccgcctcaatatcgagcgccggcgcaatggtcgtcatgctgcccacgcaacggagggcgcttcctcgtccggagcgccacttcggtccgggcacgggggccagccccccgtgtccccggttggtggtgccggctgtcgagcctttgtggcgagccttcggaacgtccgttggcccccaaggttccggcccaccatcaccgaaaaatacgacggaagcgtcaaccccgccgagtttctccagatctacacgaccgggatcgaggccgccgggggtgacgacagggtcatggcgaatttcttccctatggccctgaaaggtcaggcgcggggttggctaatgaacttgccacccgcgtcggttcactcttgggaggatttgtgccagcagttcaccatgaacttccagggcacatatccgcgcccaggtgaagaagcggacttgcatgcggtacagcgaagggacgatgagtctcttcgctcgtacattcagcggttttgtcaagtccgcaacaccataccatgcatccccgcacacgcggtgatctacgcattcagggggggcgtgcggcacaaccgcatgctcgagaagatcgcctccaaggagccccagaccaccgcggagcttttccagctcgcggactgtgtggctcgcaaggaggaggcctggacctggaactcctccggttccgatgtggcagctccggccgcccccgggtccgccgctcggtcagggcggcgggacaggaggaggaagaagaggtcggcccattccgacgacgagggtcacgtcctcgccgtcgagggcgcttcgcgggccacccgaaaggggaggcctgcgagcgacaaaaagaaggaggtcggcgctcccagcagtgagcgcccgaccggcaagtggtgttccgtgcacaacacctccctccacgacctcgcggactgccgcgcggtcaaaagtttggctgagcggacgaggaagtgggaggaggagaggaggcaggagcgctgtgagggcaaggccccggcggctcccacaggcaaccgtcgaggtgaggccaagcagaaggccaccgccgaggacgtcgacgatggcgacgatgacctggggttccaggagcctgaggccaccgtcgccaccgtcgatgggggagcgtgcgctcacgcttctcgccggagcctcaaggccatgaagcgagagcttctggccacggcccctacccatgaggcgacgcggcgggcgcggtggtcggaggttgccctcaccttcgaccagaccgaccacccgccgtgcgttgcccggggaggacagatcgcgatggtggtttcccccaccgtttgcaatgtgaagttggggcgtgtccttatagacgggggtgcagccctcaacatcctttcccccgcagcctttgacgctatcaaggccccggggatggtgctccggccgtcccagccgatcatcggtgtgacgccggggcacacttggccgctaggtcatatcgaccttccggtcaccttcggtggttctgccaacttccgcatggagcgggtgaactttgatgtggcggacctcagtctgccctacaacgcggtcctggggaggcccgcgttggtgaagttcatggcggcggtccactacgcctatctccagatgaagatgccgggccccggtggccccatcaccgtccatggcgacctcaaagtcacgcttgcttgtatggagcagcgcgcggaccacctcgccgcggcgtccaagcccgcgggtggcgacgagaggctcagcacctccgtcccagccgccccgaagcagcggatgatcacgtgcgacgaggtcccggtcaaggaggttgccctgggcgacggcccgtccaagaccacacgaatcggtggtcttctggacgacaaataggaagacgcgctcgtctccttcctgcgggcaaacgccgacgtcttcgactggagaccggcggacatgcccggggtcctcagggaggtgattgagcaccgtctcgccgtgcggccgggcgcaaggccggtccggcagaaagtgcggcggcaggccccgaaacgtcaagccttcatctgcgaggaggtggcgcgacttctggaggccggattcattcgtgaggtcatccatccggagtggctggcgaacccggtcgtcgttcccaaggcgaacggcaagcttcggatgtgcatcgactacaccgaccttaacaaggcatgtcctaaggacccttaccccctgccacgcatagatcagattgtcgactccaccgcagggtgcgaccttttgtgttttctagatgcatactctggttatcatcagattcgcatggctagggaggatgaggaaaaaactgcattcattacccccataggaacttattgttatacgacaatgcctttcgggttaaagaatgcaggtcctacttttcaacgtactactcgaatttctttgggtagccaaataggacgtaatgttgaggcctatgttgatgacttggttgtgaaaacgcgcaaccaagagaccttactctcggatctagcggaaactttcgaaagtctccgctccgcccgcataaagctgaaccccgacaagtgcgtgttcggcgtgcctgcgggcaagcttctcgggttcttggtctctgcccgaggcatcgaggccaaccccgagaagatacgagctatagagcggatgcgcccccccaacaagcttagggatgtgcaatgcgtcaccggctgcatggccgccctaagtcggttcatatcgaggctgggagagaaggcgctacccctatttaagctcctcaaacgctccgggccgtttacctggacggaggaggctgagcgggtcctcactcagttgaaggcgtacctcagttctccccctgtcctggtcgccccggagccagatgagccgttgctactctacctggcggcaaccccgcaggtggtcagcgcggcgttggtcgtggagcgcgacgaggacaaccctcactccacgcatccccaccctgtgtcgactcgacccgagaaagagcagggaggagaggcccccgagccgaacggtggcctaaggcccccgacggccggagctggccctccgcctgcttgtccgacggtgccaggcgcccccgacccccaggacggcctcggggccactgcgcgagggccgcgcctgtcgccctttgaccccgaggtcgtcggcacagaagccgagtgctacccgcgtgccctctcggacgaagagcgccctggagatacggcccctagcgaagaggatcggccccgccgaaaggtgcagcggctcgtctacttcgttagcgaggccctccgggacgccaagacccgatacccttaggcccaaaagatgctttacgctattctgatggcttcgaggaagttgcgccactatttccaggcgcatcgggtcacggtggttacgtcttaccccctcggccaaatcttgcataaccgagagggtactggacgggtggtgaaatgggcaatcgaactctctgaattcgatctgcgctttgaaccacgccacgcgatcaagagccaggccctcgccgactttgtggcggagtggaccccagctcccgagcccgtctccgcccccgaggccacctcgggcccctcgcagctgcctcacaccgcctactgggtgatgcagttcgacggctccttgtctcttcagggcgccggtgcgggggtcacgttgacctcaccgagcggagacgtcctcagatacctggtccgcctcgactttcgggcgaccaacaatatggcggagtacgagggactccttgcgggactcagggtggcagctggactggggatccgccgcctcctggtgttaggcgactcccagctggtcgttaaccagatctgtaaggagtaccggtgctctgacccgcagatggacgcttacgtgcgccaggtgcggcgtatggagcgccatttcgatgggatagagcttcggcacgtgcccagacgggataacgcggtcaccgacgaactctcaaggctcgcttcctcgcgagcccagaccccaccgggcgcctttgaagaaaggcttgcccagccgtcggcgtgacccgaccccctaggggagacggacgcgcctgaacggcccccgaggcccgtcggagtccaggcctcgggacccgaggggagcgctcccagctcccttagattgattgcttggatcgctgagatccaggcgtacctcgcagataagactctacccgaggaccgcgaagagagtgaacgcgtccagcgcatctccaagcgctacgtgctagtggaagggaccctctatcggcgcgcggctaacggagtcctcctgaagtgcattcctcgggaacaaggcgtcgagcttctcgccgatatccatgaaggcgagtgcggagcccactccgcctcacgcaccttggttggcaaggcctttcgccagggtttctattggccgacggctctcaacgatgcggtcgacctggtccggtggtgcagggcgtgccagttccacgccaggcaaacccatcagccggcccaggccctgcagaccatacctctttcgtggccatttgctgtctgggggctcgatatcctgggtccgtttaggcgggccccgggcgggttcgagtatctgtatgtcgctgtcgacaagttcactaagtggcccgaggcttatccggtcatcaagatcgataagcactccgcgcttaaattcatcaggggcatcactgctcggtttggggtgcctaaccgtatcattacggataacggcacccagttcactagtgagctcttcggtgactactgcgaagacatgggcatcaagctctgcttcgcctcccccgcccacctcagaagcaatgaccaagtggagcgcgccaacgcggaaatcctcaagggcctcaaaaccaagaccttcaatatcctcaagaagcacggtgactcgtggattgaggagctgccagcggtgctctgggcgaaccgaaccacgccaagccgagcaaccggggagacgcctttcttcctcgtctacggcgcggaggcggtcctcccatctgagctcaccctgaggtcccatcgggccaccatgtgttgcgaggctgatcaagatcagcttcgcagagacgacctcgactacttggaagagcgaaggcggcgcgcggcctccgagccgcgcgctaccagcagagcctgcggcgctaccatcagcgccacatccgggcccgatcactctgcgtcgacgacctcgtcctacgccgcgtncaaacgcgtgctgaactgagcaagctctcaccaatgtgggagggtccgtatcgagtgatcggcgtnccccggccgggcttcgttcggctggccacgggcgacggcacagagcttgctaacccgggggacatcgaacaccttcgtcgcttctacccctagtaggggtcgggtgtcaggtttgggcttgggccaccccgcaccccccgggcatgcagggttggcccggggctaccacatgcatatacttatcttttttctct

SEQ ID NO: 5654 - DNA, 5055 bp, Oryza sativa
ctcaaaaccagaccttcaatatcctcaagaagcacggtgactcgtggattgaggagctgccagcggtgctctgggcgaaccgaaccacgccaagccgagcaaccggggagacgcctttcttcctcgtctacggcgcggaggcggtcctcccatctgagctcaccctgaggtcccatcgggccaccatgtgttgcgaggctgatcaagatcagcttcgcagagacgacctcgactacttggaagagcgaaggcggcgcgcggccctccgagccgcgcgctaccagcagagcctgcggcgctaccatcagcgccacatccgggcccgatcactctgcgtcgacgacctcgtcctacgccgcgtccaaacgcgtgctgaactgagcaagctctcaccaatgtgggagggtccgtatcgagtgatcggcgtcccccggccgggctccgttcggctggccacgggcgacggcacagagctgcctaacccgtggaacatcgaacaccttcgtcgcttctacccctagtaggggtcgggtgtcaggtctcgggctcgggccaaccccgcacccccccgggcatgcagggttggccgggggctaccacatgcatatacttatcttttttctcttccgtatttcaataaaagcattttcgatttcctaaggactgtgtctgtgccattgtttccttttaaagaatcttggcttgaattagcacgctcgtgctcgatcctgccctcggtggcccaggccggctaaaatcgccaaaaggggcccagaaccgagccatgccccggggcgtggtgaactccgggggggaatcggcaaaggcccacaatcgggtcatccataaccctcggtcaccacgctcccggcctggccagtctcgacacgtggatctccccaggcactagccccgacccgcgccgtttgaggctgggacctgggcacgagcccttgttcaagccaagacacagaaggaccgcggcacagaccatcctcgtctcatacacacaacaaatagaattgacacagaaatttcctctttatttgattgcagattaaattagtctatacaagaagggggcccgaaggcctcggaagaagaaagaaaaagctatttaagattggcgggggcctgggggctcactccgacgcgcccgggtcaccagcctcgtcgtcgctgtcgtccgcaccaccgtcaccgccctcctcgtcggagtcgagggcgaacgcgagccgaggggccgtaccttcgaagctgtggacgatgtggtcggcggcgtcccggacctgcgcgcgtgcgccatcctcggttccgggagggaactcttccagcgctgcccacggggagaagtcagggtccctggcctggtagcttgccagtacgagctccaccgccccccgggcgaggtccctcgaggatgacttgatcgtctcctcgagctcctcggggagccgccggagggccccggccatctctgagaggcgctgggcgagacccccctggttggcggcgtacttcgcgcaccgcccgccctagaggcccgcctgccgcccgacgcggtctagatgggagacggcgtcccgaagcatgccgggccctacctcgctcgccaagcggagggcctcgacctccccggcggacgagtccagcgcgccctgcagcttggcgatggtgtgttcggcagctgcgaggcgggcggctgggtcgccatggcccgcggccgccccgccgctgtgcgctctcgcatccagctccttcgcccgcgcctcgagctcagcggcccgctgatccagtacggccccctcggcgcgggcgccttccagatcgcggcgcgcttgctcctcccgcgctgcctcgcggagggacaggctatccgccagccgctgcgccgcggcctcggcctccttgagagctcgccaccgctcggtgagcacgtcctcgcggaagcggagtgcggactccttttcggcgcaggcgacctcgtgcgacgccagtgttgcctcccgggtggcgacgacggcctcgcggtccgctagccctctctccctcgcgtccagggcgcgggcgctctcctccagcgccgtggcgcgagcctcaagggcctctttgcgctgcctggacgccgccttgttctccgccgcccgctgttcccgggcagcggcggcgtcaagtactccccgggcggcgtcgagcttcttctctagctccaccgcccggctcccgtattggaggcggaggtcgtcccgcgcctcgttgagcacggcggtggcgatgaggacagtctcccgctcctcctccacctccctggcgatctccgccaggtccctacgacgggcctcgagctctgaggcgtgccggcggtgtgccttgcggcccgcctccaccatggcctccaccgagcgccgcccctcttcgacgcgcgcccacgccgcgtcgagttccgcccgctctgcctgtaggacctccatctgggcacttaacccgtccaacaccgtggtgttcgtggcggccaaggcctgcaggaggggctccgcgctcggtggggcagcggaaggcagaggggagagccgcctcggtgtgggtgccgcgcggctcggcccgctgatcgacgtgccggactcgggggcgtcccccggagctggctcgtcccaagcgtcgcccgaggggtcgggcccgagcggcgcgcccgcggcctcgtcgtgggtggcctcggaagtcgtcgtcacctcgggcggagtcgggtcgggggcttgacaggccgcctggcgtgcgcgccgcctctgcctcccggacggactccccggcccggcggagtctggcctcctcccgagcggcctcctcagcctggcaaacccggacggcctcctgggcagcctcctcggcttcccggaggcggtccgtggcttctcgccggtcagcttcccgcctccgggcctccgcggtcaccgtctcctcggcctcagaccggccggacttggaatggcggggggggcgcgacgggatctcgctgaggcagaagaaaaatcagaagacaaaaagaaacgggtgagtgaaaactcgccttgggagatgggagaatgaatacggccgcggtgggcgcggggacgaacctacggggaggtcggctaaacgaccacctcgggggcgagatgaggttcccccggcatgactcggtcccccccatcttgcggagccgtttcttctttcgctctccctcgggctgcggcgtcggcacggcaccctccgggcgcctgctgctggcacgcaccgccccgccccctcggggaggagatgggggaggggtaccctcctgtttcctcttcccccgggcgtcggcagggcggctgccccccgggcccgattgttcccccctgcggctcccggccgcgccatcgtggcctcggggggcccgctcccccgacgccccgacctcctgcatgatggtcaggatgttagcgcgctctggatcgcagcagagggggaggaccccttgggggatgagggatgcctccacggagctgagattcagcacccgttggaccaccatcctgaaatcctcagggtaccagtcccatgtgcgcccctggtgggcctcatggagtcctcgggcccggtgtactcccaggcgccccgggcgcgccgctggagcggcgcgatccggcgacgaaggtagtcgccgaacaccatggcccccgtgagcccctgggatcgcagacccgccaggcggtcaagaacggcgtcgtagccgtctcccagatctaccgccgcccgccagctggaggcatgcgccggaggctggctcggaagtcggaggcgcgcttcgtcggcgaggggggtgtagaaccaatcgctcttccagtcgtcccacttcttgcggaggacgcagggaatgtagcggttcagcacctgcccccgcggctggaagtagcagccaccaactaccgtcggcggcgacaccggctgtacagtggagaaccaccggaacagccggagagatgggcgcaccccgataaacatctcgcacaggtgcgcgaagatggccaacgtcattatcgcgttgggggtgaggtgcgccatctggagatcataaaactccagaatatccatgaaaaaattagagaatggcgggaccagccccgccattgcgaaagagaggaagaagacggaccgccccgggtagtctggcgtcgggcgtccctcgcccagcgcgaccaccttccggccggtggcagattccggcatgaatcggcgcggcagcccggcctacctctcgctcacgatgcgggaaggcggcagcacgctaccatcgagcggtgcggagccccgtgccatgacgccggtggaggaggagcttgagagcgagcgagtgcggcaagggtagggcataggaaacgaagagttagagcgcaagtggcgaaggcaaggggaagagtggcgagaggaaggaaacgaatcccttcctcggcgtctttatttccttgccaacgctatgcccggctcctcgcttcccgcgcccactacctcgccctctcgtttctcgcgcccacgcctccactaaccccattcgtccgtttgcggcgcacacggcagatgtgcggccgtggcggttgagatggggcagatcgtgcgcgcattaactacgctcgccaaccgagaaaaacgccatcatcacgtctccaggcgaaacgaaccggctcgccccgattcgcgcgctgctcgagtaatgtagcggtcttgaagaggccgctcattattgtcggtcggttttcccttgccgatgcgcgcgatttgcgaccgctgggtttctgcccgcctgtagagaccggccccacctgtcaccgggcctaaggagtggcgtcacgcccgagcgcttccctcgaggggggcgatcgccctggcataacgccgggggctactgtcggtgacatggggccgggggtatcgtgactagaggcttggatagccgcggtcacccacgtggcctgaccccctcgggggggggtcgggcccgagggtgacacggccacccctccctccgtctccccgaggggt

SEQ ID NO: 5655 - DNA, 73777 bp, Oryza sativa
cgacaataccatagtcgagttggtccgactagatcacccggaacttggctcctgtaggctccgacttcgtaggctgtgatcgttgtgttggcggtgagattcgatgccttaggtcctcccggggggtctgtcggtgacatgggaccgggagtatcatgactagaggcttgaggcagacacaatcgcccacgtggcctggcaccctcgggggacgtcgggcccgagggtgatgtgtggcccacctcttggtctccccgagggggggggtcggaccactcctgcctcgcccccgagggccgaggcgccccgacccctcgcgtttctactccacgtgtatgagttaggtgagcacagcggggctcacctaaccgcatttattgcgcctcggctaagcgtgtcacgccacacgaagtgcagtgcagtgcactcgattatccggtctgtgaccagtcacagaccggtcaaatcgcgggttaggtggcgacaggcggtctgacgcacacttcgctccatcccgtcaagacgagagcttctaggcactcgtccccggctggagctagcgtgttacatcccagagatgacacgttaaccccgatcgatatatgccaggcttcatcccaaccattacaagcaagatgttatttgaagaagggcaaacatgcacgttgctaaaccgacgcgtggtggacaagaatgaccgatttgtgaccggtctgtcactgctcatgtcgtcagcacacagccaccttcccacgacgtgctcgcctcaggcagaagtggaggtaggtgtgtgctgtcccgtcaggaggatgttcggaggacgaccgtgcaaatctccgtccatttatggagagaagaaaagtccagtttggaaagggaggggtgcatgtggtatccccttaaaatataaaaggaggaccttgcccagaaaaaagggggggatggctgccagattcagaacctagaacaagggagaggttggctcacactttgtagctccttgatacatagatccaccaaaacacaggagtagggtgttacgcttctcagcggcccgaacctgtatacatcgttcgtgtttcgtgctctttcgatagctggcaatctttccacatacagagagagcttgggatcatcaccctgagcccccggccgaaccggcaaaggggggcccgtgcggtctcccggtgaggagccccgcgctccgtcatctggcgcgccaggtagggggctcagcgtgtgttttctgagctctcgtatttttccgtgtgcgtcaagtttttcttgatcagcctcatggctgagcaagcaaaggcgcccgacctctctcccagtgtgagtggcgacgacggggagccgaacccacgccgtcgagctcgtactccaccgccccctccacgccaaagtcctaagcagggggaggtgctcgaaagggtcgaaagatccgcggcttcaccgatcgcgggcgatggaggagaacggcgagatggggaccgtcgcctcctcgtctacggcgacggcagcacgccccagggcgcgctccaagctgcgggcgcgctcttacgccatccgcctgtcgtccctgacccggagtctccagcccaacgatggctggacgatgtggccaaattggtcatgacggcgcggcagcgcctagatgctggtgggcggtcctccgccaccaaggcctctggtgctgctaccaccggctccgcgtcgtcaagacagagggcacgacgagcggcagccgctgttcgccgttcggctgccactccttcgtcgactccttcgacccgggaagatctgcgtggggagcaggacgcccgcgccagcatcaagcgccggcgcaatgaccgaagtgctgcccacgcaacggagggcgcttcctcgtccagagtgtcacctcgacatggacgtgggaatcagccctccgtgcccccggttggtggtgtcggctgtagagcctttgtggcgagtcttcggaatgtccgttggcccccaaggttccggcccaccatcgccgaaaaatatgatggcagcgtcaaccccgccgagtttctccaggtctacacgaccgggattgaggccgccgggggtgacgacagggtcatggcgaatttctttcccatggccctgaaggggcaagcgcggggttggctaatgaacctgccccccgcgtcggtccactcctgggaggatttgtgccaacagttcaccatgaacttccagggcacatatccgcgcaccggtgaggaagcggacttgcacgctgtacagcgaagggacgacgagtcacttcgatcgtacattcagcggttctgtcaagtccgcaataccataccatgcatccctgcacacgcggtaatctacgcgttcagggggggcgtgcggcacaaccgcatgctcgaaaagatcgcctccaaagagccccagactaccgcagagctttttcagctcgcggaccgagtggctcgcaaggaggaggcctggacttggaacccctccggttccggtgtggcagcttcggccgcccccggatccgccgctcaggcagggcggcgtgacaggaggaggaagaagaggtcagtccgttccgacgacgagggtcatgtcctcgccgtcgagggcgcttcgcgggccacccgaaaggggaggcctgcgagcgacaaaaagaaggaggccagcgttcccagcagggagcgccctaccggcaagtggtgcgccgtccacaacacctccctccatgaccttgcggactgtcgcgcagtcaaaagcttggcagagcggacaaggaagtgggaggaggagaggaggcaggagcgccgggaaggcaagtccccggcggttccttccggccgtcggcgaagtgaggccaagcagaaggcccccgccgaggacatcgatgatggtgatgatgacttaggtttccaagagcctggggccaccattgccactgtcgatggaggagcgtgtgctcacgtttctcgccggagcctcaaggctatgaagcgagagcttctggccgcggcccctactcatgaggcgacgcgccgggcgcggtggtcggaagttgccctcacttttgaccagaccgaccacccgccgtgcgttgcccggggagggcagattgcgatggtggtttctcccaccgtttgcaacgtgaagttggggcgtgtcctcattgatggaggagcagccctcaacgtcctttcccccgcagcctttgatgccatcaaggccccggggatgatgctccggccgtcccagccaatcatcggcgtgacgccggggcacacttagccgctaggtcatatcgacctcccggtcaccttcggtggacccgccaatttccgcacggagcgggtgaacttcgatgtggcggacctcagtctgccctacaacgcggtcctggggaggcccgtgttggtgaagttcatggcggcggtccactacgcctacctccagatgaagatgccgggccccgacggtcccatctctgtccatggcgacctcagagtcgcgctcgcttgtatggagcagcgtgcggaccgcctcgccgtcgtgtccaagcccgagggtggcgacgagaggctgggcacatccgcccccgccgccccgaggcagcggatagccacgtccgatgaggtcccggtcaaggaggttgcactgggcgacggcctgtccaagaccacacggatcggtggtcttttggacggcaaataggaagacgcgctcgtctccttcctgcgggcaaacgctgacgtcttcgcatggagaccggcggatatgcccggggtccccagggaggtgattgagcaccgtctcgccgtacggccgagcgcaaggccggtccggcagaaagtgcggcgccaggccccggaacgtcaagccttcatccgcgaggaggtggcgagacttctggaggccggattcatccgtgaggtcatccatccggagtggctggcgaacccggtggtcgttcccaaggcgaacggcaagcttcggatgtgcatcgactacaccgaccttaacaaggcatgtcctaaggatccttaccccctgcctcgcatagatcagattgtcgactccaccgcggggtgcgaccttttgtgttttctagatgcatactctggttaccatcagattcgcatggctagggaggatgaggaaaaaactgcgttcattacccctgtaggaacctattgttatacttcaatgccttttgggttaaagaatgcaggtcctacttttcaacgcgctactcgaatttctttgggtagccaattaggacgtaatgttgaggcttatgtcgatgacttggttgtaaaaacgcgcaatcaagagactttactctcagatctagcggaaacttttgagaatctccgctccgcccgcataaaactgaaccccgataagtgtgtgtttggtgtacctgtgggcaagcttctcgggttcttgatctctgcccgaggtatcgaggccaaccccgagaagatacgagctataaagcggatgcgccccccagtaaacttagggatgtgcaatgtgtcaccggttgcatggccgccctaagtcggttcatatcgaggctgggagagaaggcgctacccttatttaagctcctcaagcgctctgggccgtttacctggacggaggaagctgaacgtgccctcactcagctgaaggcatacctcagttctcctccggttttagtcgccccggagccaaatgagcccctgctgctctacttagcggcgaccccccaagtagttagtgcagcgttggttgtggagcgcgatgaggacgatcctcattccgcgcaccctcaccctgtgctgacttggcccgggagcgagcagggaggagaggcccccgagccgaacggtggcctaaggcccctgacgaccggagtcagccctctccccgctcgtcagatggtgctgggcgcccccgaccctcaggaaggccccgaggccactgcgggaaggctgcacctatcgccctctgaccccgaggctaactctgtaccgattcgacctgggagcgagcagggagaagaggcccccgagccggacggtggcctaaggcccctgacgaccagagttggccctttgcccgcttgtccgacgacgccaggagcccccgacccccaggacggccccgaggccactgtgggaaggccgcccctgtcatcctccgaccccgaggtcatcggcacagaagacgagtgcgccccgaggggccacttggacgaggagcgccccggggatatggcccttagcgaaggggatcggccccaccgaagggtgcagcggcctgtttactttgttagcgaggccctccgggacgccaagacccgataccctcaggcccagaagatgctttacgctattctgatggcctcgaggaaactgcgccattatttccaggcgcatcgggtcactgtggttacgtcttaccccctcggtcaaatcttgcataatcgagagggtacaggacgggtggtaaaatgggcaatcgagctttctgagttcgatttgcgctttgaaccacgccacgctatcaagagccaggccctcgccgatttcgtggcagagtggaccccagctccagagaccgtttcagtctctgaagccagctcggaccccttgcagctgcctcacgccgtccactgggtgatgcagttcgacggctccctgtctcttcagggcgccggcgcgggggtcacgttgacctctccgaatggtgacgtcctcaaatacttggtccgcctcgactttcgagcgaccaataatatggcagagtacgagggactccttgccggactcagagtggcagctggactggggatccaccgtctcttggtgttaggcgactcccagctagtcgttaaccaagtctgtaaggagtaccggtgctctgacccgcagatggacgcttacgtacgccaagtgcggcgtatggaacgccattttgacgggatagagcttcggcatgtgcccagacgggataacatgattgccgacgaactctcacggctcgcgtcttcgcgagcccagaccccaccgggcgcctttgaagaaaggcttacccagccgtcggcgcgacctgaccccttaggggagacgggtgtgcctgaccggcccccgaggcccgtcggagtccaggcctcgggacccgaagggagcgctccaagctcccttagattgattgcttgcatctccgagatccaagcatacctcacagataagactctacctgaggaccgcgaagggagtgaacgcgtccaacgcatttccaaacgctacgtgctggtagaagggaccctctatcggcgcgcggctaacggaatcctcctgaagtgcattcctcaggaacaaggcgttgagcttcttgccgatatccatgaaggcgagtgcggagcccattccgcctcgcgcaccttggttggcaaggcttttcgtcaaggattctattggccgacagctctcaatgacgcggtcgacctggtccggcgatgcagagcgtgtcagttccacgccaagcaaatccatcagccggcccaggccctgcagatcataccactttcatggccatttgctgtctgggggctcgatatcctgggaccgtttaggcgggccccgggcgggtttgagtacctgtatgtcgcgatcgacaagttcactaagtggcccgaggcttatccggtcatcaagatcgataagcactccgcacttaaattcattaagggcatcacagcccggtttggagtgcctaaccgtatcattacggataacggcacacaattcactagtgaactcttcggcgactactgcgaagacatgggcatcaagctctgcttcgcctcacctgcccaccccagaagcaatggtcaagtggagcgcgccaatgcagaaatcctcaaaggcctcaaaaccaagaccttcaatattctcaagaagcacggcgattcatggatcgaggagttgccagcggtgctctgggcgaaccgaaccacaccaagccgagcaactggggaaacgcctttcttcctcgtctacggcgcagaagcggttctcccatccgagctcaccctgaggtctcctcgggccaccatgtactgcgaggctgatcaagatcagcttcgcagagatgacctcgactacttggaagaacgaaggcggcgtgcggccctccgagccgcacgctaccagcagagcctgcggcgctaccatcagcgccacgtccgggcccaatcactctgcgtcgacgacctcgtcttacgccgcgttcaaacgcgtgctggattgagcaagctctcaccaatgtgggagggtccgtatcgagtgatcggcgtcccccggccgggctccatacggctggccacgggcgacggcacagagttgcctaacccatggaacatcgagcaccttcgtcgcttctacccctgagggggggtcgggtgtcaggtttcgggctcgggccaaccccgcacccccccctcgggtgtgcagggttggccgggggctgccacacatgcacattctcattttctcttatttcagtatttcaataaaagcagtttcaaattcctaagggctgtatctgtgccgttttttcctttttgaagaattttgacttgaaatgaggtcacttgtgctcaaccttgccctcgggggctcggttcggtcagctaaaatcgccaaacggggcccagaaccgagccgtgccccggggcgtggtgaactccgggggggaatcggcaaaaacccacaatcgggtcacccataaccctcggtcaccacgttcccggcctggccagtctcgacatgcggatctccccaggcactagccccgacccgcgcctttcgaggactgggacttgggcacgggcccttaaatcaagctaagacgcaaaaagaggaccacggcacagatcatcctcatctcatccgcatagcaaaataaaattaacacaaagaattttttcatcatttttgattgcagattataagttgatttatacaaaaaacaggcctgaaggccttagaagaaaggaaaagaaagaaattgaagattggcgggggcctgggggctcaatccgatgcgcctgggtcgccggcctcgtcttccacgtcgtctgcaccgctggcatcgccctcctcgtcggagttgggggcgaacgcaagccgaggggccgagccctcgaagctgtggacgatgtggtcggcggcatcccggacttgtgcgcgcgcgctgtcttcagtcccaggtgggaactcgtccagcgccatccacagagagaagttggggtccctggcctgatagctcgccaggacgagctccaccgctccttgggcgaggtccctcgaggatgacttgatggtcttctcgagttcctcggggagctgctggagagccccggccatcttcgagaggcgctgggcaaggcctcccaggttggcggcaggctttattgtctgccctttccagaggcccgcctgccgaccggcgcgatcaagacgggagactgcatcccagagcatgccgggccctatctcgcccgccaaacggagggcctcggcttccccggcggatgagtctagcgcgcgctgcatgtcggcgacggtgtgttcggcatctgcgaggcgggcggctaagtcgctttcgcccgcagccgccccgccgatgcgcgccctcgcgtccagctccttttcccgcgcctcgaggtcggcggcccgctggtccagcgcggccctctcggtgcggacggattccaaattgcggcgcgcctgctccgtcagtgccgcctcacggagggacaggctgtccgccaaccgttgcgcctcggcctcggcctcttcgagagcccgctcccgctcggaaagagcgtcctcgcggaggcggagtgcggactcctcttcggcgcaggcagactcgtgcgccgccagcgttgtctcccgggaggcgacggcggcctcgtggtctgccaggtccttcttcgcgacgcaggcgcgctcttccagcgccatggcgcgcgcctcgagggcctcctcacgccgccggagcgccgcttcggcctccgttgctcgctgctctcgggcggcggcggcatcaaggaccccctgggcggcgtcgagctttttctttagctccgcctcccagttcccgtgttgaaggcggagggtgtcctgcgcctcgttcatcaccgtggtggcgatgagggcagccccccgctcctcctccacctctcgagcgatctccgccagcgccgtcttacgggcctcaagatcagagacgtgccggcggtgtgccttgcggcccgcttccaccatggcctccaccgagtgccgcccttcctcgacacgcgcccatgcggcgtcgagctccgcacgctccgcctgcagggcctccacctgggcatttaacccatccaacaccgcggtgtttgcggcggctaaggcctgcagaaggggctctgcgctcagcggggcgacggaaggcgtggggaagagctgccttgaagaagacgccgcgcggctcggcccgccaatggacgcgccggcctcatcgcgggccacccccggacctgtttggtcctgggcatcgcccgaaggagtgggcccaagcgacgcgcccgcggcatcgtcgcgagccacccccggacctgtttcgtcctgggcatcgcccgaaggggtgggcccaagcgaggcgcccgcggcctcgtcgcgaactgcctcggaagtcgccgtcgcctcagcctggcgaacccaggcggcctcctcccgagcggcttcttcggcttggcgagctcgggcggcctcctcccgagcggtatcctcggcttggcgagcccgggcggcctcctcccgagcggtatcctcagcctggcgagcccgagcggcctcccgggcggcctcttcagcttcccgtaggcggtctgcggcctctcgccggtcagattcccgcctccgtgcctctgcggccgccggatcttcggcctcggactggccggacttgggatggtgggaggaacgcgatgggatatctctgaagcagaaggaaaaaccagaagacaaacaagatgggtaagagaaaacttgcttttgggatagaagaaaagcggttgtaatgagcgtgggacgaacctgcgagggggtcggttaaatgaccactttggaggggaaatcaggtttccccgggatggttctgtctcccccatcttgcgcagccgcttcttcttgcgctccccctcgggctgcgatgttggcgcggccccctccgggcgcctgctgctggcacgcaccgccccgccccctcggggaggagatgggggaggtgttcctcccagcttcctcttcccccgggcgtcggtagggcggttgctccccgagcccccgacgcggggcccagaagcacgaccccctccgggggtagattgatcccccttgcggctcccgcctgcgccgtcgtggcccttaggagcctgctcctctgaggccccgaccgccgccataatggtcaagatggaggcgcggtctggatcgctgcagagggggaggattccgtgggggatgagggacgcctccacggagttgagattcagcacccgttggaccaatatcttgaagtcctcaggagcccaatcccatctgactccctggtgggtccgaatgtagtcttcggacccggtgtactcccaggcgccccgagcgcgccgctggagcggcgcaatccgacgacggaggtagtcgccgtacaccatggcccctgtgagcccctgggatcgcaggcccgcgaggcggtcgaggacggcgtcatagccatcccccaaatctaccggcgcccgccagctggaggcttgcgccgggggctgactcggaagtcggaggcgcgcttcgtcggcgaggggggtgtagaaccagtcgctcttccagtcatcccacttcttgcggaggacgcagggaatgtagcggttcaacaccggcccccgcggcaggaagtagcagccgccaaccaccgacggcggcgacaccgactgcacggtgaagaaccaccggaacagccgaagagatgggcgcaccccaatgaacatctcgcacagatgtgcgaagatggccaatgtcatcactgcgttgggggtaaggtgcgccatctggagatcgtagaactccaggacatccatgaagaaagaagaaaatggcggaaccagcccagccattgcaaaggggagaaagaagacggaccgccccgggtagtctggcgccgggcgtccctcgcccagcatgactatctcacggccggtggcagactccggcatgaagcggcgcggcaacccagcctgcttctcgctcgtgatgcgggaaggcggcagcacgctaccatcaagcagtgcggagccccgtgccatggcgccggacgaagaggagatggagagcgagcgcgtgtggcgaaagaagggtgcagggaagaaggagttagggcgcaagcggcgaaggcaagggaaatgatggcgaaaggaaggaagcaaatcccatcctcagtgcctttatacccttgccaacgctgtgcccggctcctcgtttctcgcgcccattatttcgccccctcgcttctcgcacccacgcttccactaaccccattcgcccgcttgcggcgcgtgaagtggatatgcggttgcggcagtcgagatagatcgtatcgtgcgtgcgttaaatacgctcgccgaccgaagcgacgttaccatatctccaggcgaagcaaatcggctcgcccagatttgtgcgctgctcaggtgatgtggcagtcttaaagagaccgcccattattgacagccaagttaccattaccgatgcgcatggtttgagaccgttgggtttctgcccaaccatggagaccggtcccacctgtcaccaggctttaggagtggcgtcacgcccggccacttcccatgagaagggcgatcgccctggcataacgccgggggctactgtcggtgacatgggaccgggagtatcatgactagaggcttgaggcagacacaatcgcccacgtggcctggcaccctcgggggacgtcgggcccgagggtgatgtgtgcgcccacctcttggtctccccgagggggggggtcggaccactcctgcctcgcccccgagggccgaggcgccccgacccctcgcgtttctactccacgtgtatgagttaggtgagcacagcggggctcacctaaccgcatttattgcgcctcggctaagcgtgtcacgccacacgaagtgcagtgcagtgcactcgattatccggtctgtgaccagtcacagaccggtcaaatcgcgggttaggtggcgacaggcggtctgacgcacacttcgctccatcccgtcaagacgagagcttctaggcactcgtccccggctggagctagcgtgttacatcccagagatgacacgttaacctcgatcgatatatgccaggcttcatcccaaccattacaagcaagatgttgtttgaagaagggcaaacatgcacgttgctaaaccgacgcgtggtggacaagaatgaccgatttgtgaccggtctgtcactgctcatgtcgtcagcacacagccaccttcccacgacgtgctcgcctcaggcagaagtggaggtaggtgtgtgctgtcccgtcaggaggatgttcggaggacgaccgtgcaaatctccgtccatttatggagagaagaaaagtccagtttggaaagggaggggtgcatgtggtatccccttaaaatataaaaggaggaccttgcccagaaaaaagggggggatggctgccagattcagaacctagaacaagggagaggttggctcacactttgtagctccttgatacatagatccaccaaaacacaggagtagggtgttacgcttctcagcggcccgaacctgtatacatcgttcgtgtttcgtgctctttcgatagctagcaatctttccacatacagagagagcttgggatcatcaccctgagcccccggccgaaccggcaaaggggggcccgtgcggtctcccggtgaggagccccgcgctccgtcagggtcccttttataccgcgggtcagttgatctccaagtagaactcggagatatcggaccccacacgatatagtaacgacccagttctgtccgagtaggactccttccatccgtggactccgtttctgttacgtgacggattacaggaaacatctgtatacgcgcaggtataccgtatcggtatacaacatacatccaagggtaaagggtatatcttatccgtaactctgacacatttattactaatatgaagagaaaatgaggaggggaagaaaacaaggaggatgaaggaacactattggtttagttaatgactacaaataaaaagaaaatgatgtaaagtggtctactacaccactctaaagctaaattcttttagggataaatttttgactaaattaacacttatttagggacaaagtgagtactcgataattccttaattatatgccacttgttacctcacttgacttatacatacggatctatgagagggatacaactaaattttttacattttaaatttatccgaatgtaaaacttcaatgaagaaggaaagatcagtaatttaaaaatgcataaaacattgaaaatacataaatacagtaactttaagcctatttctattagaaaatatgttttctctatcattggggaaatagtaaaaacattatatcgattctgttcatccctggaacatggcatataatatctcattatttttagaattattttgaatatttctacaattaatactccctccgtccctaaatatttgatgcctataacttttttaaaaatgtttgaccgttcatcttattaaaaaaatttaagtaattattaatttttttcctatcatttgattcattgttaaatatactactactactcaagtttttttaataatattcacaaaagtttttaaataagacgaacggtcaaacatgtttaaaaaagtcaacggcgtcaaatatttagggacagagggagtattactcaagcataacattacttgaaatgggaaatctatattgaattacaaaccaaacttccttttattactccagttatctatttatatttggtcggacacctcaactttgttgacactgtttctttggcaattatttggttcattatcatagttattatggctagccacaagttttactcatagctaggaccctatatatcaaaggtttgttgtagtgttggctgagttgcggctagcaaaatgcatttttgaaaaatgacagggtagcaaaatgcatttttgaatactagctgcggcaaaacgtaaccttgcccaaggtgtggtttgacaaagtaaccaaacaatatatatgccacggtttgtgatgggtccatgttgtaagattttgctcatttaattaccctttgttcctcgcgtagaaccactagtaacaatccaaatgttgtcatctgaatacgtgataccttccgcatagtaccagctagtatggctttacctccaagaatggaaagttcatttttcgaaaagaagagcgaatggatgtattgtgcacattgtattttattagtgttttaaaatagctgtataaaaatcaaatggaagggttataaaccaaggtaatatgactatgtgttcgcataaaactctctcgtttctaaacttggaaactaaagtggctcaatggagaaactaaaattgaaatactccccctttcagatttaagtcgttttgattcgatcaaagtcaaactatttcaagtttgattaagtttatggaaaaagtggtaatatttttaattcaagataaatatattataaaaatatttcaattgtgttgtaaatattaccatatttatctacaaatttagttaattttgaagtaatttgacattgatcaaagtcaaaacgacttatattctgaaacagagggaatagaaaactatcgtgtcaacaaaattggtttaagcatggtagcttgtaggttgtgctaacaaaattgcaacacgatgtggtgcctacctgcatttatctataagcttgtaagcaaaaagatacaccttttaagatgaaggagattgggcaacaaccattccattacataataatttgtttagatctccaactttgatctcatgatgaatgatatatagtaatataatcatgtagtccgtgaaatctatatactcctataaaaatgtctccggcatgagatggaaggaacaacaaacaatgaaacccacaacacatatgatttatgctactcattaactaaattacttgtagcgtgccattcatggaactaggtaaaataaaacaaaatgttggattgaaccaacaaatcatcatctgcgattatgtagctgttggtttgatttcacattgcacctagggcagtcgaagattgtcttagatactcaaacctttaatctcacaataaataatatatggtaatataatcatatcatctgaaaagtctatacaagaatatctctaacatgggatggaaagaacaactaaacaatgcaacccacgcacatgattttaccccacccatattaatggaactaggtaaaagtggacaaaatccttgttcagatcaacaaatcatcaccctctgttcagttacgtagcggttggttcgatttcacattgcatctagcctaaggtaacgtttggaacagagtactcaccatattattcatacgaattatctactttaaatataggaaggaataaattaaatattttgagacataaacctaataaagaggttaaaacaattgatctaaacaatatagtagaagaaattgtttttcttgagaaatactacctccgtcctattttaagtgcagtggtgagttttcatgtccaatgtttgaccgcctatcttatctaaaatatttatatttttttttaaaaaataatcacacctaaagtactattcatattttattatctaataacaataaaaatactaatcatattttttttcaaataagacggacagttaaattaaacatgaactgtgtaaaatgcagtctttttaggacgaaggtagcacttacttctaaaaacgtggagcaaatggttgtcataatatgatgaataaagtggaaagcttttacaagtacggctagtgcaataattcctttgagaaaaatataattgtagggtcaccaagaacaacaggagctagcacaacacatcgcttggtttagctcagtggcagtgtaggccgccccgccggcgaccatgacgcgagaatcaatcgagatcctggtcgacaccacatgccacatgcagcataagcgaatccatcaccaagaaatattccccaaccaaacccaggggaagaaaaaaataaaataaaaaaacgaagtgagattaacttaactagtcaagttttttaatgacagaatcagcccatccaagtttacattctagttttaacacggatgctttcatgtatgattaattatttttttactgataggatgctttcatttatgattaattattcttttactgatagatgagttttactgatagatgaggcagccatacacctgttgctcataggtgcagagagtgcatgtactgtgtttgtttaaaataaaataaaataaaataaaaagcctctttcctgaaaatgtccggtccagatgccactcggccacagggcagccacagaaaatctcgcggggaagacccccactccaccttctcttcctccctcgacacctctccccacgttacgctgcctcctcctcctcctcgcctccctctcgtgggcgtcgtccccctccgccaccgccgccgcccgccgcagcagccgcagaaggggactccacctcctcccggatctgctcgatcgcccccgattctgtagcttctcctctgctcagatccgcccccttgcttttcatccagctcgtggcacccgagatccgctgccgccgccgccgtctctgcggtcctcctcccccctcgccggtggggaaccccgccgccccgaagcgcgttgcaggtaacgatgctgacgtggcatcggctcgcttggtgctctgcttgctcgctcgcggcgcttcgattccggggtagctcgactttttacggcctgatgccggaaagggcgtggcccttgtagctcaatcgtgatttccagattagagcttagtggctatggcttgcttgcttgctgctaggggacgacgagtgtataaccctgagctttgtgctagctcagcttagtagtattggcagagtgaactaaaggcgttagcgattcttgtcatggatggggcgattagcttgatcggagtgctgagtttagaaagaggagtttggagtatagcccgtcgtctaagtaaatgcctcatgtttccttgagcttgggtttgctgaactgaactgaactgaacggaagatccatttaagctaggacggtgtgatcgatcgttgagttgatgaacttggtctatggctagctggcttaagcgtggccttccaatcagtttgtattctcgtgattttctttttatgttctctatcagggcaagtaggttctgtagtttctctagtgttacagctgttggtttctctttcttaggtgtatacatgatgctgaatatgactaccttttatttgcagcgtgtactactgccggactgccaaagtacgcttgctgctagccatttcggtagcttttgtggtttctacttaactatcgtgtttggcaatacaacaccttggaccaaaggatgcttgaaagatagactggataattaagactggatgccaaagtacgcttgctgctagccatttcggtagcttttgtggtttctacttaactatcgtgtttggcaatacaacaccttggaccaaaggatgcttgaaagatagactggataattaagaactatattggactgtacattcgcctatagacttagtcatgctgctggttgttctctgtcgctgctacaaggtgttcgtgctattgccttctgcttctgtgtgctatggtaattgtaactctgtggttattgcgcatgatgctctttgaatttgagccatggagcatgcaaggagatttccaacagatcccaaagaatataaattatgtgaggaagttggagatggtgttagtgctacggtgtacaaagctctttgtatcccacttaatattgaagttgccattaaagttcttgaccttgagaagtgcagtaatgacctggtgagtgttttgtcctttgttcattttttgtgccaaatttcattttgtatagcattgccttgttgatctatttcccccaacaaaataatttctttttttacaaaagcaattttttacttgtattatatactttcctaattttaagcaatacaaatttcgaatatttatttgttttgtcgattctcagatgctctttgtgaacatgggttcacttttttcttgctaatcgctttctactgtactgtcctattactgctttatattcttgacatgcatgacattctattatgcatgaaacaagaagagaaacattgatgccaacaaaaataaatagatgtagctcatttccaaggatgtctatctcaacagaaggctcagtttgttcttgcagaatatttatgacatattgacatgattcgatcatttgagcagaacataccttgtatttgttaggggccattgtagtactattctaagttgtcactgtaacactttactacatgagagttaaacctttttaattgtaagttagttggatcagtgtttgtttagattctttctttttttaggttgcattattatggactcccctctttataagaagaggttgtgtgtcatttggattaagtaatggaaatgcgttagtttagtcttttcaacctgcacctgacattgcctggtgaaggttgtctgtcattcattaagtaatgaaaatgaattagtttagtcttttcaacctgcacccggcattgcctggttaccctctgtgtggtatttaccctgatgaaccaatattcaacacattttattttaaacatcaaatttttgagtgagtttctactgtcccaagtagaatggaagcacacatatgatacaaatttgtcaaaatatttacaagttaagcataacataatatccatgttttactttattggtgaaatgtggtagtgatttttatcagagcttgcgcatgctttctcattgtacgcaccttatgctgaaagtagattaataataaatccttgaagagtattcatgaagagtcctgttgaaaccaacaagtgttatagagtatggattatggaatacagttattagacagacatggtactgccaaatgaatagaatacgaacaaataattcgaattatactaattttgtgtttatcccaatatatgtttatatttgataattgatgcggttagagtattaaagatatcagatatctgcacacgttgtattgtcatattatgagacttacttgtaatactctcccgttatgatgtagaatccaatgaatgggatgggatagaaattcttatctgttctagagatgcaaggtagacaaagtagctggttttgccatctaattgggccgctagttatcgggctgattcaggatcgctcagtgggtttctgggcttagttggggattaccagtttaatcaagcaattgcatggaattggtcggttaatcaggtgaggtggctgttttggcattcacacaagctaattcctttccaattcgctggtttgtgatgttctcctctgcgactctgcgtacttataagcgtcaaagtaagcagccattctggccgatttttacgacattggttgagactaggcttcctacaatttggtcattctttccagaacaactatttttctaccttcagtgatatggtttgagtgctggatatcaggatatgttattcctgcaaatggcatcgttcaaataacttatcttaaaaaagtttgacttgtgatctttaagtgaactaacttttgtaacaatctaaacttccttacttgggacatggcttttcgtgttaagataaaaaaaattgtcctttgaaatatagatggaaatgttataagctactgagaaagtaacatttctttttgtgccacaagtgcatagtatcacctccttcagttcattgcttttcctgtcactaaacatactaacttcaaatcagctgcttacattttggtgagcttgtgtttctatccttacggaattgccattctttaggatgggataagacgagaagtacaaaccatgagcttgattgatcatccaaatcttcttcgagcatattgctcgtttacaaatggtcatcagctttgggttattatgccttacatggccgctggatctgctctgcacattatgaaaacttcttttccagatgggtttgaggagccagtcattgcaactcttttgcgggaggttcttaaagctcttgtctacctacactcccaagggcatattcacagagatgtaaaggtaatattgaatctccaccattctattagagtggaagcataatatgtagcagcacagaatttgcataatgcgttgcactggactcaatatgaaattcaatcacatttcacctgtccatgttttagacttagagacattgggatgacacatgattaatggagagacatgaggcatcacatttttgttgctcctgtgttatattgagggtacagctaattgacagccagtgtgatttaaggcttgggaacaatcactgactcgcatatgcctcaccttgggatggttatgcacccagaagtttagtgccacatctgaatcttagatgggctttattctcaaaaaagaatgaaaatacctataatggtccaatattatagtaattattctaaacaaagtcccccacagagtactgttcatcttaatattatgtcttaacaatttgtactaggctactagcagaagattgggcatggattctatgtgaactaaaagccattagtggatatttagatgtcactagtttattataacctagatgtttaaacttgtttaattacttttatcatatgcatgcataccttctgattgtttcacatgactaatcatttcaggctggaaatatcctaatagatacaaatggagctgtcaagctaggagactttggagtgtcagcctgcatgtttgatactgggaataggcaaagagcacgaaacacttttgtagggaccccttgctggtgaatattctgctgatactccctccattcacttttacaaaatatgaattaactttgtgtggtccttttaattgaactttgaccatgattgttccagtatgtagttattgatacaaagtcatgaccatttgagatcacattgaaatacaaatctagtggaacaacttttatttcactaccctacaggctacatatgttagccaaattgttgaccaaaaacttaagaagtttgaagtttgaatgccagtcgttgcattattatattttatgtaaacatatttatgttaagattgtgtaaccccatactttttgcaggatggctccagaagttatgcaacaactgcatggttatgattacaagtaagttcataactggcaatctaaatctgatttgttaagctaccacaactgattaagttttccttttgtcatcatgttcaaaacatagagctgacatttggtcctttggtataacggcattggaactagcacatggtcatgctccattttcaaagtaccctccaatgaaggttagcactgaagtatagtttgttttcttattcttaataaatttccatgaggttagataacgatagcggtacatttatcacattgtaggtattgcttatgaccttgcaaaatgcaccaccaggtctagactatgagagggacaagcgattttcaaaggtttgttgtattcaccatgttccttttgtcgacgacttagactgtatattaatcataactgttcttttttgtagtctttcaaggatttggttgcaacttgcttagtcaaggatccacgcaagcgtccatcttcagaaaagctcttgaagcattctttttttaagcatgcacgtacagctgaatttcttgcacgaagtattcttgacggcctccccccgctgggtgaacgctttaggacattgaaggtgcaaatcactatttatgagatggcattcaatttgatttgacttgtctaatctttattatactcaattgcagggaaaagaggctgacttgcttcttagtaataagcttggttcagagagcaaggagcaactatcacaggttagatgctgctcttttgttctaagaaataatattgtcagaatactactctctctgtgactctgtcctaaaatgacttgatttctagccattccatggagtagtcagtgaaattttctagagatctcatgtcattggagttaacatgtgatgagagatctaggttttgcctatgttgaagcaaagactagagatagatatatatgttaaagttgttgatctgttcatccacatttcttgatttaatgatatcattaaacaaatagttttgctagcttgtttttcatcatttcctttctacatgtgctagattgagttgagttttattggatttattaactaaatggtgactgcatttctacaactgtggcaaatatatatatttttaaataataataagaactatagttagctaatagcaagctcatattttgaccataagtaagctcatatctcacatttatatattttactgtgtatttatatattttactgtgttgtatagaaatgacttattgtagtcatgaattgcacggtgcatatagattcaagtattattgaccaataggctattactgacttttgcttttcagaaagagtacatacgaggaatcagtggttggaacttcaatctggaggacttgaaaaatgcagccgcccttgtaagaattcgattcgaagtgctaaatctttactactgaaattttgaagtcatgagctataattaagccgtaacttttgtttgcagtgaaccttttctaatcttgaaattttgttcttccgcagatagacaatacaaacggaacgtgccatttagatggtgttaacagcaaattcaaggatggtttacaagaagctaatgaaccagaaaatatttaccagggacgggctaaccttgttgcttctgcaaggcctgaggtaccgaggtcccatcgtcttatttatgcaactaagaccccatgaactagctggaaacaacaaatctattgcattatagctttactctaaattttacaggatgagatacaagaggtcgaagatctggatggtgctctcgcctcttctttccccagccgcccccttgaggcactaaagttagtagtaaatccatgtcttttgcaacattttccaatcatgtttgaagaacctttgatattgtggaatgatgtggtttatagcttattgtttaaataatctacttgtcatgtttgaattgtcagaaccctgaacaataatttccttgctttttgaaccttcatttacattagatttatcaatatttcgcagtcaatctgagagtttggtaacttaaccccaatcaggtgatatggtaacaatggagccatgtttcaataggaaaaagaaaatcttaattgctaaatatattggtgtgaagtatcttaattgcaccacatttgtaataatgaatttgttgtgtactccttccgtcccataaaaaaccaacctagtaccggatgtgatacatcctattactatgaatctggacatacatctgtccatattcgtagaaatagaatgtgtcacatctgctcctagatttgttttttatgggacggagggagtagcttgcaaataaattagtacttgtagtgtgtgaatcctactgctccattctgaagtagtataattttgaactggagtggccaccttaaattgttttggttcgctgtattgatgtgctgtcaattttgcattttttgttctcttcgatataaaaaaattgtgagctgtgaagaatctttactgactacagtgacacagatcttgctttgatgtttgtggggatgatgatccccctactgctactgatttgagggagcaaccaaatatggaatctacatcacctatgcagcagttccaacaaattgagaatcataaaagtgccaactgtaatggtgaaagtttggaaagaagtgcctctgtaccatcaaatttggtcaatagtgggtcccacaagttcttaagtggttccctgatacctgaacatgttctttctccttacaggaatgttggcaatgacccagcaaggtgaattaatttcctttgttttctttatttattgttgaacagataacttatgattgtgttttcatctcaagtctgaagtatgtgcttaacttagtttaagttcgataatccccccaccccactcctacaaagagaacatataaacatgccttaaagtgaacagatttttttttgaatcaagtcattgctagttaccaaccaagcacaatgaccactctatttcgttgatgcaaactcttagatgatgcaaccatttgcagtggcatacagcaggctctgctgcagcacctagctgagcgctgagcttgcctagctcatgagtcatctcattcctctgtcaatgtgctcacttgatccgctgccacaggaggacaagttccactgcatcacatgctttcttttttccaaatcaggtcatcacgtgaactagtcagctgaccagcttacagttttgttggtggttagcaaacttgattatccaagtgattatttgcattaagctttgttcagttcaaaaatatattttaaaatgatttgatagattatttagcgcctagaactgaaacagtgttaaactagctcagtttgtgtggaccagctctctctgtgtgtgtatcaagtgtgtgggtggttgcatgaattcaagggttaattctctgtgttctgcagttgacagtctagtatttttttctttgattccttgataaatcaatgtttatagaaaacaagatggaccaagctgtggttctttttatttaagattaaacgagttgtcaggtacagtttcaaaagcttgtgcctagtgcctatgatactgtgctcaccttgtgccacaactttgtccctgtcattctgcctggtttgcattgcgatccttcatcatgctacacatggccaaactaggtcttgtcgagattggggatggtaatcctgctaggcggaaacgaaaaggatcagttctatacacatggattttacttcgcccatatgagaactgtagtgttcacttcaaattttgaaatacctgcatgaaaaatgtgggatcttagcatgcatttttttttatgctagtgaagtcaaactattgaaattggtcattattgtgagaagatttatattgtattgtgcattttagatagctatgcgacaatctcaattcaatttgtataggcaaagtactctttgccctgtaaaatcatgtttatgatatgctgaataggctaaaaaaactactatgggaatttagattggacctagaaaacatgatagaaccaaaaaaaaaaaagaaagaatgaagcatggatttacatgtacatatttgacaaaagtaacacttgtaaaaaaaacctttggttctttttcgtggcctcctactgtagtcttaatatttcactctcattttgcttcttatcatatcgtactaacatatcccatattgtctaatattctagtcggtgtaacacatgctattttttttttgcttcttttctgatttaggaatgagtgtcatcagaaaaatacatgcaacaggaaccgcagtgggcctttattccgccaaatgaaagatccacgcgcacatctgcctggtaagataatcatgaactctatcaactaacacgttacagtttttctttttttagaatagcaagaaaaagctttaaacctgtctcttttatttgtcattgatgtaatttggcttgttatgactgtttttgagagcagttgaacctgaggagcaatccgaaggaaaagttatccagcgaagggggcgttttcaggttacatcagatagtattgctcaaaaggtactggtttgttaattgagcagtcacatgaaactaacatggagggacgtcatatgcattgactattttgatcaatactccctccgtcccataaaaaacctagtaccaaatgtgacatcctagtactacgaatctgacacatcctagtactatgaatatggacatacgtgtcacattcggtactaggttcgttttttataggacggagggagtattaattaagcacagtatgttgcagttcaggactttgatttttaattatttatatttatgctaagcatgcctttaactgctacaatttatattatgtcaaaacatattcgaatatcatttaattgatacctgtagtgattggcaatgtttaagacttttgaagtggagggcaagaggacacaaatattttcttgaaacttttgtttgtttcatgattttcagctgctatatagcaatggctgctgaaatattatttgatcagtttgctagttgacttgcaaagagacaagcatgttttgcctgctctctgactgcaaaagaaaagatgcagaaatgggattctgttttctgattcatgttatttattgctgttccttcaaatttatttctcacagtccctgcatggtaatcctcaaaaggatttatcaccaatgctattctgatatcaatatttttgtcaggcttaattagtaaagtgcaaatatttttttcacattagtttgacaattacaaatgtcttaggtagcttcatccgcaagcagcagtaggtgctcaaatttaccaatcggagtaacacgatcaactgtccatccatcgacaattcttccaacactacaattcatgatacagcaaaatactatgcaaaaggtattcacacacttgttatttcacttggcaagaattgttcagaattttcacaattcttcgttttgacaggaagtgataagtagactgatttcttcaattgaggaaatatctggtatgtatgataaaattacttttgttagactttaaagagataatttcattagtatactgatgttatggttttaatggggcatgtttctgacagatgctgctgatgcaagtacaactggttcatctcaggtgtgtatcacgaactgtgggttatactgtcatttggtcttcaggtgtaaactttagatagttaagcagctcagagataaccatgccgtgtggtagtaatttcaattttaggttcattttaatgttgcacaaacatgaggtttcctcctatgtgtttattcagagttagtataataagtgcggatatatgtgcagccatctggagtgcatttcagagagaaggaactgcagtcgtacatcgccaacttgcagcaaaggtataaaatatttcttgtaggagtaactttttgcatatttatgaatacttgactgaagtttatgaaatatttccagtgtcaccgaacttgctgaggaagttcagagattaaagctcaaaaacactcaggtaaatctatttttaaacttcaatttagatttggaatcatgaacaccgtgttattttgtctaaatattggatgtattctctacattacagctcgaggagcagatcaatgcattgcccaaaaaagatgaaaggttacgaagagaggatacccgacaacaatgatatgcacaatgcacttgtaacccccgctgtaaaatcagttccccaattttgaatttggttagcaaaattatttgtattttgttcgaagtcaggcctggtgtatctttgtaatttgtaattattttagcaaggtgaaattatagttattttcatttgtacaggatatttcaatctataccaaagttaaaagcttggtactagaaaataccaaatcatctttcctaagggcccccttgatttgttggaaaaatgtaggaattttggaggatttcaatcctatggggaaaaaaatatcctatgaaggtctttgaaacaaatgattgaattctatccaattctttaaaaatcctatggaatgggtaatcatatgtatatttggaaagttagtaagaggtttaactttttggaaaattttctctgggtctatctctctcatctgattcccgtgtttttcctgtggtccaatcaaacggttattcctgtgttattcctgtgtttttttttttgtgtttcacaatcctctattttataattgtattccttttagaattatgtgatttttctattcctctgttttttcatccttactattcaaatgggtcttaaaccagtagcagagtgcatatatataatggtcaaagaacgaacatacaagtattgcaatcaaaatcagtcatggcaaaagaagtatatctctaccatcttaaatgcagagttctccactcgtgcaatgtgtatgcatgaaaaagtaaccatcatctctctaattatatcagcttggcctattaacatgcgagcttttagtctacccctaatatctactattataaaaattaaaatatttttaccagtactttggtagatttgtatttgagtcgggttttaaagttcgttcgcttttgaaaatacagaaggagtcgtataagaaatcatttttaaaaaactagcaagcaaactcctaattaccgctcatgattttttagaataatatatatccaagcgaattcctacagtgaatttcaacttaactaaactgtgtaacaataacaagattaaaatattaaaataactttcacccgttgcaacgcacgagtattttcctagttatatcaatatgcgtctgatccattacaatgtgcgggcatataactagcaaaagtaaaaaaaaaaaaggattgtttgcaattgtggaggtagaactagttcagtaattcaatacgcttgctagcaaagcttgctttgtttttgatagttgcggcatgtcatgtcctgtcgtgattttttttacagggagtaactatatttacggcgtcatattttttataaaaaaaatagtcgacatgtatttacattataagtccataaattacatatgtgattttagtgcatctacaatgcaagtcctaaaattacatatgcaagtcctaaaattacatactaattatataactaagtgggggtgtaactatggtgtaaatttatataaatatataatggcttgtagttgttgcgcaacagtacgtgcgaaagctactcacacgaagcagcactaatcttggaaaaaatctgaccgaacaagaactgactgtaatgaggcagaaaaagtggcgagacaattctagcaaagccgttttgttatacaacatttactggtcgagtactacctttactcttttagcattaatatttaatatattcttaagtattgcaaaagaaaagtattgaacttgtataattaagtgaaagtatgcttcggttacatgagtataattaagtgaaagtatgtgaaatgtataatatgtggccttaaatttgaaaattcatagagacaactggtgtattttaccatgaatagtacttctctcttttttttttcggggatatgaatcgtacttgtcaaagagaaaattcaagccacagtactattaatgagattgaagaacactattaataggaaacccattagaaagctagcataatatatcctgatagtaccggacaataccttgtgctaactcgtgatgcttcactgagaagtttggtactggtcgagtactacctttactcttttagcattaatatttaatatattcttaagtattgcaaaagaaaagtattgaacttgtataattaagtgaaagtatgcttcggttacatgagtataattaagtaaaagtatgtgaaatatacaatatatgaccttaaatttggaaattcatagagacaactggtgtattttaccatgaatggtacttctctttttttttcggggacatgaatcgtacttatcaaagagaaaattcaagccatagtattattaatgagattgaagaacactattaatagggaacccattagaaagctagcataatatatcctgatagtaccgaacaataccttgtgctaactagtgatgcttcactgagaagtttggtagattcagaatttctatttcgtgaaattaatatattggttagcatggaggaaatcgttaatgatgccattgtggcctttcaaggtgagctagctaagagcgctgatgaaaatggcaatgatgctgacggaaagggcagctggcgtgtggccaaaatgaaacatgtagcttgctgctacattgatggggcaatatggattttttcctatgtatgtatctctatgatggtgtttgaatctcccgaagatgaagatgaagattaagtgtttcacgtaaaatgaggtggtaataacatgtgattaattaagttttaattattacaaacttgaaaaatggattaatctgatattttagaacaactttcatataaaaagttttcacacgaaacacaccgtttagcagtttgaaaagcgtgacactttaatccagaattttagcagtttgaaagattcgaacggggccatgtatgcaactatcatctgtaggactatggacctgttggctgtgtgctaaaccatatgtggacacgttgatccatggtatgaccttgtcatttgtgtgcgctaaatatattataggtgaactttatgtatgtatgcacctgttaatctattatatgtgcaccttcatgatatatgaaccataaatgttatgttttgtattttgtcggtgtgtcatatttgtcttgttttttttgtcagtttttgaaattttgctacctattaatcaagctaatgtggtatgtacatgagagcaattatgaaatcatattacttaggtcataattatcgaatcatattacttaggtcataattatgaaatcatattatttaggtcatagcaagttttgatgcactatctaccagttttactttggaaaaagctactagacagtttattacgctcatgttgttcatgttgagacgcccaactagacagtttattatgctaggttgagtgagcttctcatatgggtaagtttaactagcatctccgtgcaaactgcgcatagctgatcatctaagtgccttatggccctattgcaggtatgcatcagtaattgagctctctcatttttttcattcataatgatcgatggttaagatgatactatctatgcagagtctgatgatacaactgaaccttagtagtattttcttagcattcagttcttttttaacctagtagtgtttttctcctcatatatgtatgcaatcatatctccatgcacaggatgtttttcaaacatggttcatatgcagcaggacaaactgaagcacaaattaatttaggtgcaattgtaaatttaccactgctttcaatcgttattgcaagactgccactagaaaattgcaaaaataccactagaactgttattcgagtggcatctttgcaaaattgaaaaaaacggtggcaaatttacaaatgccccattaatttagaggcttgctaacccacggtataccgttagaacgatataatcattagtcggacacctcaaccctaatgcacatggcgggcacgcaccagcttgcgtgcatgtgctagtgctggtcgtggatactgtatattttttttggaagcaattcacatacacaaatacactagctaattactactctgcgcatctgccatgcatgacatgacaagtgctcctcactcatgcacccatagattatatgaatgcctatccttttggtcacacataactacaaactcctctataattgcgtgcttagctatatgacatgttattgttattatagctatactcagtggttgggctggtacctcagtatcttatattatgatactattttttacatgtcaaaatatgattatctataatagtacctcgaaagtatcgtaaagtatctatcatgatacatgtgggtagcaaaccaagcacatatcagctggtatatgtgggtctcagttttaacatatacccagtctgataccaaggtatcacgtatgatacctattatctctggtatttgtggtactaagcatgatacatatatgtattatgttgatacctgtaggtaccgggtctgatacttatatgtactagacataatacctaggtatcggtcgtgatacatgtagttaccaagtctgatacttataagtatcgtatattatacccaggtatcagtcgtgatacatgtaagtaccagacatgatagatgtagataccagatctgatacttatatgtactagacatgatacctaggtaccgatcatgatacatgtagttacgaagtctgatacttataagtatcatacatgatatctaggtatcagtcgtgatacatgtagataccagacatgatacttataagtatcatacatgaaacctgggtatcatgtctggtacctcgtgatacatgtaggtaccagacatgatacctagatacgactcatatactcacgtattttaccttgaaacaagaccgtttatcatcaggtcacataggatcacatatagcaatagagaatcaagtcattttctcttgctcatggtcattggcaactttaacttcgatttgatgcaaatagcatcatcaaggcaggagtagtcattttttgatcgtgacaatagtagactagtagtgcatgtactcctcctatactactagtgcatgcaatagtatatggcaggcagtagtatagtacggagtactactagtactgtactagtagtgcatgcgcaaagagttaatccgtggggctcgtgggacccatgcgggaggagagatgggtggttcatttgcgacgctgggttggacggtttgatgccgtgcataatttgtactgtcctaacggtataccgttttatagcttttctcttaatttatatccccacacctcagaatcaggaggtaagtctttcattttcatctatttctgtacatacggtttccctaattaatctgcatcattgaatcacccttctttggcttcatcttcaattacttttagactttattggtttactttcataaattgataaatatctttggagtaatttaatttaatctaaaattaatttacatatatgataaaagtaatatttacaacatacatttttcatcgaaatataatcgtgtaaaatcttgttttaaaaatttaattgtaataaatataacggtgtaattggattaaaaaataatacctagtttaaaagatatactacctcctttttaatatatgacatatttgactttttgtgtccattcgatttattaaaaaaaattaggtaactataatttattttgttgtaagttgttttatcactaaaagtattttaagcatgatttatgttttatacatttgcataaatttttttaaataagacgaatgatgttaaaaatcaacgacgtcatctattaaaaacgtagggagtaagttttttttagctgcgctgatatcctttataactaaacagcatgcatcaccttgtctaatcacgaaccagtcgcgctataagactaatataagtgcgcgcacaataattagattttaccgtaacaattatatatatattaaactcctatgtttggtacagcatcaatacagaaaccgatcgcccccgtcaccgttgtgcgctgaaggaaaaatcagaatcggcgatgtcggccgacgaggatgccatccacctcctgtccggcgggtcgtctagcagctggcgagacgcagccgccgccggcaccgggtatatgtcctcctccggtgccggtggtgaggccaccgtgattgggctcggcgggtcgtccgacctcgccctgtgatcctgcagcaggtgcaccggcgacgcggaccggctcgacgccggcgtcgcgaagtcgacgctcatctgcgccaggaacgcgtccgcgtcccggaccttcttcttctccatcgccttcttcctccagttcatcagcgccttcatcgtttgctcctcgaagattgtcttcttcatgttcgatcccatctgcaagtgatggccaaaacacataccaacacaaagggcatctcatgggttcaatattgtggaaataaagaaaagacattttatggggactggtagtgaaactgaaatttcgaaacaaaaaaaaggttttggactgattttgaacaaattttgcaaaattccaaaaaaaaaccccctccttttcttaatagatgatgctgttaacttttggacacttgtttgaccattatcttattaaaagaattgtacaaatgcaaaatataaattatttaaaaagtacttttagtgataaaacaactcaaatgataattacataaatatttttaataagacaaatggtcaaaacgtgtgtctaaaaattaacagcgtcgtcaattaagaaactgctaatagaatttgtgaatggcttgttcacctgtgtgacgagcgcgtagagcgggaaggtgatgtagctgcatagcacctgaagagagatccccacaatgacttccacgatgctcagccaaatattttcatggaagcatttcttcagaccaggtgttgcctgtcacacacaaaacaaccagatcgatgaacaagctgtgtcattttttgtctcattagtcagtgcatgcatcacacttaatttgcttaagaactgataatggcaacaactaagcaagtagcatacacaccatagtccatacgaaatgcgccatctgaaatgcgttctggtgatcatcgatccgtcgtcccatcgatcagtagccacaaatggatggatgctatgttagttaattaggtgttaattgtgaaagataaagtactatttgtagttgagcagcaaggtttaggttttaaacatgtacatggaagagtgtcaggtgtatgaagaacaagacccagtcagggcggttgaaccagaagtacttgttgcttggttcaaccacaggtgctccctggatcacagtggccctgtcctgtatctcttgggccatctgcatgatcaccatctctagcttggtcccaactaacaagacgatctgagacaacggtggcattcacatgaatgtttgttcattagttatatgatcatattaattttcatgataaattaaagcataattaattatgttaactgtttctttggacagggaaatttcgctcttacgatgagaggaacaaaagagatccaaataagtgtgccaagacctacacgcggggaaaaagttgaaaaaaaatcgatggtgattataagaccaattcagaacaaggttttgagagtaaaaaacagaatgaaataggacaaggattaccgtggatatcgaggaagagtacaaggattccgacgaaccacagagggaggctgcaaaaccagccaaatgtgtcaagatccacatacacatacacaactggagactaaatatgtttctttataaaaaaaatgttgaatataagagtcctataattaataaagcgaggacggacctgatgccaacgacaactttgaagtcgtcctccaaagacctcttgatgtatttgtggaagtcgaacttgctattctgcgacaaatgcgcctgcaaaagagaagaagctaaaaccattactcaatgcacactcgaaaaaaaaacctggtctctgtttgcatcatcaatgttgaattggtcaggtttgattagtatatacattgatgaagccttgccgcatggtcaggtagtccaccttggtgacggacccaaagaactgcctgaagaatgctacctaacaacaaacacggcatgaatattttttttttcaaaaaatatggattgaattggaacagctaggccagttgcaagaataaaaaacaagcatgtattcggagattgataactcacgatccatctgagcccaggggtgcttgagaatgatcccagatgccgcttcacgaacgacgtctgatgcgtgaacctgaatcgtgaaggatctgcatggatcgatcatatttttcagctgatttgctcctcctctttcaagacattatcataaaggttctgaaatgaaatagttagggagattcttaattcactaccgattgcgaactgatactccaatgagttggtctgtgactcccacttcttccatttcttcatctaaaaccaagaaagaccaattattatatatttactggcaaattaataaattgggtttcttgtcgaaacaatccatttgaaggactgacaatcttgctagaactagagaaaacatgtgcatgagggacagaacgacaaactcactttgaggcgccctaaacccatggtgatgacgcagtaggtaacatggaacacggcgagcacgaagatgaaaatgtgcagctggtgcatgctctttgccgacatcagcgccaccttgccctgcagaaaacccaagaaaaatcaattatagttaaattagttattgcatcgaggttgtgcttgccggcagctggtgttattctcacatcgaatttcgagcagtagtccccgccgccggcgccggccaaggaccggcgatcacttgctgcttcttcttcgatggcatcttggcctgccttgcacggcaacaagatgttggcagccgacttggggatgcagatcttggagatgggcgcctgtgccacggtgagaagcagggatatgaagcccagcagcatcagctctgcaagtgcagataggacaagaaatatgagaactgcggtggttttctagtttgtgtgccatctaaataattatttttttaaaaaaataaattaatatatcattttacaaatatatacataaaattcaattcctaagttgaaaaaaaacaaatttaatgtatattaacagttaaacttgtttgttttgtaatttacagaagttaaatttaatcctacatgctcgtgaaatgatctatcacatactaatttgtattgttgttattttttaaaaaaatcataaccatttgaacagcatataatcaacgagggaatataaaaaaaaatcatgtaatgactcctccaccctaccttaaaaaaacaaattaacaaaaataatttttctttctcctttttggcctgattgctcgctcgcttgttaattctctctcaaaaatgagagttcaaaatcataaccatttgagagttaaaaatatttcccataagaacatggtgaatcctgtgcgcaacaatgaaaaatatgtaatgactctgactcggtccattgtgatgaactggtatggtttttctggtcatttatgattaaagaagattgctctgtctcggtcggctgatccagacaaaacaactcggtcgtcctcaaatcgctacatgcatgcaataatttagctattagtttattccttttcctcttccccgctttaaatattttttcttctaaactagttaggaactatacttataagccaaaatttgaattttaagagttgattttgagatttttcatcgaagtttatttttcagcctttgctgctagatcgttaagaacacatacataaaagttttatttacaaattatttttcgtttgcaaatataccgtttggcttattccctgaataagccaaccgatgggcatgttatccaacatacaatctaatcacaccgttatattagatgtaattaaattttacaacaagatatcacattattacattctaattaaaagaatatgtgttttaaaccgttaaaactcaatatttcatacataatagcagtatgtttgaacatatgtcttaagtgtgtttcacaaaattcatataactacttatctctaatctctctccacttcatccatctatacgtgtatgtatctagtaatcttcaaaatgatttttctcttaaactactaatatatatatataatccgatcacaccgttgtattcgttgtaattatatctttacaataatatatcgcatgattatattctgatgaaagaaaaacatatgttttaatctgttaacattagatgttttatacgtaacaatgatacgtttcaacgtgtctaatatgtgtttcacaaaatatttcattgtttgtggctgattttttttaacatatataacctaatatttcaccgatgatcaaccaaaaaaattagtcacccgaattttttttaagtaatcggacatccgactggtagtttcctccatgattaaatacaagtagtccccccttaaaaagcgaaaggaaactataaacggcttatttgtgacgtttgatttggaggacccagtcttgcgtaaaatacttgaaaaaatgacgagggaggcagcaaagtggctagaggggagcagcaatataatattcccttcttccctaaatgtttgatgccattgactgttttaaacatgtttgaccattcgtcttatttaaaaactttggtgaaatatgtaaaactatatgtatacataatagtatatttagcaatgaatcaaatggtagaaaaagaattaataattacttaaattttttgaataagacgaacggtcaaacatatttaaaaaagtcaacggcgtcaaacatttagggatggagggagtaagagctagctgagggtgagctgaggctgagggtgacctgctttgatcttgtcgagggcgtcgcccatggccttcttctgccgcctacggaaccactgcaatgcaagcagtagcgccaccacagggcgatcgatcgaccaggatcggatgttaattgagatgtcacaagaacacaacaacaacaacaaccaaattaactcgagagatgagcacaccgcgtgcgcgcgcgggtacatggctgaggttgtggaggccgtgctccatggcgacggagacgagcacgaggacggcgcagacgacggccaccgcccacgtcggcgtctccggcaactcccgcgatcccgatctcccacctgccatgatccgatagatcccctggtgcgtctcggggtgagctgactgggtgaccgctagcttagctctgatgcacttgacactttgacacctttgacagggggcggccggtttttattaaagagcgggggcgggccggggggcggcgggcggctgtgtcaaagcgcgtgcatcgccggccaatggctcgatcgcggcaggttgggcgacgtggtgagcccgtttctgaccaactcatcccatcctacgtaccggaaatttgtgcattcgtgagtagtgacgatctgccgggtacttaatccttaatgcataacagggtttacgggtcaacataagagggttgataggtcaaccaacttgcaactttttctatgagttacggtccaactaatatgattcgtatggagcaagtttaatgctatctccattcgatcttttttgtatttaggcaaattaaatttgttacaaggcactctaatttcatggttttagccggaagacttcgcaaaaatcaagttttaagggaagacactatcaaaaaaaaatagatatttgccgatgaacatcgcctctcttttttattgtttccatccgattttggagagagaaaattatgaaaaagcgatagggaatacccttggggcactacaccaagtatgtcaagtggcctctttcccaggagcccgagcacatctatcatattagttctagcactcacccaggaattaaatgtaccttcgaccaatcatatgggagcacaaggattggaagggcccacatgacagtccaaaacgactgaaattgacctaatccatagtgcaccgccatatgggccgacttgtcagacatagaagagaggtcctagctagaggttgtttgcttggttcggacaaaacagggttggcacccctaactgtcagcgttcgatcatgtggcgatctcctattggttgacgatggtggttgtgagtgtttaccgacttaactaccgacctacaaccgaccattaagctgctataaaaggatgagctaatttcacttccaaacacacaacaaaatagagtacaactcactttcatacattaggcatcattttagttgtgtggagaaaaagggtagagagtgagaaaggttccggaggagtgctggagttattggcgtgctctcctctcctgtacctcggtgaatacttctttaataaactaagtgttcgagatttccttttcgtacttaattgacttacgtaagtgaggtacattctcatcgtcgtgggtttgtcgcttactattatattaagtactctagtactagcactctccataaagaatgaagtttctacgcgagactagagtagtaattgataacttaggcgtggtgtctagattagtggttacctttgtttgttgtgtgcttcgtagaaaattaggtaggccggctcaacttggcagatcatgggagagccggtgtccaaagcaatcgatagagttttacctcaacttaagtacagttaattaatccatatgaatcctctctagcttaagcctatcatccgttgttgtccttaattgaattctattcttatatatatagtgttggtatttgttaagatcatagataaatccgcaagcgcacagataccgctatagcctttcatctaggagtatcccaagggtacatatttgtttttctgctgggaatgcggcggtatacagagttgggttatatattcataaatcgtaaccatgctataattaatataccaaaaatctaaacatgggttaagataataataaatagtaggctagtgtgacacagaagattcgtctctaataatgatacacttggcagtgaagatggactaaagagatctaaggttcatttgtacttctatattactatccagtttacacttaacaaatacatgcttacaaggctaggacttagttctgcgcaccctggtacaactgagagaccactccctgctagcctgccaacatggtaatgacattttacaaactcttatgtcatacctagaagtggaggaatacaaaggacggatagagttgtcatcacctgccgcctaactcactttccgtggggtatacccgcatccaatggaatttaactaacctaaacaccatgtttatgctaataaataatgtcatgagttagagctagtgcaacccattagtattggaccgttaccatggcatagatcgactagcataatcaagtgaaacagttaaatgaagtacaatttgtttgtagaacacaaaattaataaactaatatatcaactatgaacactaataagtaaataagataattttttaatgcaactatagtcttacaagaagagtaaagtactgaagacataccggaatctccgagaagacaagaggaccaaagattactttaagcctaactacaatatgtggaatgagagaattgctccttgagtgtgtgctttgagagagaagaagtgatttccttttatagttgcttatgacgggaaggccggtaactcgcacaatcgtcatcgggaagcaaccatgaagcgccacgtggagggtggatatgagaggaggtgatggcggtttggccgaaccctgggccccaccccactcaatcgcctttcttcaagagctgacgtgtgaacccctagaatgttgcactgtggtttggccccactttagctttatttgatctgacttgtatgcccattaatccgtgtgctctcacgtgattcgtcggaagtgtgtttcttcgcatgccattgcaatttctccttaatttgtagcatacccctgcatacatagtatttctccaagaacaagtggaactacattatttagtactaatatacgtgtaagaaatgttagttctccctttatttgttctaaggtagttaacggtcaaaaccgatacttaacggccgttaacaacaccctcaagctaaacttttgctcctcctcaagtaaagataaaatttaggttgttgatcaggagttgctaccatgttttatgccacaatagtaccatgcctacaacgtatccttctacctagaaattaaacaaattggcaattgtacttttacctttcttaccttactcccgttggggcttttagcttctcctcatcttgggtaattgagagacagaacgaatcatagagcacaatcacttactctttgtttaactttatttctagaggttttcaagaattttataaataaaaggaaaaagtacgaattaccccccccccccgaactattgcggtcgaccgaattaaccccctgaacccgaaaaccaaacattgcacaccctgaactttcaataccggacgaattaccctcctcaacctaacctagagcagttttgtcctacgtggcttacgcgtggcaatctagttagcatattctttaaaaaaagttggtgggacccacttgtcatatctcctccctacctcttcccaatctctatctctctatctcaaacgcgcggacgcatgtgcgcatggcagcagcgcagcgcggacgggtgggcggcgaacggcggtgcgcaggggcgggcggtggacggcggcggcggccgcgaggcgagggttgaggtaggcgttggcgcgaggagtggggatggcgacggggagagcgggctgggcgcgaccgtcagggtggaggccacggcagcgacgatggagagggacggcgagggggcggagggcacctcggctgcacctccgtcggatgcctgcacgatgcagcacaactgcgcatcatcctcggcatcacccttgccctcgtcctcggcgtcggcagcggcggcgctgggaggagctggtcgagagtggcgtggaggcccaaacttggcggtggtggccgctgccggtgtggctaatgctaggatcgaccgcagtttggttcgtcatcttcaacgtgggggtgtgcgccgtcggcgtgctgttgtcgcgtgcgcgggagtcgctctcgccgcgctgcggcagtggcggcggcggcagagtcacgcgcacggcctcgtcagcgccggagcgcatccactcgtcgttctccatcttctccttcccgtcggtgatcttctatgagttccatcttgacgccggcgagccacaaacgccgatgccgcgcaagtatttgtcggtggaggaatcgcagcccacgacggatctcgcgggaaggaatcgacaagcatgccgccgtttcgagcttcctcggcgactttccctgccagcactgtgaacggccgccgtgcttgtcccccacccttgtctcctgcacggcaatgtcctccgtgacgacgccagtcacccgagctcgccctgcctccaccgccgactgcctgagttctctctgcctccgcctcctccaccggcgcggagctcgcccctcagctgctgctgcggccgctgccttccccccgccgcagcgtcgcaccccgtcttcctcccgagctctgcctccgttatcggccacccaagcgagcgagaaagagagagagcagagggattggggaggggagagagatgataggtggcgccagtagtttttttttaattttctttgctgactggattgccacgttggcgccatgtgtccaagctcaagtcaaaaacagctcaaaacagtgctttggggggggggggttattttagttgggggtgaagaatgtctggttttcgggtttaggggggtaattcggtcgaccatgatagttgggggggggtaattcgtagtttttcctaaataaaataagagttcctccaatgacattctcatatcgcttaatgtgtataattcctcaccaagacattgtgttgcctctttttcatcctacctctaaaaggtttatatgtgaagctcaaggtggggaaaataattaggcaatactcttgcatcacatatattgcaaaatcgaaaagaggatcaaggagaaaacaaatcatacaatctgatcaagatgtgcaaagtgtgtggctatatggtagaaagtggtatgtggtactctttgtcatatattgactatattttattcctactttgagatatgacatttttttctaactatttttttctcatgcagatcaagaacattgatgagcattcacttcttttgcaactactctttttttttccacagtgcttgagaatattttctattctctatcgccttctcgttgtttttatcacagccatctcttttgcatatataaagtgagatatttttggctgatgtaatggagcattttatttgttcgatgagatgttgctaacctccagtgtggaggtaaagcaactatggtgggtgcatggtatgtttttgctaacctctagtgttgaggtcatgcatatattgtgggtacgtgcacgtatgatgattatatgtgtaaagaatctcacaagggtcacaataatttgaaaaagctcaatgcaatagcaagcattatatgtgtaaaggcttttgcgatataatcatcatatggctttggcaggaatttgtcatcattgagaaacttataaattttcattcttttgaaaacttaaatcattcagaagtcaagtatcactccgaagtaagaccatagcaactctatttcaccatctcagatccacacaacaacctagacttagatcatgcatatgcagcccacaagtttcaagttcaaggtaaaattttttgtccaacaaactcagaaacttaggtgaagactaggttgtaaaactaagcattagagggaaataaaacagggcaactattcatcatttcaaccatgagcactagagcagtcttaccacgtatggaaagcaaatatttttggtattttttatattttacaaatttttatcttttttaagatgcaattcaaagaaataaaatatacaacttaccttgggcccttccccaagctagcttcttgctcatagtctatgataaggattgaatctctacgagtggaagtaggccatcaagtcagcgtgactttgcttcatggtggcgctgatgtttgccaataggccatcggtatgctactgccatgtgtaggtctcctggacatgctgatccagcgtgttctacatctcattagtccagagatcaagctctcctagcttttgggtgatgtccgcatatcctcggccgaaatcacgataacatggagccaagaaagagcggcgtgcaccaaatggaggggcatcccactggtgctggaggagtggtccacattggaaaaattgtcctagcgattactgggttgttccaattgtcacgcccataaatttagctaaatttccggactattttgtgtataaatcggtcaatatactgcattgtagttgtagcattctcacctatgaattttgtgaaattgggcacatctaatccttacgggtatggaaccgaatcttacatgtttacgatacggcctttcagatgtatgcgatgttgctttagactctcttttccaatgctcacatgaccgatctatggttcggtcttaggtgataatattatattattttcatttgtaatacaatccgaacttcgttctatatttttagttgcattattgtctaagctagtaacacaatccgaatcatcacttggtttagctatacttgttattgcattatcatctaagctaggacgtaaactattgtcatccactcggatttcctgagccagagcttcatgcaacatatgattaacatatgattaacgggcggcggtggtgctcgatcttcgtctctcgacgacggcgacaacgatccaatctggttagtccgattagtttgaatggagatgtggattgatccagttgaaaacctgtgaacataaatttattgttgtaaattgtgatgtaaattgtgttgatttgtggatttgtggatttgttaactgtgatggatttctggatttattaactgtaatggattcgttaaatgtgatggatttaaattgtggatttgtgaattttcggttgacagaggcggacggagcagcgtcgctccgtctttttttagcgcgggttaggattatcactggcggattatacaacatagccgcctttgcaaattcattttcgctagcggctaccttacgaacaccgccaatgaaagtggatccacgctggtagttggcaaatgccagcgaaagtactatattatcactggcctttggtctctagcggtgctgtaggctgcttgtgaaaacctattttggccgtcaggaaaaataattttttagtaatgcaagcagtctattatatgcaaggtgggccaaatctctttaagttatattttttttggaaaaaaaaacactgtaggggaatcccccatagtaaataaatttattaaaagatcaaaagaataaatttacaacaggtttaaccagtttgaaagaaaatttctatcttctacaggtaatcttaaagaaagctctccaagaagaagaaacagatggaatcacaccatcaaagataatttatgcccatttctctgcttccaaatgttccaagccacatagagaattttttcaacaaagtgcgaagacctataagtttgttttgcttgaagcaacatttgctcaaaagcaatagatacatcccagactattccaaattgagcccaactctgagagctgaaagaaaagatgcacgaaggtttctctagttccagaagaacatagaacacaagttaaatcactgttcagagatgcacaatgctttctatctagcatatcttgggcatttaatctgtcaatcagaagcaaccatctaaaaaccttaactttcatagttcacttacttttccggatccaattcagataaccaggagcttgaatattctttaagttatattcaaactagaacatcggtttcaaactagaacattggtttccagcatctctaaacctcttaaaataatcagtaacagattcatcatattcttccttaactgatgttaacttagataatataaagcttggtttcactagtataaaaataatcatgaaatttgcactctagttgagcccaagtgtagatagaatttgcaggcaatgaagtaaaccaagcaaaagcctaggtgtttatatgtgatcatattatccttgccgctaaattttacgaattcaagcaccttgaaatcacgaggatatgggaatatatataaaaaaataaagacaaggccttcgagtagccttatttttttggctcaattatgcaagcttccctaattatggtgcattcatgtgtatcttgagaaacttcaggacttaattgattatgtgttaacgactaaatttgggttttcacaccaacattatcatcttgatctaatggcctaaagtgtgtgagcacaacaggatcttgagagcaaaccccctgctggccataatgcttgtctcgtgccaatccatgtactctatgattttggattgtctcataattattggtgcaaatagcatgtgtatgtggaataattaacatgactaacattattaatgggagatgaataacaatcaaaatcagtactattagacgtggcacaaaaatcttgagaaagctccagggtgccagtctgactagccatggacccggtctgatcggcagtcagtgaagcggtcagaccggccacaggaggcacagtctagctgacaaagggcacggtctggctgacacagagggaacagtctgaccagtgtcatgcgcggtgtgaccgttggctaggttctgtgtgtagtttattcctgtgtaatcggttgtgtaaatacccttgatccatccatgttactataggcatgttgtatgggagcaaaactggaagtagcattagattattgataattgactattttggagccaatctattatattattaaaggaatagaaaaatgagcctctacgttcgctctcatggtctagaaattctcacattaatcggagaaaaagaaaaagcaaagtccatatagaaatacaatttaaaaatagctgaaattcagaattaaaaaataaggaatattaggagaggagattagagtccatatagaaatacaatttagaaatagttgaaattcggaattaaaaaataaggagtatttgaagaggagactagagtctatatagaaatacaattaggaaataactgaaattcagaattaaaaaataagaaatattagaagaggagactagagtccatatagaaatataattaagcaataactgaaattcagaattaaaaataagaaatattagcagtagagtatagagtccataaggaaatacaattaggaaataactgaaattcagaattaaaaataaggaatattagaagtagagtatagagtccatataaaaatacaattaggaaataacagaaattcagaattaaaaataaggaatattagaagtagagtatagagtccatatagaaatgcaattaagaaaaaaaatagaaatttggaattaaaaaataaggaatattagaagtagagtatggagtccatataggaatttaaaactaactaaaatttgaaataaacataataaaattaaaagtagagtttagagtccgtataaaaatataatttagaaataactaaaattataaattaagaaaaacatgggaagaagagttgaaggtcagtataggaatacaaatataggaatacaatttagaagtaactgaaatctgaaattaaaaattaaagaatattgaaagatgagtttagagtccacatagaaatacaattagaaataataaaaaatcagaaataaaaataaaaaatattggaagaagagcatagagtctatatagaaatacaatttacagaaaattcggaattaaaaaatattaaaagacgagtctagagtccatataggaatatatataatttacaaataactaaaatttgatattaaaaataattaataactaacacgtatataaaatataatatgaaaaatcagaaataaaaataaataatattggaagaagagcatagagtctatatagaaatacaatttacaaaaaattcggaatgaacaaaaaaagaaatattaatagacgagtgaatatatataatttacaaataactaaaatttgatattaaaaataattaataactaacacgtatataaaatataatatgaattttacacattagtagttttgtaaagttattgcaaaatttaaaattatgttgtcattttaatatatttgaataatataatgagaaaatatatatgctattatatgagaaaatataatgatgctagccgcgcaatttgcacgggccaccatgctagttttcttaaagaactcatcaagtctagtattaaaagcatcttcaattgtatcacgatttttatcgatataagccctaagagatgcatctacaaaactatcaatagtttttcgaatagcaagagatagatcgggcggatcagaggtatatataaaacctgacataccgaaggagagaaagattagaagaaccaaaatgtaaacgattaactcaccctctgttacctaattcttgaggctcagaatcgccatgcctgagctgctaaacatagcaagagctcgcaaccatgttttagtaaacggttcttctgtttttgacgctatggtcccctattcttaggccacgacagcaaatcttgtttctttccatgcccacctgaccaaaagcagcaatttttcacgcattctcttcctcctcccccctgacaactcatccaacgacattgaccacctctctctgcagttttctctgctgccagccaggtgaatacctcttgggcttgagatattgatttgggtccagatcatcgaggagccattgatagattgcaaaagctagctgtctgggagatggtggtggatgaagggatgtgctgctagcagaaatggtgatcgggagcaaatgtgggttgatgattctcgtaccagaagcattgtttgatacgattttgatcagctggcgggagaggaaacatgtcatcggaatcggatcaagccccctcgccaagctcgccctcgtcgtcgtcgtcgtcgtcgtcaggaaatggttccaacaaggcgcctccgccggaagagtctgataattcgagcagcaatgggtcgtcgtcgtctagcccgacacctccttcgtcgcagagctccgactccgactccggaggaggctcgagttcgccgtcacaaggctcgtcctcgcctagcccgcctccgccgtcggggagctcttccgagtcgcattcgtctccaccgccggcgccgccccagtcttcttcttcttcttcttcttcttcttcgagtggtggaggttccaagtcttcgccggaggcaccgtctccgccatccgagtcatctggaaatggtggcggtggcggcggcggcggccgctcctcgccgccgccaaactggtcgccccctccgcagcagcagcagcagcaccagtccggaggctcaactccatcacctcctccgtctccgtcctctaaccagccaccgccatcgagtggctcgtcagcgtcatcgtcggaaccatctccgcctcgctcatcgccgccgccatcgccgccgcaatcaagtggcggcaataatggccaaccgcctaaaccttccggcgggcagcagcaagctcctccgcagtcacctccgtcggcggcgaaccagtcggtggtgttcattcccgtcccggtggcgtcgaacagccctcccggaatgctgccgccaccgcaggtgatcgacgccacgccctccggcgccatctcgtcgaccaacttccccggaggaagaaacagcacggcgggctcctccaacacttcattgtcacagcagcaacacacaaccgtaagctcgacggcccaggccagcagcagcggccacatagccgccgccatcgccggcgccgcggtcacgggcctcctgtgtgccatagtggccatctacctcatcgtgtcgagccggaggaagaagaagatggatgggctggtctaccactacggtatatatgcaatgcagtgcaactatatatgcaaaagcacaagaaattgtgaactatatatcgcagctaaattaacaacggtgatcggatgatcggatgcagatggcaacaactacttcgtgccatcgtctcagtttggcgggtcaagccgcaaccaccacccaccaccgtcggcgattatgctcaactccggtggggcgtcagcggacggcggcgggtactacaattcggggacattctcgggcggagaggggacagggccggcggggtccaagtcgcggttcagctacgaggagctgacggggatcaccagcaacttctcgcgggacaacgtgatcggcgagggcgggtttgggtgcgtgtacaaggggtggctaagcgacggcaagtgcgtggccgtgaagcagctcaaggccgggagcgggcagggggagcgggagttccaggcggaggtggagatcatcagccgcgtccaccaccgccacctcgtctccctcgtcggctactgcatcgccgcgcaccaccgcatgctcatctacgagttcgttcccaacggcaccctcgaacaccaccttcatggtaagtaattaattaatcaattcataacactagtacacaaactttaataggtttcagttggaaaccggcgccggtttttcagccgacacctatactcccggacataggtgccggtgttttacagccagtgtttgcactctgttcgaagttttgggaatttcagcctgcggcatgacactatttcaccactaatattttgtgaaaaaaatatatttttttgtcatttagaaaaaaaatggttaaaatttattcaaatttcaaaaaaaataaaaaattccggtgccccttgacgtaaatatgcaaaacaaaattagaaaccatgtttgcagcttacaactaattaatgtccttctatgtaggccgtggcatgccagtgatggactggccgacgaggctgcggattgccattggtgcagccaaggggctagcatacctacacgaggactgtaagtttaatgatccacattgacgctcatcgatctatcttatatgctgttacacatcacctagctaacactggaaaaaaggcgttttgttctctccttggcaagataggccacccgcggattatccaccgggacatcaagaccgccaatatcctactggactactcgtgggaagcacaggtacgcatatacagtacatcgatctccccagccagctgccatcttcaattcaaagttccatggtgtttgatgcttccatccatggtggcgcaggtggcagactttgggcttgcgaagctggcgaatgatacgcacactcacgtgtcgacgcgcatcatgggcaccttcgggtacctagcgccagagtacgcctccagcggcaagctcacggaccgctccgacgtcttctcctttggtgtcgtcctactggagctcatcaccggccgcaagccggttgaccagacgcagcccctcggagaggagagcctcgtcgaatgggtatgttttgatcgtcgaggggacgttctaccattaaaatagatataaaaaagtctcaaaaactttcacaacatttatacaatatatatatatataccactccacgaaatcttaattagatctaaacccaactcacacattgagatgtttttccctcaatgtgtaggacaaatttgaacttaatttttggtagagtgatagatgtcattatattttacattgtcaatttctttttaaaatttttataactaattgcatttagtttggaaaaaaggtacacgagagaacatcctctcgagggattagaattattttccgtatctcctcctacccccacccgccaccgcactttcgatttaaaatttgtcttttttgccttatatacaacgccatctcttctttgcaggcacgaccagtgctggcggatgcggtagagacgggtgatctcagtgagctggttgatccacggctagagggcgcatacaaccgcaatgagatgatgacgatggtggaagcagcggccgcatgtgttcgccactccgctcccaaacggccgcggatggtgcaggtgatgcgggtactagatgaggggagcatgacggaccttagcaatgggatcaaggtggggcagagccaagtgttcactggtggcagcgacgctgctgacatccagcaactccgtcgtatcgcattcgcctccgaggagttcaccggagagtttgagcagagaacaaccaactccaactctgagtcgcggccgatgaatcggataccagagtaataacgccttgtatgttttgaagtgcttagcaccggtgcaattacgtgataagggtgacaacaagaggtgagtccatatagaactgaactgaactcaaaaacacatgtaggaaattcagggttttgggtctaattttcggcagtttgtacttatgtacttcaaaacccttttgcacatggaggacattcaatcaagtgataaagatatagggaaatcagtctattaggatccataatggtttgctaagcacataccatcagcatgatgatttcttaagtttggtgacccagtaagccactggtctctcttgcacttcagatcccttctcaatggcctctttccattttactcttgcgaatgtgttgacgacataaaacctaaacaaatgtcctttgtaagcagcctattactgtggattcctctagaattgtagtaacactactattaacctacagggattccataacaagaactaacagtgaagttaatgatgacagaacaggcactaaggtatcaatgtcgattcgtaaccataaccaacagtcctaggaagtgactatcattgctaatttatatatgggataagtccatttgaccccctcaatttttaacttcgtctaaaatatacccttaaagtttaaaaccgggtattttacatccccgaactttcaataccacgcagtttacccccctgggtggtttctatcctagtttctgcaattaatcaatgggaataagactgtcacgtagccggcgagcagctcgtcaccgccggtgatgatcgcgtcatttaattgatcgatcgaaattgcatgctcccatttaattttcgatgcgttttgctgtgcaatcgcataccgctggagttgattgatcgatcgaacagcaagatgacgaagcgcgtcgcgagcagctcgtctctgccggtgatgtatgcttgacggtggaacggtttcgctatggacggtttgcatggatcaggatcggtgatgctccgggcggctgccgccgccggtacaccatgcaaggacagaaactccgtcgctgttggtgcatcgagaaggtccagcgagagcaaccgatgcgtttgcattccacacttcaccggcggctcgtcgagaacctccggccgtggttgttcgcactcgccggcagcgggcggggcggcaaagacgacgaccaccacgggccacagcggcggggccgcggaggcggcatccgcaggggcggcgtccgcaggggcgtggctctcttctttgcgctgtctgcggcattcatcggcatcaacgctcgagctgaccaacccggtggcttctggcttgggaagagagaggagggaagatgatgaatcagtttgacatgtgggatattaattattttctaatatattttgctgacttagattgacacatcagcgccacacattggcgaaaccaccatatttcaggacaagggggggggtgatttgaatggttttaagaattgagggatgtattatatccggttttgaagttaaggggtgtatttcagacaaacgctattgatacttgttaaatcaatgtcttgattaatgtttttatgatgaacaattggcatgcgagttgattacactagtttagatacgatggtggtttattggacagagtggtttttgctttgggtgtgatcgatcagacaggccaggcaaaggtggtcggattgggcaaagtagttttgctctccgaatgagactggttggactagctaggcaatggcggtcaaactaaaggttagacggcggtcggaccagctggctcgatggtctcaccggtagactccagctcggagtttgtttcaattgtctttatggataatcttgattacttcatgttaaaacttcaagctgatctttatacgtaaaatatattgttccgtgctaatgtgagtcaagttgggaaagaactcgtgcttggatatggtttctttgttagttcatgtgtaggtatttcttgaggcctcggtagtattaccaatgatggatcaggactagacttgagagaagttgaggtccagacgatcaaggagatcatgtgtgatactaagagcaatgcacatgaaggtaaagttttcatatggcatataataggaattgtgcgcatatagaaagatgagttgaatttggattggagtcgaagtttaagagaattggagtttggagttctaaagggatctgtgtatctctggtttgaggtgttttctatgtgattaggattccttattataattggattcatggttatcaacaatcaaatttgtgggtataaatagatgaggtgttgagactcaatgtaaggcaacttttgaagagaaaagttagggtttgctttgagctttcgattctagtttgtcagttaagaggagcacattggatgcacttcataaacacatcttgatacaataaagtcgatctatttttaagagcaactttgatctgtgtttttctggatctcggtagttatgctaacattaggtgggccatccatccaacggcacataggtagcctaatttgcgagcagtccaaccagtggtgagcatacagtctgactaggagtgatagggtggtcagaccagcggccaattgctggtcagaccatactccatcaggtcagagatttatttttattgcaaaaaacagattttaatttttagtgttcctaccattcattccctgataggcttagttcttgtgttcgatcctacatactcatatggaattttatagctatattttgtagttttaaaggaaacttggattcttgatttgaagaggacatttgaaggtcacacggtgatagatctcccctagtgttgttatgatctagatctccactagtgttcacagaaaaaatgttatctcttgatgattgactgtatttgggaactatggacatctttagtgaatattgtgcttaaacatctcatggtgattgtgagattgttatagtgtgcacatcttcagtgaaaactgtatttacaccttagtgagaagcttcatatttagtaggcttcttatctccaactgaagatgtatcaattcagtccaagaagcatcattattagctttcccttttttctcttctgtaatttgagtgtcatcttagcaagtatcaatgttgtcttgggacaggagtacaagaataatcattctcacaaatacattatgcatgtcatatgttgaatagtcataaaaaaatcttagtatatgaagcatgtcataaaaaaatcagctcaaccaatgcgacaccaattatatgatagtctaatgcaacttttatattgatatcaatgttaataaagtccaacatgtacattcttctcgtgaagattatattgtgttcttggtgtttgcatattgattgattccaaccaggcttagattatattgtgttcttggtattctctagtgagatcaaaacttctcgatgtagaaattgtgtatatgaaatttcaaatagatataagaaactttttccactcaaaatgatgaaatttcaaccgaatatttgaaagtttcttctcaaaatcatataactatcatcttaatattgaaagattccgctcaaagactatacattaaaactttcaacatgtggtatagaaactatataaatagaaagtttgtatatgggaacactacataagaactctgtatatcgaaacttaaacatatatgtgggctagaagtggagctggataggctttgttgagccgaggttgtgcaaagtgcatggccaaaagtgaaaagcttgctaagtcacactcgggctcttcaactcaacgtgcagatgtgacccacaatgagtatgcaagctcatatcgattagacctattcttaagtggctactctataaaagtagggctaatatattggattatgaaaataaagcgtgcagtagaatatatctaactacaacctaaaacatagctgaaaaaaatatagtagataattttaaagtacacagcttgttagcccacataagaaccaatacactataaatacatgtataactacggttgtgattaagcgggccgtgaagcccgtaatgatgtggattagggttcccgatcttccgaaatgttctgataatcaacgatttgggtggagtcacgacacaaatcgatccggcttcttgaacacgcacgctcttgagccccgcaatcgcagcaccatgtctcttctagttatcacccgtaccaaaacgcagatgaccttgccgacaaggctaatccctatttgcgaatcaaagaacacaaacaagaataaggtagaatacaaccaaaattgcagatgaatgattaagctcaagagttggggtcttacaaaccgatctagcggcgaaactattctagatagaataatctaagcaaaacccaaaccctaaagatgatggcgggtactgatatatagagtttagggtcatgcaaccaacccttgatgcagccctaatggcctccaacacgatacatggcccaaaggcccaaatacggtgacgcaacaccgggacagattctggacgtcaacttattcggtcgattcccgttgactcgaaaagaatttggacatgggaataaaagcattagaatcttagctttccatccatataaagatcgccccaatccgagcacgtatgcgacctgggcacccgttttagtgtagactggtcctgaactccgagttgcactcgaagtcgatttggtttggacctctaccttgacttggacgtcctcgatgatcctccatgactctaagtccttctccaagtgtctccttgtcccctccattgtttctaatcacaatataatcattaggtagcaatctattctaaaattcgtacaaagaagaacatagaaacgagctcacctctaaattcaattgtcgcgcacgagctcttgttatcggtccttgaatgaccgttggaggattgttgtgtgtatccgaaggagtgatgttcacatcacgtaagcacaccatgttacaccctttgataatttaacccttttcatggcattttagatcctctacagttgcatctagctattgcaaagattgtgttaacagtgaaatttggtaagctccgaagtcatcatcggcctaaagtcagtatcggctttagagtcctggaatcggccgataggaattatcaagttgccaatagtcagattcttgctatattcggttaaggaaattaatctattcaaggaagcttatccagaagagaccaagttcaaggaggatgcagcatggtaagttatctattaattaaaaagactctgttagtttccttttatctttaggaaagtgtgtttagtgtccgataaggactttatgttttccttttatctttaggaatgtttctttcttgtcctacaaagactagtatctacccatgggtataagtatgtacattccgtggtcattgtaaactatctcacagatcaatacaattcggtgcatcaccacctgttaacggccaaatttggtaaatcatacatcggattcaaagttaaaatcgaagcggattttgagagagtttgtttctcagaagcagagtgcgcatcggctactggcagcatcggctattgtctgcatcagctgatactggatcggatagggagaagccgttgtagccgatcccaggaagatggttctagaatcattgatgggatcaattgaggcgctgcacaagcattgccacgtatggattgagtccaaagaaggcaactgtatctattaattaggatatttctagttaatttctttagagatattttcggtaagagtccgcctaagggacttgttcgtattttaagttgtaatagagatagagtcgtgtctggcgaggacatattatgtatttcgggtataaatatgacccaagaccttgtaaacaaacaacatcagttcaataatactttcagcgcatcgccaacctttttctactttcgttgttttcgacgagttcttgcttttgagtggagctgcatcggtttcgatctccggcgaagaggtaaaacttgttatggtggtttgcattctcgggactagtgcttacatcttcatgatactctagtcctgcttatgtgaatcgccgagttatcatatatgttgtataatctagatcggtcccgctgcttaatcttatcagctagcctctatcatcgaaaatagctaacaaggttaaacattaatggctgagttagattatacagtatatctaccatcttgaaaaggctatcatcagttggtttagatcttatgtttccatctgcgcttaatgctgcatcggttaagtctgacctattaagtaatacttagaaccataatatctagctcgccttatgattgccaatagagatagcgtcggagtttcagccaatcttacctggtttagttatcctgctccttttacgtttgcttgatatactaaatctgccctttatattaagatctcacttgtttgagatatactaagcttgccatcagtctgttaggttatctcgatcttagattgatccctgttcagtatgttccatctatatcgatgtctcagtataaagtggtatcggagtactagccgatacaagtcagatctatcttatcggctattctatgaatgtacatgatccttgcttcgaagtatttttggatccaagtggtttatactatctcggcgtgctgtccgatctatcccaatcatttggtttaaacgtatttcgaagtatcgattatgtattattgatatctacagccgatcaggtacatttaaccgtttctgcaatctatctttcgttgcggatctaatgcatgttacattggcttaatactgaacgatacgtcatcggcaatctagccgatcggctgtcgtttgtggatttaactttgtttccttttttggtttcttgttggttgtaggatcaaaccaactggcacgctcagaactcgaaagcaattctttggacctgcactagagtaaagcaaatctctgatgccagtgtgtgtttttcgcatcaacaccaccttttacctttctacttgatttcgacgagtttatgcttgtcatggctgcgtgcaacgttggggctagggcttcgacactaatcttttcaatgtaagcacctatctatcatatatcttagttaatctagtttggtatttgaatttacttgtatcggctgagattcgttttagggtttatgccggtatcggctaaattgctttaccagattagattagctaaggcatccaccactcttagaatcagtcaaaggcttgattggttagactttatgtttctttgcatactttgagttgcatcgatcttagtcgtgcttagaaccataaaaactaacctgtctttaattgtcgataagagtttcatcggggtttcagccgatgagttatctggatgttgtatccgcttacaaggattgcatacaagttggatttagccgatcgcaacaaaggcttcactgtttatctagtcatgtggattttatggtatcggccttctagccgatgtacgcattaaacttcgaatcagtgcttattctacacatcattattagccgattggtttctactggattatattgttattttattacatcatcatcatcaatcgattgtctttctatcattatctatattggacatataaccgatacctcaaaatcccatcgctatcggttggcatcggcatcggcattggttggaattactctatcggcttgtcagccgattgactcgttgatctgctatttgtatatcttattagttataggatcaaactgactggcatgcccgcatctcatcaacctttggacctacactagagctaagcagatcttccaggctgttgtgttcgtcgacttagttcgcgccaacgcagacctgacaccatcagccgagcacggatttctcgtcaacagattgtcaataagatacatgcaccgcatgagacacattgtattactgaatctggacaggggaagtgtcttatccagtactaggttactatataatgagatggatggagtactattttgcaccattagatataacactgttcactccattaaagcaacctacactactgtaccttcaatactcctttatagtgttcggaaaaaaagctgtcacccatgggtaagagcatctccaataacctactcaacccaaactctctattttcttatttggcaagttgacaaaaagatttctctctatatttcatatgtactccaatagcctttccatctacactcctcttttttgcggggactttccatctacactctgcattgtgaatctataagagtatgattatatgacccatatgtcagtctctaactcttctttttctcccgttcaccttcctcccaaccactgcttccaatcctcctcctcaagctctccactatccaccggtggcaacagtagtggtgaggggagaagctgacgacggtggcatgcaacaagaggggaagagtccggcggcggtgctggcaacatcacctcggcgatagcggcatcaacaccccagtgagatggagccaaaggtggggatagaggtgcagggaggatgcggaggatgggggtcaacagacggtgggctcacatggtgggaaggtagaggcatgatggctggtgaaggcatgctctcgtgtggtggaggatgcagcggagtggcttgagagggatgagggcgtggagagagaaggtggggtggtgggatacatgttggcaagtggtttcaacattctacatttggttagtcaagttagaatttcagcaagccatttggcttagcatttagcaagtttgtcggaggctccttttcccgcaagtttgccaaatttttgtttggagattgaaatggagagactattggagatactctgtccaatctgaagatcgtttttgacagcttcactctgtctccattgatcgatcccacattacagttgcaccgcatccatgccacgcacacgaaggtggcaccttctcctctcttcggtcctccagccctccacacaggtgtaacactataatatttagcttactctagaacaatattaaaacacataaaactcatcaacatgattaaaacaaagataagtagcttaattatgaaatacaatataattaaattttagagtaaaatgcattgctggtaccacaacttgcaaggtgagtgcaatttagtcacccatcttgtaaattgctcaaataagttactcaatttgtttggggtgcaaatataataaaaatgtgctagcatattatttttgccaaggtggacgatacaatggcagacatgacgatgagttggcgaaagtaatgcagttttgtagaaaaacccttctactatattactctttggcgatgagtttggcgaaagtaatacagatctaattggcctatttagatctgttatgcccgtgtgctaagccatgatcgtaggtttttgttggcatgcacatgggacaggacggcgccagatatagagagtcatggccctaaatcacgtattgaagatgtggggtatcaaacaaacctatgtactcaaacggaaaattgaaacaatataagggctactttgcattttgttccttgcatacaaggtcaacctgtcatgctgacgtggcgtccaccttggcataaataatacacatggcaccttttcatctagatttgcacctcaaaacaagttgagtgacttatttgagaaatttacaaaatatgtgactaaattgcacccactctacaaattgtggtacctgtgacgcattttactctaaattttaatttaaaaaccataataaaagttacacataaatctaaatggttacatgataattttatataaattacatagtaactttcaaaaaattacagtgtaattatattaatgtaatttttattttggctacattagcaacaacatctcttgcctagttggtagagacctaccagtcaatagaaagttccagaatcaactcttatctttccttaccaaaacagttccaaatatgtagactcatgtacatagatttaacctattctttggcctattttaattggaaaagttcatcggtgcatatgcgcctgtggtgtgcactctatgctacttgctcacaaagcctacaggtgctatggttgtgtatgaccacaagtgcagcttcatgtgtatagcatattggcggtcatacatatctttagatttagaaaaaaaaagagagtaatcattccataaaaaatttaaaactttgaactcataatttgaaaaaaatcatccaaatttttaaaaatttaactcattttaaaactttcaactccaaatataaaactttcaactctaaattttaaaactatcaactcaagattttgaaactttcaactcaaaatttgaaactttcaactcatatttaaatatttcaactcattttttttaaaaaaatataccaacttttcaatactcaactcaaagttttaaactttcgatctttgaagtccaaatttaaactttcaactaaattttaaaaacttttagctacatctttttttacgtactaaaaaaatcacactaagtgctataattagaggaaaaaagcgtgtggatgcatgggatgcgtggccgcacgactttatgcagccggcgcacacatacccactaggtgccttcctttttaatatgctaagccaagtattatctaatagttatgggttttagatggtaatgtgtcaaagtccatgggttttttaacaaccgtacataaccctcgtatatatttaggataaaattataaaagttcggtcaatcatattttatcaaatttggggattgtcgaacacatctgttagtaaaataagtcgaatttacacggtaatagagttgaatgatagtaatgcttaattaaccttgattaaccattaatttgtacaacatttaaaactttttattacccatttactgcatacaactacatgctcatttacacggtataattacactatagttatagttatgtcgtagttacacaatgtaagtaggatgtgactatatatatagtgtaattaaggtgtatatacactgatttgtttgtttcccttccttgcttcctatgaatcatccggttaattcactgcattgggtagtgagagtagtaacatccaatagtagcaaaagctcgttgagcttatgcacaaccatacgtatggtttcaatttaatgagttgttctaactagcccgcatcctgccctgatcttgcacaaatctcgaaggatgaaatgactgaaaaatcgactgtaataatgtcaaaaatctatcgatatgattttatctaaaccaccttttagcggttaatttgatctgtgccattgtaaatgtgtttatttatgtcgagacaagatttcggcaatactaaaaggggtggctatcaagctggaaaagtggatgggtttagagacaaggaattttatacaggttcaggccttcttaataagaagtaataccctactcctatccagggattgatccaccgagtatattattgatcgtatgatctgagagaaaaatcgtgccccaagaggcacccagacccttccttatataggggaaggagtccgtattacaaagtacagcccatattcctaacggaataggcagttatagataagatacagtcataaccgactgaaatcccgggtgcttccttaatatacaagtttaaggaatttaacccgaaaccctttaaagatattctatctatacatggtacccctatacccagtcggatataaatgccgtgtggatatgtggtatccataatctccacagtagcccctaagacctttacagtcgacgaaatagtcttttctcgtaatccaaaacgacaaaacgataatccgagtgcttcaacttctcctgccttggtctcccgagtacttaaatcaaagactgtgaagggttgaaaattaaaaatcaggtgcatcgactagatgcacctaattaggtgtagcccccaactatgtgattagttgaataaaaactaaacatatagtcaaggtacattaaacatccatccgagtgatcttataaccgaatcactttagggattatatacttaagctcatgcagcacttgataaaatatccaaccgactgctttagccataatacgcccaaaaaggcataaagagatccgagtgaaaagcactccaaagatctataaatcaacatatatgacaagaatccgagtaaaaaactcttaaaggattcatcaactgttgtataaagaataacaaatgacaagtcaaaatagcctaagctgcgacttatgtcaatatcaaaataagcatataacatgctgagagaatagccatctgaaattaaccatctcaacaaaacccaagtagctttgcaacctaaaaaggtcaacaaaattagtattacacttttctgtcgggcacctttttatttcgcatcgtagtaattccaaagaattatctagctgcatcaaaaaggattttaacggtattgggctatcctgttgtgagcaatttataccaaggcaaaaatatatgcttaaatccctaaggaacacaaccagccacgccaatagtgaagttgggctgaaagcactgtgcaggcctaggcccattagtacctcccgataccctaacaaaaaacactgaacaagcgtcgcttcgtcttcgccgccgagacctccgccactttccccattctgtgctatagtacaagaactgcgccggtgaaaactagggtttgcaaatcctcaccaatccaccttcccaaagcctcgtgtttttgcgaagatctcccgcacaactaccgcatcgattccctctccaatcactaccaccctcacgctagatttcatcatccatcttgcatccatggcggaggagagagaaagctttgagagtcaatgggctccttccgatgtcacggaagaaaacttaacggaaatggtggtgcacgacgtttcggctggcatccagcattcggcgaagcattcccgacccccgacacacgaggtcgttgtattctcccacttcttctatggtggcttttctcttccaacttcgaagttctttagggggattctggaattttatggaatcagcttgcatcatttgaacccaaattccatagttcatattgccaactttatccatgcctgcgaggcttttctgggaattaggccgcattttgctttattccgccgttttttcttcctgaagccccagccaaacaagagcaagccgtgcgttgttgggggagccagtttttagttaaggggcaccctgagccaaaaatatttctccgtgcctttcaaaacatcaaacaagggctggcacgcaaactggttctatgtacagaatcctgaaccagcacttcccaagtactcctgccttctccagtatatcaagacacctagaattcgcttccaatgggagacgaggcttctcaaccacttatcatgttggaacgcatgctaaaactcaaagagcaaggtctacaagggaacaaatcactctgcactttatcaagagccgactggcacctattaaagagagatcccgcactgccttcgagttcgatggcaagaatgaccctaaccgtgaagatccaaagtctcttgagttcaagattatgaaggagaggatgtacaaaatcttctcaaacggtattgtggttagctattcacacctactgctagtggtgccatataatgccttcaaccctcctctaccggtatgtatcaaatatttcggccttccttatgacatccttttgtcttttgtactattggttgaaaacttgaaatatcatgcataggaattttctttgatgaaatctgatcctccaatcgctcaacgccgctcgccccgccgacaagctggtcaggccagtggcgggccaaaaatccagtctgctgctcagccaagcatctcaaagctaactaaccagtcgggctctcggaaaaggaaattagttctgagtgacgacgaaggtgacaatgttgggaaagctagcagcaaagaggtgattggaaaacagctaagataggctatcccgaagaagagaacatctagtcgtccaataccaaaattcagaaaatcgaccaggtatgaatcagcttgccatttctcatgtgttgtcttgacatgcatcatcaatataacacatctcgaatcctcaggataccatcagacattgatccatctggaaaagaccctgagtcgaccgacaaggagactggttctgcgactgccagggaaaccgagccgactgaagaaaaccgctcaaccggcagttagttgttgaccgacaatgtagaagctgggaacaagcccccgactggaaatcagtcggcagaagctgaaattgacgctcaccaagagcccctgactggagaccagccggaggttgaaccacataaagacatcccagagatagaggaacaaacaaacaaccctccctttaacaacaccaatgctggtccagaggtcagtacttttgacaaagtacaagggccagctcgccctcctctaaaggttataacaggtaactgagcctctgaatccatttatattgaaaaagttctcttcaatcgctttatcactcttttcgtaaatgcataggcccaataattggcgacgaagaagaaattcttcggatacggtgggatgacgaaatgcagccgcaaggaattgtaataaataagcagaaagatgacaaagaagtgtctctactcacaaagacacttaatcaagccactcgtcttgtgaatgtacgtcttctgcttatagcttgactcatcctgttggtcagtcctgtgaactgaataaacttgtaatgcagagaattcatattaggaatgaagcaaagactgcaacccttgaaaaactggtcccacatcttggaaccctggaagcaaccagaacccaactccacgaaaccagggagcttgccaggaagactgaacatgatctcagggaccggattgccgagcttcaagattccaatttcgagctaagtggttcatctaaaggtaacccctattcctgaataacttattccaagctatcatccgtgttcgaccaaccgctgggatgtattgcagtacaagctgccaagatcaccgagctagaaaagcgaatcaaagttctggaaaagataagggtgaactaaccaaacaaagggactcagctctgaaagatgttgaaggtaatcgcagttcaagtctcaaaattaatcatgttttcgcttctaggtgttgatataacccttttatgcatatcgcaagattaaatctcaagctcaattcgaagtgttggtcaacaagatcaagaaacttgaaggagctagggacgaagtcaccaatgctgcttgtcggaggtagaactcctccatcagggaaccgtgaggcccccctttgtgagttcggccgagggcagcgggtgagattcgagggcttggtgagcgaagctgtgtgatcttgagggggttcaatcccgcaaagacgatgagacaaaaggggtttatccaagttcgggccgctgagaagcgtaataccctactactgtgtttgggattatgcttgagtgttacaagggttcctaatctccggagagcactctcgctgttcttctcctagagttcaggcctactgagtgtcgtcccttttctcggtgggcaaggtcctccttttatagttcaaggggataccacataggcccaacaacctaacttcctcgagaagtattaccatctttgcattaaatgcatgtcttgttccttaacttggaagccgcatacacgtcgcctcggtcgtggggcctaccacaccatgccgcctgacacggggggcgcccatgtcattcaccatttaatggatgaagacttctgggctcctattacaccgggaaacgggagcctagctttgaccagagcgggaggaccgactccggctgggataagacgatgagaacctctcaccatcattatttgatgggacatgtcaggctgcacgccgcctgacacacgagcagcgcacaggcgcactacccagtcccatcggtcattcgaccggtcacagaccggttgagtacaccgcacgccgcattaaatgcagcatggcgcgaccgctcgggtcgccataaatgcgagtaggtgggcacctgtaggcggacacctaacccaccgtacgtggcgacctagagagggggtcgggggagcccgacccctagtcacaggagggggcggtcgccgcctgacctcgggcccgttcccccctcgggggagggctacatggcattggggggcagcctcctccgtccaatctctgggagagaatggccgccaccctacctcgggcccgacccccctcgggggagggccacattgcgttggggggcagcctcctccaactagtctttgggaaggagtggccaccaccctacctcgggcctcactaccctcggggagggccacgtggaattggggggcagcctcctccgactagtctttgggaaggagtggccgccaccccacctcgggcctcactcccctcgggggagggccatatggaatttgggggcagcctcctccaactagttattgggagggagtggccgccaccccacctttgggggcagcctcctccctctaaacacgatacccccgggcccatatcaccgacagtagcccccggcgttagccctggccaaaacctttcctaggtggtcagggttgatgccaatctgctagtcagttgacatgtgggcccgatcttctgtcctattattctaggagttgggcggtgggagtttagtcacgttcatacgtcgccttaacttcccactttcctcccggtctccgaggcgctgcaggcttgggagtttagcccgtaccttaggccgtgaacttatttcctgtatatactcagcaaatgttgttagattctctcgagcccgcgacctcgtgcggcgtacctcgcttgcccctgctttttgttaacctctgtttgcgttttacttcatctatccaaacgattattttcacatgagggtgaggactgaactttccatagccagcaacctttacccacgatcaagccaggctgggcgccatagccagccggcggggccaaagatagctgctacggaagagccagcacagggggccccgggcgtcgacggcgaccagagctcgacgcagagctaggatagagcttggaattgtagcccccacacctttagcaaagaatcgtttgaatggatgaagcgaatacaaactttttgttaccaagggaggcaagccagcgcgcgacacgtgggtaccgtgggaccgcgagtaagagatgggtgagagataaatataagccataataattttgctgataagcatggacaaagtggatataaacttaaaggaagtattacaaatgctatgctcaaaaagatcatccggccaacgctgagctttcccagagaggtcggctttggtccgggtattgtaatacctcctttgttacctttgtttatccttgtttggatgtcgcaacctttcaaatctttggctcgaagaggacctcccaccatgggtacctaaccattttgggaagcctgcgaccacttagcaaacgaggtgaggtttccacgagcctgtgtccccatgctacacattctgtttgctctttcctttcggtggcctccttccaatatctctcccttctacacggacaactactttcgcacgagtgtgagagccgaaaaactctagagccagcgatccccgtccatagttgagccaggctgggcactgtagccagccggcgggaccaaagctagctgctacggaagagccagcacagggggtcccgggcttcgacggcacccgacgctcaacttaaggctggaatagggctagaaaacttagcccccacacttagcgaggaaacgttcatgtagatgggagagaggttgggatcttaccaccattggagcaaacaaatgcgtaacacgcgagcgtcgcagggtcatgagaaaagaacgggggaaaaataaatatgagacttcaagctgtattaagctgatgaattgaaaaatttaaaatacttgaagcttgaaaggacgattagttgagccaggctaggcaccgtagccagccggcgggaccaaagctagccgctacggaagagccagcacagggggtcccgggcttcgacggcacccgacgctcaacttaaggctggaatagggctagaaaacttagcccccacacttagcgaggaaacgttcatgtagatgggagagaggttgggatcttaccaccaagggagcaaacaaatgcgtaacacgcgagcgtcgcaaggtcatgagaaaagaacgggggaaaaataaatatgagacttcaagctgtattaagctgatgaattgaaaaatttaaaatacttgaagcttgaaaggacgattagttgagccgggctaggcaccgtagccagccggcgggaccaaagctagccgctacggaagagccagcacagggggtcccgggcttcgacggcacccggagctcaactgcaagagtcctcctaggagtagaccgaggcaggtggcaggttcataagcgatccccgcgcttggccctggatggccatggggaagaaattcgccttgacccggtcgtcaccccacgccacctctatgatcgtcgtgtggatctggagggactcggaggggttgacactaccgtggtacctttcggtgaggctgggccgaaactttgggggtcatcggacattccaaagactcgccataaagacctggccaccagccttacccggtgaagatgcagggagactagcccctgcctggggtgcgcggctctcttgaggaggctgcgccttcccccacattggcggtgcgacgcacgtcacgccggcactcgaaagaacctcaaaaattacgaacgcgcccctacctgtcgcgccagatgtcggagaataatctcctccatcggggaaccgtgaggcccccctttgtcagttcagccgggggcagcgggtgagattcgagggcttggtgagcgaagctgtgtgatcttgatagggttcaatcccgcaaagacgatgagacaaaaggggtttatccaggttcgggccgctgagaagcgtaataccctactactgtgtttgggattatggttgagtgttacaagggttcctaaactccggagagcactctcgctcttcttctcctagagttcaggcctactgagtgtcgtcccttttctcggtgggcaaggtcctccttttatagttctaggggataccacataggcccaacaacctaacttcctcgagaagtattaccatctttgcattaaatgcatgtcttgttccttaacttggaagccacatacacgtcgcctcggtcgtcgggcctaccacaccatgccgcctgacacggggggcgcccatgtcattcaccatttaatgggtgaagactcctgggctcctattacaccgggaaacgggagcctagctttgaccagagcgggaggaccgactccggctgggataagacgatgagaacctctcaccatcattatttgatgggacatgtcaggctgcacgccgcctgacacacgagcagcgcacaggcgcactacccagtcccatcggtcattcgaccgatcacagaccggttgagtacaccgcacgccacattaaatgcggcatggcgcgaccgctcgggtcgccataaatgcgagtaggtgggcacctgtaggcggacacctaacccaccgtacgtggtgacttaaagagggggtcgggggagcccgacccctagtcacaggagggggcggtcgccgcctgacctcgggcccgttcccccgtcgggggagggctacatggcattggggggcagcctcctccgttcaatttttgggagagagtggccgccaccctaccttgggcggaccccctttgggggagggccacatggggttggggggcagcctcctccaaatagtttttgggaaggagtggccaccatcccccctcgggcctcactcccctcgggggagggccatgtggaattggggggcaagctggaaaaaattaccatttggtccctttttgcaaatttattttccaaatggacccttgaaa

SEQ ID NO: 5656 - DNA, 30913 bp, Oryza sativa
tttgtgactggtctgacaccggtcacgtcatcggcagacaaccgtgctctcacgttgcatctgcttccggcggagtggaggcgagtgacggcgctgggcctcactcaaggacaagctgtgatttagcttccaggcgaaggcgcgagccaagttttggtcaagatagggtgggtccccacccaaaagaagagtaggtagaagtggtgcatgtggtatccccttgagatataaaaggaggaccttgcccacgggaactctgagagagggggactctcagacgactctgggaatacctgagctcgtagaggagagaaaggggaagaggggttctagagcctgaactctcttgctctccggctctctgtaacttcttcacacacagatccaccagaacacaggagtagggtattacgcttctcagcggcccgaacctgtctacatcgcccgtgtcttgtgcatttgctctctcgcgaacattccacagatcgagggtgaagaacctcacttagcgcccccggctgaaccggcaaaggggggcctgcgcggtctcccggtgaggagccccacgctccatcacatcacatcgaatctttggacacatacatgaagcattagatgtagataaatgaaaaaactaattacatagttagggaggaaatcgcgagacgaatcttttgagtctaattagtccatgattagctataagtgctacagtaacccacatgtgctaatgacgggttaattaggctcaaaagattcgtctcgcggtttcaaggcgagttatgaaattagttttttcattcgtgtccgaaaaccctttccgacatccgatcaaacgtccgatgtgacacccaaaaatgttcatttcctcaactaaacacaccctgactaaaaagacgggggctattatcgataaatctctgcccttattaaattaacataatatttataagcatcaatatttaaacctggtggatagagtatatactcacaacttcgctaccacaccattaatgtaaattttcagtaatacagtattagccaagtattgaatgtgggaattttgagctttataggtcaggtggtggcatccagtctggatttttcacaatttaattcttttaaaaaacttatttcgcaaatagatctatgaaaaaatttatcccaaaaatatagtcctttttgggcgctagagaagctggcgccgtcctcctaccaccgtggcggggcgacgctaaggtggcagggggagcgcaccaatgtggccgacgccccccccccccccccccacctcccccaagtgtagagagatgtgcaactttatatatatatatatatatatatatatatatatatatatatatatatataagaaccaaccgtagaaaaattaaactcaaatggacaaaatatgtgacttgtagaattttccaaagctataccgaaaagcccccctgttggtatttcttaacgatattactagaaatataattcccagcaatggcgcagaaatactcctggtatattatggttacggagtttatccacaagtacacggatataccattgtagcatttaacccgagagtattccaagagtatcatatttgtttaatcccgtgggaagattataatagagagaaccgtactaataatttatatattacttgtaataaccatagtctaagtaggggttagtataatccaaagggtagggtgacacgcaagcatagaactactcattctcatattaaattatctaagctaagtggaaagaaaatagaaaagaatctatttctatacttctagtatacatactgtacatacattctagtcatatgattaacaaactaataccctctatccgatgccctcctgatacttcaagaagccacccctagctgccgagttccttacgacagctcgtcatgaccatacaaccggggctaaatacggaggagtaccctccccaggaaattaacttaggactatatacacgcgcagaggaatagacgtactgagctgtcaccatcagcggcctacctctcatccacagcacgcctaaactaccagatactactttaataacatcgtcatgacatagagtaattgcataagcaaatattatacctgtacctatgcatatcctagataagttagcagtataatcagtataacatgaacataaaataaagttggcattcatatactcaatatactcagaaagtatttcaataccagaattgtataaagaaaaatattctaaataaagtacaaatcttacaaaagagaaaaggagagctactagagccatacccgaactcttccgaagacttccggactccgatttctattctattcctactccactagcttgagactactaaactaaacttgagagaatatgagatagctgttgcttgaagtgtgtgaagaaatgaagagagtgagctccttaaataggcaggtaatgatggttatggcggttagaaaggtcggtaataccttccaaccgcctgtcacgcccagaaatttaggccaaatttccagactatttttgtgtataaaatccctatccaggactagctaaggtacacaaaatgacaagtaataaacagttccaaacgtaaataaagcgtaaaaatacttacagaagaggcacttagtcctcacaccgaaagagaacgacagcagcagaaaaaggcgatcctagcggggcttcagctccactccacaggcaaaactcaactggggtctgagccttggtcttctaacttcgtcttcagctcagaagcactacacttctaaaaagggggaaataatagcaaggctgagtacaaccaccgtactcagcaagccacaccaacgatgcaggcgtgcaaggggatataaggatggcttgtggctatttgcataaaggcgattgtaaaacattttattgagcaaaacggtaaaactgttgagtaattaaagtaatattaaatctccactgatcaacgctacaccacgttgaacaggcccaaccaacccacctgaactacagtgcattgggtcgatttattaagtatgagactaatcacggtgattctggtcgatcgcccataaccgcgggcacggctattcgaatagttttactctggccagaggtgcacaactatacccacaagacacaatccaccagcatgtcaccgtgcccggccagacacgtcaccatgtcgagtgattgtgacaagacccttcatataacccgctctgaccaagcacaccacaccttaagtttcatccccgcccctagcaggcagcgggcagtcccctctcgtgcctaggtgaatccggaagcaacagaggtcgtcgcagggaccgccccgctccatcacgcccacccttgcctggatgcgtcagccagagaaaagctatacttcaagtcaggcagttacctattcccgcttgtggcaagcgctgtatgtcttccagtgcatcccgcgaactggtccttaattgccatgggtgcgaccagcaaaaccatgcacccacagcccaccattcagtcacgttttagttggatacttacgaccaatgaaacatggtcgggtgtctcgagcacgcagctcgtcatgatactaacaggtctaatactgcaattatcccatcaactgagctagtggtaattaagcatggctaagcatatggttctagctgtgtcacataagtaacatgagctagtcgatttatcacccaaggttgacaaagagcagatatcagtaaacatggcgcaagcaagcagataggtaaactctgatcccatgtaattagcaaaacatgcatatttatttgcaaatggtaaaatatttgcaaattggaatcaacatgctcaaggggaatgtgtgacttgccttgcttcttcacttggatcttctgaactcttttcctcgcgactgcgaacttccgaaacgacgtattctacacgctggcacgcaaaacgagaaaaaactcaaataaaaaccaaggaaacaatacataaaaagtaaacaaacatgtagagctcaattttagatgaattttgcaagttgaacggctcaatttggagttcgaatgaattagatatgaattttagcagttttgagccatttaaatgaatttctagaattaaatacgatttatgacgcaattattaattatttttccaaaggaaaaagggttgctgacgtcatcaagggggaagggcggtgccggcaagcgggccccaccggtcagcggcacaagggcgtcggtccatcgtggaccgggaccaccgaggcggtccaccgccggtccacgggaaccgacggcccagattggcccgagccgatcggatggccacgggcggtgctgctggggcatggcatggctcaaagccggccgatcgagtgatggcgatgggtggcgcgcggtggagcagccagcggcggcgcacggcacgggggaggccagcgaagggggaaggaggaaaaagggagggggagtgctcaccgagcgacacggcggaagcatgcggccggcggcgaggaacggcgacggcggggctccccgggaggacagcgtgatggagctctggcgacgggtgtcgcttgggaaaggggtggacaggcttggcctcgatttgaggaagatgaaggaggggttaggaaagtgaggatggttgcgaggtgaccggaaacgacggccgaccgtgacaatatgaggaagacctcaccggcgaccgagggaggtggagctccggcggatttccggcgaagagaagcagcggccgaggacctcctcgtccttgcggagccgagggagacgacgacgtagcgcgggacggacgagagcggcggcgattggcggccgaaggcggcaatggcgacggtggctcgggttcaccgtggagagggcagctcgggggtggaatgggggagcggcgtggtggccaggcttgctcgcggggcggcgaagccgactgtggtggtggcagggcgcgggagcggctcaggcggcgacagcgtgcggctggaggtggtgaaagaggcggcggcctcgggtgtgcggtgggagttgtgctccggtgatgaaatggggaaacggagcgggggctgaggtgcggcaccgtgcggcggagcctacggcggtggctacgcggcgcagcgaccactagggcggcagtggcgggcggccgaaggttgccggcgagcggcggcgatggggtgcggcggtgtcgcggtggtttccgggcacgggagggctcgggagagaggggaaaagagagaaggaggtgcggggatcgttttatagagctcgggaggggaagatcgtggccgtggtgggcggtagaggccggcgacgtggagcggcatcatggcgggtgtggcggctcggcgtggcgccggttcccgcagggagagaggggagtggggcgggatgtgggcgcgaggtggacgggactcgagtccacgccggttaggacgaggggaggcgcgggatcggcggagggagtgggcagtatggtcggcggttggagccggcctgaggttggggatgacaggtgggcccatgggtcccacctgtcggggagagagggagggggaaacgggctagggaggtaatgttgacttgagggagagagagagagagagccgagcggggccgagcggcccaagaggagaggggaggagggcggccaggcccgagcggaagggaggaaggagagggttgggccgaaagcggcccaaagaggaaggggagattttattttgcttttctttttattttaattggttaaatgatctctgtgactttcaaattatttcttgagctccgaaaattcacggaaaaatccggagagtatttgaaggcacaaagaatattaaaaattattcccggccaatgatatttaaaaggaaatttttaattccctcaataattcacttgatgaaattgatttaacttttattaaatttctagaaaatacattatttaatgatttttaatcccgaccgaaaatcggggcgttacaatagggaggcaatgcacaccgtccagaagaagtccggcatccaacggcaccgaagaggattcggccgaaccatgggctgggcctccctggcccattttcggcaggtggcctcctcttttgctctactctgcagacttgtgaattttggcccaattcgacgtgtcatttctaagttcttggcccattcatacataagtctgattctcgatatcgtccgattgattgatcatttggtttgatgtcgattctcctccactttatggttattctctgcaaaaggttagtaatcctaatactagtggaatattattattctaacttaaatatgcattgcaagtataactagttctcctctattttggtaatattggcggtcgaaacttgatcgctaacgacagtcaacaccccccctccccccccccccccggcacgcgctctctccctgctctttgttgttttggtttttatttgacctccccgactgcagctccatcttgtctggtagcatcaaattcaaaagtatggggaaaacgcacgatgatcgcagcgaaggaaacatatgcgcccgtgagcactaatcctccatgattctctctcctcctttccgtcgttgggcggggcaactttatttctgcatcctctacttctcgatggtatcactacaagcagcttcagccatagctggatgactttctaggttttgtacccatgccttctgggcaggtaaaaagcaccagatagcttggagttccaacctaccatatcctttttgttaggagtttttaatctttcaatgagagggggataacttctatttggggaaggagtgacgttggcagtctgactacaactaccacatggggtgttgcaccttatcaaccaatacaccaactccagttttttgttgttcttgctgtgccaagaacaatattaaacctgcaattaatcgaagaacaagtaagaacaagttgataagaaaacagttcacatcccctgccaatgatgaaaccgatacacacaaagttggggttttgaatgaagtatctgggtgatctagccagcaaacacaattacagtgaagtagctgaagctaaatctgtatctagacaaaacgcaggttgcaaaaagaggctactaggggtttttataagaggaaaaacgacgaggcggggtggtgggagcaaaccctagcctttggggtggtgcgagcaaaccctatcctttgtggacccctgatgggctctactgaagacaaggcccaagcccaagtttctggtccaaacattgtttctattattctaggcagctccactcaaatttgatagtgaggctaggctcatttcaaagtagtcgacgatatctttacaatgagtactcatgaggtccaaacgaagctcgtatgtaaatttggtggccgttttaaaacacttaggacgatatatttttttcacacttaggagcacacaaaaaccaatcatagaaaaaataaactcaaatggacgaaatatgtgacatgtagaattttccaaagctctaccgagaagctttttgccttgaaaatacaatcttgcaagcagaatttagaggttctaatttcgctgaacccgacaaagcgggggagaattggatgtaactttttctgtagatgtccgtggatatattatttgcttgattccaagtttgtatgaaaaaattacgcctgttttaagaaatgacacccaaatgtaaaaaaaaagaacacaaaccctaacttttttttttggtttataggatgtaaaaggtataaaaaaaaggctaaagagtgttcgaaacctgatctactttttttttttgggaggtgggggggggggagaggggactatataagggctcacacatgcttacccccgctcgaacataaaccaatgtgggtggtaggagcgaaacgtggctagccttgctgcgtatgtgtcgaaacatgatttcggcaataataaaagggggtggcgctcgagacctaaaagtggatggatgcggagacaaaggatttagacaggttcaggccctctcaatgagaggtaataccctactcctgtttggggatttgaatccgccgagtgtgtattgatctgacgatcaggttgtctcatatatatgccccctagagggcctcctgcccaccttatataggatggggggcaggattacaagatagaaaccttaaccaatacggtatcggtttcctaaatcaggactctaggccgttccgtaatatacaaggaaacgtaacacccaagtcatgatctgttacatattacatagatataagttatcccctataactagtcggataaccatgccgtgtgggtatggggtacccataatctccacagtatgcctactctttagtccatgggattttttgcctagcaagttagtgttggaaaaaaataagagtttacatatggaatttttatacacggcaattttatgtcatagaaatgaaactttcgatatataatctttgaacaaattaatttgtagcgaataaaaaaagaagaaaaaaaatctatagataagtttataaaaataaaacttgtatgtagaaacttttgatacatatgtaaaaatttgtactttgtgtaaaacttttggtatataaactctatgcaaaagcagattaaaaaaaacatttgtctacaaattttcacctaaaaatttgacagatgtaattatagtacaatcgtagtgtaattacactataacttgtatgtaaatacactgtaacatgtaactacagtgtaacttgtatgtaagtttcacgtaattttgaatcattagatctaatacaagatttgttctagtgaggaagaaaaaaatcacagcacacacatgtgtgaaaggatttgttcccacgacctccattttaccgaaatagcatgttatggagagatttttaaaagttatatacaagttactgtgtaagtataattgcatctgagaaaaaaaattatcgacaaatatatagcaaaattgaaaagagaaggagaaaagacaaacatgccaaatgtgtcatgaggcccgctacttatcggtccatcacttggtttcggcctttcatggcccactccaaaggaccaaaatcgaaaatatctcgaccatgcaaagagaagatggctgggcaacatgttcgtgcggctggcgctgggctcacgcacaaacgtttgcactcatgtgcaatcagctagtttgttgccataatttttgtgtatgtttgtttcgctatcaaaaccatgtcatgccacgtgtttttaagtacaactatatcatgtcacgtgtttttaagtcttaggatccagtgtcacaattttaaagctggccatgccacactttagataaggtaaaatctaattggagaaacctctccaattagtcttaaccagagacaccccacgtgctagtactttaagagttttggttgctattaatccattgagcaagtagggaaaatattcctatcatctatacttcaaataaaattttctcttaaattactcatccgatttacaatccgattacaccgttgtgttcgtaataattaaatctttacaacaagatctcacatgattatattttgatgaaaaatcacaaattacttttatgatatgtctaaattacttttaggtttcactaagttacttcttagacatataaaagtaaattcagtaaagcctaaaagtaatttacatatattatagaagtaacttataacaaaaaaaaaagtaactttaattaatgccttttttcattgaaaaaattatcatgtatatctaaaagttacttttagatttgattgaaatacttcctatacattcataatgctctgaggtgattacttttttttattattattagttaattccataatttgtgctgattaatttaatttgtactgataatgtttttatctctacaacagatttatgacatgctaaagttaccttcattttgttctaagttacttctataatatatgtaaattactcttaggttttactgaatttacttttatatatataagaagtaacttagtgaaatctaaaagtaatttagacatatcataaaagtaatttgtaatttttcatcaaaatataatcatgtgagatcttgttgtaaagatttaattgttacgaacacaacggtgtaatcgaatcgtacatcggatgagtagtttaagagaattgtatttgaagtataggtggatggtgcctcttatagatggagtggtagctggtttagacaaaccagctaccactagccgtgtagttacgtcctttagataactactactattaaccacattgtttgggcaacatgtcacaacttggttaaggacaagtttaggcaacaactaaccaaagattccatagataacagactgcagccctccagccgactgccgaggcagtaaggcaaagggtgcccccggcccctggcatggaggtactcaggtacaagtacaattgttatgtgcaactggagtactggaccagaaaattcacatcaaaaacagagagcagaaagcacataaaagatcatacatagacgaactgaactgaactgtttaatccgagggctttttattcttcggagccatggttgccatggcaggcatccattatttccggtgtccaatagtttctcagggaacactcaggcaacaacaacaacacaaggtgttttggttcctatccgaatctctgtttcccttcactgcgggaaggtggccacaggatggacacccaacacacaaggaagggttattactggtactggctcgcgagctgaccttccttgacgatgtagttctgcaccgggaagtcttcccctttgaagtacctgtccagcatgtccttcactcctgctgcgtatctcagctgcagcaattgttcatttgccgtgaaatttcgttacagacacagtcagcaatacttataggaaacagattataagaccaatccaaatgcccacatataatctatgctagacataatacaagcaggacccgttgccaatgtagtgagaaattgaccgccgaatctcaaccctatggctgaataaagcagttgtgcatatttaatctagcttggagtaaaaacatcttatatgattttgatcttaagaaacaattattgatgaatcaataaagtggcccttggtttgtactatgtatcatgcaaaacatgcgctgccatctgggtaactaagttactcatctcactagctgacatattgctctacagttttgttaaagcattgtgggggtacccacagaatcagattctagaattttatgctccaatgccctaagttaaagtagaaaacatatataaaagctgacctgtgcatcaattgtagtcccagagatatgaggggtcatggcatgattaggcatgtatcgccatgggtgatcctttggtgctggttgggggaaccagacatcaccaccatatcctgagaaggaagaatgaggttttcatgctaaaggaaatattgatcaagatagaaatattaatacggcatcattcttataatttttttttcaataggacaccaatattagttctctggaaggaaaggacatttagtagtttgtcacagattaaagaatcatggtaagagagctaatttacataggtgcagagaagttcttttatttttttaaaaaaagattcttcaataattgtgaacaacaagttatcatatttgacatacatactgctttactgggttagttgtcctggttttaagttttttcatatcacccctcttaaatgtgaagcatgataggctccaggaaaatgatatacttcatggatcaaaaagaaagatttagaccaaatctgatggcatgctagtatgcagtgtaggctataagaaatgaaaggatgatggtacctgcaacttgaccactagagcaagcgtctgcaaccgcctgggtatccatgattgctcctcgagcattattcacaatgattacacctttcttcatctttgcaattctttctttattaaacatacctctgaagaaagaatcatacaaagttcagataagtagatgtactatgtatatgattttgcaacaaacaagaatacgatcatcaggaaccttgttttctctgtaagaggtgtattgatcacaatgacatcacactttggaagcatagcatcgagatcctcttcatatttggccccaatttctttctcaagttctgggtcaattttaagtctgtcatggtacagcaggttgcagttaaagggcttaagacgctgaagtaagagcctgccaatacgaccagccccaacagtccccacagtttttccttcaagatcataagccctataggcaatgccagcaacattccattcaccatgaacaacctgctgatacccgggcaagaagttcctgagcaaaatcaaaatgcgcatgagctcatcttctgccaccgacacagtgttacttccggtaacctctgccacagttaaacctgctgcagcagctgctggcagatcaatatgatctgacccaatcccagctgtgagaagcagctcgaggttctttgccttcttgatcctttctgcgctaacataggctgggtggaaaggggtggtgatcaagacatgcatatcctcaatgtgcttctccagctctgacaacaagaaaagcatcagttatgtgcacaagaggagttaaaaggataggttcagagctatgttgctatttaaatactgtagttgttatctgtcttagaactaaagcacaaaaatagttgctacatgtttttcaacaaatcgataagagatatgcaaaagaaaaaaaaagttcaaacttgaaacatgtatgcaacataggcacagacaagaatttgagttaacagaacagcatgccagcatgaatagagttaatttcagccgtgtgctagaggaaaccacttggctgccaaccactcaacacgtgaaagcatgactaccctaaccacatacatcaagaacctcctttccaccttccatcaaccagatgaatatcatccttaattctcctgatcaaaagataaaaataatcatcggcgaagttaagtaaacgctcatgtccacctatggcaactccatccacctctattcagcctgtacagggccaacactacaagctgggagatgctagctactcaattcatcatgtgtaagcggctccatgcaaatcatacaccatgcacaactaaaaaatgttggtagaaacttgagagaaagctctgaaaatctgaacatctctcgcggatactaccacttaccgctgtttagcccctccttgtcgtcggtgacaatgtagtgatgccccttggactcaagccattcgcggatgccgagagcgccctccacgcagccgacgaagttgggattcttgtcggcgtactcgccgcccttgtagaacacacccacgatcttcttgctgcctgctgatgtctgcgattcagagagggaaaaccaaaaggtataccattcttcagagttgcagcaactgagatttgttcagacaccgaaattcacatcacagaagagatcaggaaaaccgattgcaattgttcatcacccattcccgtacaaaaggggagaaacatctttttgggaggagaaaaaaaaagaaattccgggaggggacaaagcatactgggaatcacgaaattagggaggaatccatgcttttgcaaaacccaatctacaatagaatgctcttgctctcgcaaaaagtaaaagctaaaacccaaaattcacctccgaactgcacccaaaaaaaaaaaaactcgcagcagaaacaaaaaagaaagagatactctagacaagaagaaccccggtcgatccagttggaagtacgtacgtgcgcggccctggagccgagcgcgcggccgagaagatgccccgccgccgccctccacatcgccatgatcccaggaggaggaggagaaatcgcgagacgaacgcacaggcaaccgcgagcaggcgagagagagagagtgatggaatcgatcagtgcagccgactcgatgggatagattgatatggatagataaaggcccgccacctcgcgccgccaggtgggccgcgtggacgcgggtaggtgggcgcggcgggctgacagctggggaccagaggctgtgtgggctccatttgtcagcgtctgcagctgctcacactattaggatatttattttcattttctggagtatatgtataagctacacatacgtggccccttggcgttgttaggataagacggagccttgctggtgatcatccaaaacaatgtaagcacttattagcaaataatctggttttaatttgtgacagggactgaacaagtgaggacactagggaagcacgcacgcttcgtgcagctttgcgccatggagccgtggcagaaacagaaaggctgcgtgagtcacccatgcacgtaggccctgtttatttccaaagttttttttccaaacttccaactttccatcgcatcaaacatttcatacacacacaacttttctatcacatcgtaccaatttcaaccaatcttttaaacttcagtgtgaattaaacacagccgtagaacctccgaatgctcaaaatcgggcgcctgatgcggcgaaaaaaatggggcgcccatatgcgcgggccgcccccactatgtatgtccatcattcgcgccccattacaatcagtggcggatataaatttaaaatacagatggggcggcagagctagccctaattaggtaatggcacaatgcacacaaatcatagtcgccggctcacggcactggtacagcaacgcacggcatgaacattgagaaagttaacaacgaaaattggtagtcgaacaaacgtatattaattatatgtagagagaaaaaaaaaggagaaacgttgttagacaataataaggggaaccactttcaatacattggaggtataaaacgaaatgaaaaattatttagaggtttaagtgttttgctaaaatagttcaagtgagtaaaatagtttcttttaccaatttaactttattgtagaccgtattatgtgctaaagaaatagaaaaaaagtcaaattttacatatggccaaaatcagaaacggtcgaaatggtactactcatacagaaataatactcattcagtcaagaattttcataaatgttgtttatgccatggagcagtgtattgttgcaatggcatggagcccgggcagctgcccgtgctggccgggccctgcctccgccattgtgtttcactatgtatggatgagttgcagtggattttgatattgtttcgtaatttcatcttagtggacacgtggtttattgatgtacacggggtttaagtgttgcaatgattttaaatcgtttgttgcatatgttgaaccaaattatttcatcaagtgatcttactgtgtttcactttttttaacaattgaaacattctttcgctatttgctgaaacattgtttttatatagggtgaaacaacgctcgatttttttggaaaccgttgttttatatattgtagcaaaatatttcatgaggtgatttggttgtgtttcagctttttacaagattgaaatattttcgatctacttggtgaaacagcgcccgatttatacagaaaaaattgggcgcccggtttgtaggcgcctccacagaacctgcacaagcctcaccaactcttagtctaaagccatgagtctctctagccgcctctaattattgttccatatgcatctatagtgattgttccaatatggtcccttttgtttcatagccaaaacagttctccttcatctttttttttctattttttaagtagtattattgaaataaaaaaacaccattttgttgatcataaataggcgaattttgaggtccatttaacaaggtggcattctccctcttgtttcaaagtaaagaccactgctacaaaaccctaaatgaaactagcatctatggatttttttttccacctctacgtgatgaaaaaatatagtatcgacaaatttgaccattgtaggtatcggttctagaggaaaacccgacatcaatactatagataccggtttttttataaaaaaagaagggtacccataaaatagattgagccaagccgtccatatacaccacaccacttgcattttatcctcttcccacccggctgtctctttcgcacatcgttcgatccccatcccactcacacaaccccgccaccgctccagcctcacttgcgcttggcctcctcctcattgtctgtcgctcctcctcctctccgtctgccgcccatcctcctcctccttcctctccatccgccaaccctcctcctcctcctttcccttgcagcgcccctcaccacttcctcgccgccttcgagctatgtctccccaaccacgtcggatctggtcacctaaaggtctgaggccaccggatccggcctccttgaggtcagggctcaccggatccgtcctccttgaggtcagggctcaccggatccggcctccttgaggttggggctcactggatcactaacgtggatcaccttgcatgtgcttggggctggtgcggtctggctagaaggagataatggcgacggtggcggtcagtcgaaggagagtagcaagggaacgaaggcgacagatccaatgggacagtgagcctgatatgttgaacatgtaatggtcagccatggcgaaacatgtaactgtgaattgttttgatctaatctgtgattagcttgttcttgtccttttggtttgtgatgtgcttctttgttttttgatgtatgcatatgctcttgtgttcttgttgatttgcaatgtggatgggggggattgcagatggggctaggtgtcggttctgtctcgagaactggcagctataatctctataggtaccggttctggaactagcacctatacatataggtaaaggtgcctccaaattggtaacagttgggaaacccacacctataaggggttcccaaccagcacctatggggtgctctgtagtactggactcaaaatgcacatcattcgatagagtttcagaggaggttttcgatgctagcatattataaccctttagtgaaaaagatattttaacacatgagcttgcacttgacaaatacagatccaatagtagatacatgcacactaaataggatcaaaattgataaattattattagaaaaatggcatctataccttctatatagttggtatccactagcaattattacaagctaaagcttaacatgcaagtacgtcacattaccacccactagtgattattactattctaaagcatgttaactctcatgcaagcatgatacgtcatatagaatataatattgtagagctcaacatataaatatgtcaaatgatcttccttacacctttttcacaatatttaacatttagcatttctataatattttatattcatccatatattccagaacgaagcgcgggtatactagcaattgtaaagaagaaaaagtttgagtcaccacatggcacacactaagattatttaaaatatactgaatcattttgtgatacattgtagacattgatataaactgatagcatccaaaaaattaaaagccttgaaggtgaactcaaattgggctagtggtattttcttaataattttcccatgcaccaaatattttttaaaaaaatatttcaaattttaaagcgcaagaaattttattgctttagttaaaaccccatatttcaattttattaattggtctattcatggaacctttcttttagttcaaatattaaaagccttgaagatgaacatgtcgatgggctatacatcactaaatacgtacctatatatatgccatatctttaaggacgtaaggaacagctaatttgaggatataaatgaaactgagaaagagccaaggagacatggatttttatccaacccccaagatgggtaatagccctagtcatgtttactggaggtcagtgttgccatcatatatcaatctcttacaagtacaaactatcgggaggaaaacataatctaatataccaatctattggcgcagagctcgggaatggtggtcagcggctagctattgttaattttctcgggtattgactcaacgagattggaggtggctctagatctctcttggcttactagtttctaacacattctcttctctcctcctaggggacttacatttatacccttgggtgctcctttatcgaagtaaaactacaagacaagtatgcatataatcagaatagtcctgaccatgcctacaaaagactcaacatttctttccttatctgggactccttccctatctactttagactttatctatgtgtatgaaggtttgttttcgtataaaatcacttgatctatggtggtcccaccgagttaaatgtgtgtgtgtgtgtaggatatctcaaacctaggacactgatagaacaattaaaacctttatcaaagttttttttacaacagaataactaaaagaaactcccttatgatctcaagtgggctgaatacgacccacccctcctttctctctcctgcgcccatgatctgtctccacttgttgatccaccttcctcacctttcttctaatagaatttcagtatccaaacttatcgcattttggagtgccttttattttataacctaccaatgttgttactgtcaaaacctagacaagttttcatgctaccaaatttagtagagatcactattgggtataactcaaaaatcgatagtattagcaacaattggtaccaaaccattcatctagatagtactattcagttaccaaagggcaaaaaaagtggcataagttagaatttatttggctccatactttcgtttcgctacaacttgcaacaaaaataactgcctccgcagcccattagttgggaagaaacatagcatgcctgatagaggctagctcatctgtctatggtgaatgtgttgtatagttcctagtgtagttttagcaagtcaaggaaatattaaggaagaggttaaagaactactagaccattttgtcgacggtggatacccgtagactggatatagagggtattggggtacgctggtacgaggatctacgtgatacgacatcaagcaaatagaagacaaggattatactggttcaggccccttgataggtaatagctctaatccagttggtatgggattatatggtggaaaccacatattacaaagataatagcagaactcggtgatatcgacaataccgtagtcgagttggtccgactagatcacccggcaacttggctcctataggctccgacttcctaggttgtggtcgttgtgttggcggtgagattcgatgccttaggtcctcccgggggtcccttttataccgtgggtcagttgatctctaattagaactcggagatatcggaccccacacgatatagtaacgacccagttctgtccgagtaggactccttccatccgtggactccatttctgttacgtgacggatttccttaacgtgtacaggaaacatccatatacgcgcaggtataccgtatctagggatgacaatgggtcgggcacgggtagagcaaaaccatgcccgacccgatgcccgacattgcccacccaaaccctacccattagagttagcgggcaaaacttcgtgcccgtacccatgcccggcgggcgcgggtatgtccggcgggtacccaatggatctcacatgaataataacttaaaagatatgtaacttaacaaagagaaataaaatcaataatttaccaaattatcgtttatcaacaataatttgaattacatcacaacttagtatcagttagcatcacaaatgaactgagagaaatggtataagaattaagaaatgagtcaaaattagctaatacatatgtatcgggttgggcatgggttacccacgggtaaaaaatgaaacccacctattgcccataacgtcttcgggtctcgggcgggcgtgcccatgggtaaaaagtcacacccacgcccgtgcccatcgggtcgggtatccacggatacccggacccatgggtaaaattgccatccctaaccgtatcggtatacaacatacatccaagggtaaagggtataccttatccgtaaccctggcagtagcccccgacttctgcttaaatgaactcatgtgaccgatcgcgacttctgatgtcggaatcgttatcactctcaacaggtcgatctcggtatgagaaccgtagagacatagagttatcgataactttgcacgaagttcaacggtcatgagtgaatttaaattgaagtccgaaaactgctgcgcgtaacggatccagaaatttccagcggccttctctctcctttccttggaattcgcaccgtcggtagtgcatttatttaagggagttttggggatccattttgaagtccgtttgctgcaaaacttcccagcctccaagcgcccctcgtcttctccgctcccgcagaaaaaaaccctagctttctcatcttgtcttgttctccggcgatctccggcggtgatggatctcgacaagtccaccaccaccaatgcgtccctgaagaagctgtaggacgacggtttcctccttggtcgcgggaccatggagagagaaacaggaggtactgaacccgaacctgtcctgggccgcatggttgcggttgaggattacattctttgtggttttcttcctccgccctccaagtttcttctccttgtcttgaatttttatggcctttccttgctccatctgaaccccaattccatcaccttcctcagtatcttctcttatctttgttaggcctacattggggtagagccatttcttggtctctttcgcttttactatgagttgcgctggatggaaccgaaaaaggtatccagatgtgtcggtttccgacttcgggatggcctgaagtcgcgatacatccccttccagtgcccctcttctcgtagcaaatggcgggcgaggtgattctatctccagatagagaactcggatccagtctttgttgttcctgaggagcaaccagacaagattccggagtggaccgccaaacctgccctaactccctcccttcagtctttcatcgacattatcgatgacctccgagtacgcgggttgttggggtatgaagtcgctgccgacttcatcggtaggcggatccaaccgctccaggcccgagcccatatggcctttgattattcggggccaaaggacgcgacccgggtttctcctcggggtatttttcttgtatttcagatttcattctttatgtgcatgttcctcctgacttatcgagtgctggttctcgatcctacaggtttgaacagcgaaatcgtggagcgccgtgccagtcaagtgatgatcagcggtcctacaacggcgagcaacatccccgtccccatttgcaagaaggggaaggccaattgcatggctgcgatcaacgtgagtgtatttgacgactcctttacttctgctttcctgggatcgcattgtgacttcatgtatgcaggctctccctctgacggatgtcatcgggccgctcgcggaccaccaggcggcagcgtcgttaaagcagggcgttgccaaggaggcatccgacattgctgctgctgctgctactacgatgagtggcagcaacgttccaatattttgacctcatatcgtgccatcttgcttaggcctcggatgcgtctcccccgtcctagcgaaggcaaaggctggtgacgcttggcgagaagtaagtagatgttttggaagtcttgcttgcctgtcttcatgaaatcgcggaaatcctttacagggcggcgcgggcgaaggcgacgcaagacgggtccggcgcaacctccagcgcgtctcctgtggcgacctcgacggatgtcgtggtcacaactagggatcgggaggcgacaccgagtggaccagctggcggtcttgtgcccgctcggggcccgcctattgatgccctcacctggggggagctccaagctgagatggagcgcatcctccaggctggagctcgcggcgtgggccgcgagattgaggaagccagggtggcggcgtcatcggcaactcaacgggccgagtagctggcgtgctatctgttagagacctgcgaggacctcctcaagatgagggagttggtggctggcaatgaaaggcaacggcagggactcgggcagatgtcggagctcgagaacaacctgtcggagatccgcggctcgctgcgggtgtcttacaccggcctacaccaactcgccggggacttcggtgtgtcacgaccaccatcccggcaacccccgacgagttctcgctgacgtcctcgctcgcggagctggctgtggtgatggaggagatcccctccaaacatgcggccaggatcagcgaggagacgtcaaatgggatctacaccggggcgtgccacgtcctcgcgtgcgtgaagctggcgtaccctgacctcgaccaccagaggattctggatcagggggcccccaatgacacgcgcaagggcgtggtggaagaagtcggtgacttgggggagtctattctccccctttttgaagagtaggattttatttcccttgtactccttaatcaattatgcctgtaaaacttttgtaggttcaaactgcctttgtgtatgcagttatttccttcattttctttagcatggtgattccgagtactttgttgtcattgtagagatgttgatatcgaggatgtctagcagcgtgggcaacctgagtcgccggtagtcgttctggcacttgcgcttgagccgtatgtgccgcgggacgatgtcgatcaaagccttaggttggtacaacttccttaggttggtactttagtcttcatctcctttattcttttgttcgaatcgacttaatttgccgtgttctcgaaagaggagaacgacttgacttagtcatttccgtgttgagcagacctcgagagtgcgttggccgaccaagatcgtcgaatccaatattggaagacgaagttcgaggtggccgaactcgagaggacaatggtggaagtgaagaaagaccaagccgtggaagcactccgaggtcgcgaggtgtggttcaactcgtacctcaggagctgttgtacagcgatggttggagtctgcagagagctccgagtaccccgttggaatcccgaggagtcggcggctgggtatatctcgtggttgaacggggcctgcgctcagcttgaaggcatcggcaagcgtatcgacgaggccctgaagcaggagtgtcgtcgatcgagccgatatgctggagggcacgtgctggcctgtatccgagatcactgcccgcagctgcacctcgagttcctccacgaagggttttcacgttctcggaggactcccgcagagatagataatctggcgaagtcgatggcaccgcttaaagagaaagtcttccagtccatggactggcgttggccttcctggtagtctttatatcctataaaaattatctcaaggagacgtgtaatatattttggagcaattatgaattgtaagaagtactcgtgaaatagaaaagggatctatctaactaagttttcttactctggatgtgctgtgtgagtgttttctcatttcgcgacttcgatcagtcacttgagtcatacactctcccaagcccccagccttgtcgtcggagaaacgttctcggagaataaggctcttggacccttgacctacctcagttgaaaaagcactgaccctagcccccagccgtgaagttggaaaacttagtttctgattggttaatacgcacggcgagaactcttacatgaccagatcttacatggtcgtttgtctctacatgatccgacaaggccttatccgctctgggcgtccccagccgaagttcccttaggttcctcagaggccttgtcaagacggcgtaaagggacatgaggataggtttcaacgctaggtgtcgtcgtggtaagggatcgtcgggaaagaacactttgatcgtagtctgtacctgaaatcaactttattgaagtcgtaagatgtcttacaagtatggatactattgatttatacataaaatttacgtaattgatcaatgttccaggaatttgctaactcgcgaccatcgtcgtctgcaatcttgaatgcaactggccgcaagacttgcgtgatcgtgtatggtccttcccacttgggtgagagcttgttacgccctgcttggctttgaacccatcggaggacgtaatcgccgatcgaaagcgtgcgtgctctgatgcgcttctcgtggtatcggcgaagggcctgttggtagctggctgctctgacggtaactctttctcgatgctcctcgagtagattcacatcgtcgctttgctgctcctcttgatcctcgtcagagtacttctgtactcgtgtgctctgatgtcgtagctcagtggggagcatggcttctgagctatacatgaggaagaagggtgtgtccttgttggacgttgtcggtgtggtacgcacaacccatagtacagaggggagttcttcaacccacttcttgtcatgtgacatcaatctgtcgtagacatgggtcttgattccttggagtactatgccgtttgccctctcgacctatccattgctctgagcgtgaggaaccgaggcaaagcagatcttgactcccaatctgatgcagtaatcctggaagtcagcaatgatgaactgggagccgttgtctgttatgatgcggtggggcaatctatatctgcagaatatccctttaataaacttaatggcgttgtcggccttgatttccccagtgggcgtcgcttcaatccacttggtgaaccgccacgaatagaaacatgtaggcgccctgtcctcgtgggaatggtccgagtatgtcgagcccccagcacgagaacgaccaagtaagggggatagtctggagcgcttgcgcttgtagccttgtgtgtttgctgtggaattgacaggcttcacaccggttaaccatgtcgcaaacgtctttgagcgcagttggccagaaaacctttgtcaaaaagcttttctgaccaaagtgcgaccggcggcgagtgacccacagatcccttcgtgtatgtcgaggagtagatgtttgccgtcatcgagcgagatgcatttgagaagtaccccgtttggtgccttcttgtatagatcgttgccgatcatacagtaaatcttggcttgtcgggttattttctcggcttttgcatcatcttcgggcaactcgtcactactcaggaaattgatgagtggggtctgccagtcatatgtggtctcgatgtcggcaacggcgcgttctgcctctgtagcccccgagccgatgtcggggacgactgtgctatcttcgccgtttgtggttttgtcaggatgtccaggaaggtgccaggttcgagtggctctcgtctggatgcacgccgtgctaggtcgtctggttcgatgttgtccttgcgatatacgtgtcggacttcgatcccgtcaaaccttttctcctgcttcctgacttctgtgaggtacttggatagctcggggctagagcacttgtagtctttgtgcacctggtttgcgactagttcggaatctcctttcacgattagtcacttgactcctagtgcggctgctgctcttatctccgcgagtagaccttcgtactcgactgtgttgttggttgccctgaagttgaggtgaattgcatgcttgaactggtctcccgaaggtgatgtcaagatgaaccttgcccctgctccttggctgttgagtgcgccgtcgaacgccattgtccatgtttcgctgtcggtttgactgtccggcctgttttcaggcataatccaatcagctatgaaatcggcgaggacctgggacttgatggctgttcgtggcacaaagtggacatcaaactggcttagctcgattacccatttcgcgatgcggccgacaacgtctttgtttctcacgacttcaccaagagggaaggaggaaacaactgtgaccctgtgggcttggaagtagtggcgtagctttcttgatttcatgattactgtgtaaagcagcttttggatctgtgggtatcttgtctttgcgtcatggagagcttcgctgacgtaataaactggtctttgcaccttctctctcgacaacaatgacggtactcacagaatatggtgtggcggcaatatagaggaataattcttcattaggttggggagcaacaagtacaggaggatttgacaggtagcgtttgagtgcgatgaacgcatcttcgacttcctgtgtccatacaaatttgtcttgtttcttcaacagagtgaagaagggttgtccttgttctcccatcctagcaatgaatctgctcagtgccgccatgcatccagttagcttctggatttccttgagtcttgtgggcgacttcatgttctcgattgccttgatcttctcgggatttgcctagatccctcttccagaaacgaggaacccgagcaacttgcccgatggtactccgaacgtgcacttctctggattgagcatgaggcgatatcatcagaggttgtcgaacgtttctcggaaatcgtcaatcaatgagtcgcttgtcttggtcttgacaacaatgtcgtcgacataggcctcgacattgttcccaagttgatcgttaagtgccccttggaccgtgcgttggaaagtatttcctgcggttatgagtccaaatggcatcttgacatagcagaatacaccgaatggcatgatgaatgttgtcttctcctcgtcctctttcgccatgctaatttggtggtagctagagtaggcgtcaagaaagcttaacaactcacaaccagctgttgagtctaccaattggtctattcgaggaagagggaagtgatccttgggacacgccttgttgaggtcggtgaagtcgacacacatcctccacttcccgttggccttgcgcaccatgactggattggctagccactctggatggagaacctctctgatgaagccagctttgagaagcttgtcgagctcttctcgtatggcttgtttccgatctggtgcaaatctccgcagtttttgttttactggcttggcatcgggtcgcaccatgagtttgtgctcaatcacctccctgggtaccccgggcatgtcgcatggctgccaagcgaacacgtctgcattgtcgcagaggaaggtgatgagcgcgagttcctatttctcgttcggtgatgccctgatcttgacggtcttgtcggggtggcgctggagagtggaacgatcttgattgcgtcgtttggcttcggcgtcttgtttgttttgctcactttcttgggtggctcagctgtggcgggtgggttggacgtgtgctcaaccatgtcgaggctccgcttgtcgcactgcactgccagctttgcgttcccctgaatagtgattgttcccttcggcccaagcatcttgagcacttggtatgcgtggtgagatgcggccatgaacttcgcgagtgcagttctcccgatgatggcattgtatgttgtatcaaattcagcgacatcaaaggtgatctgctctgttcggaagttgtttgcttggccgaaagtcacaggcaacgtaatcttgcccaatggcttggacgatgactgaggagtgattccgtggaaaggttgatcagtaggtgtcaactcgcttcgtgggattcccaccgcgtccaaggtgctggcgaaaagaaggttgatggagctgccgccattgatgagaacccgtgcgaccttgatattttgaatagtgggctcgatcacgattggatatcgtcctggaatgaccccagtcttggggtagtcttcctctgagaattcgatcttctgttcggaccacttcatcttgggcgcagccccctgccatgtcgaacaaacttcgcgctccactttcttgtactctcgcttcgaagagtacgccatagaacctccgaagatgtgcgagacatggagatcggaatctgggtatgctgagtccgagtcctgagtggctgcttccgtggccttctcgactacacgtacttgcttgcccttccccaatgcgagttgctttgtgagtgattttttgaaaacgaaacaagcttctaaggagtgcttgtccgatttgtgtatagggcatcatattttcttcatgtcgtcgccttatgggtctgggtgtttgggcaggtccacgtattctgctgcgaggacttccgtttgagctttctttttcccactcttgcgactcttcttcttgcttgattccgatgcgtctttggctggtttcttctcttcggcttgtcgttcttgcgtctcagtgtgtcgtccatgtgagcgcatcgatcgacaatctcgaatagttttcgagcagttgttatccgtcttgtcgccaactcctgggtggtgtagtgatctctgacaccagtcttgaaagcgcggatcacggaggcatcggtgatctcggggatcgtatttctgcactcattaaagcgccaaacgtagtccctcaatgattcgcccggattctgtgtcaacgcgtgtaggtcgtcttcgatcgcgtggcgtttgtatgttccttggaagttagcgacgaactgctgccacagatctgcccatgaagaaatccagtatggtgggaggtggactagccatgaatgtgcagatcctttcaacgtcgccggcaaataatttgccaatgcgttgtcgtctgctccggcagcgtagaatactgcggaatagacctgaaggaactccttagggtcggtgctcccatcgtacttctctattgctcccggtcgaaatctctcaggccatcggacatctcgtagagcacgactgaaagctctacacccgccaccgggggcggcaggttgtcggcgatcgtatgtcctccgtggatgcatgtctaatgacgaggatgatgacgatgatgatgagtcacttggttccggggtacgattacgaggatgacttccgggttctcgagaatcttgtcgtcgcccaccgttgttgtcccggcgccgatctttgtcgtcgtcatcgttatggcgacgtcctcgaccagtatcgcccggcatccgctgttcgcgatcatggcggttatggcggttatcatggtcttggttctcgctcgggtgtcctcctcactcttcgttctctcgacgtcgcgaagagacgcgatgccgggaacggtttttgttctcacgcgcgtcatgcttctcggcggacattcaaatggtcatggagatcactggtgccgcgaggtggaggagtggcttgacgaggtgatgcccgttgcccgggtagttttccattggcaccgccagttggcggttgctctggcagtactccggtggcggcctcttcgaacgcgttactgaggttagccactaattcccgtagtcgttctgtccactctgcgagatcatcgttcagaacgggatcataaggggtttccctcagtattgcgttgatagccctgatgtgttgggctggtgtaaccacttgatcctctgcttctgcgttagcgcgcgcagacgtgctggtcccatcgatagcgaacacatcacgtggtgtactcgttgatgatgaggcctggtcttcgagcaagtgtagtactgacggctcgtggggatcgatgtcgattaccccgatgaatcgatctgagataactgtcgctcctcgttccttgtccgcatctctaagagagatctgtgattgctggaccttaggaggtgacgtcctcatggcgctgagaagaaccttgcagcttgagaggtcgtgattctttgtcttgtgaataggacaatagacatcacgggttagagaagtacgttgaattccacgctctttgcaggcgtcgagaaatacccagcaagcttgtaaggtgtgtttcctggttttgtggatatgacaccaggactttgtcgcctcggaagttgtccttgtcggctcgtgattctcgtcggaaggacaagatttggccgcattaggatccttctcaggctcggatgtcgtcgatgttccgttctccacttctgcgggaggatccttcgacatggagccgtccagggttgtaaccacggcgttctcgcttctggtcattgatggaccagttgagatcggcaccatggtgtaaaccaggaagacgatttcgccgacttgagtccacaccagcattgttgaagtagaaactccttggttgatgccggggttgacgctgttgtcgacgaagcttgatgacatagtagtagaaccttgagcaccaagttcccctacctggcacgcccctgtcgacggtggatacccgtagaccggatatagagggtattggggtacgctggtacgaggatctatgtaatacgacatcaagcaaatagaagacaaggattatactggttcaggccccttgataggtaatagctctaatccagttggtatgggattatatgatggaaaccacatattacaaagggaatagcagaactcgatgatatcgacaataccatagtcgagttggtccgactagatcacccggaacttggctcctgtaggctccgacttcgtaggctgtgatcgttgtgttggcggtgagattcgatgccttaggtcctcccggggggtctgtcggtgacatgggaccgggagtatcatgactagaggcttgaggcagacacaatcgcccacgtggcctggcaccctcgggggacgtcgggcccgagggtgatgtgtggcccaactcttggtctccccgagggggggg

SEQ ID NO: 5657 - DNA, 9118 bp, Oryza sativa
tagggcaagaaagcacttcattgtttttcacaacatcttccatgaactcaacacgacctaaaacatctttcaatttcaacttattcaaattacatgttgagcaatccaaaacatcatgaggttgttttaactttttagcagaaatcatgttaaacatcaaactaacatgaaaagcaatttgatatttttgcaacaactttttagttaaaaacaactcatccaaagtgcgtgtgtgcaaagcaaaactgcaagcaagagaagatctatttttcaaatcatgtgcagcattaacatctctaatttttgaaatctcattcattaaaacctcacaatttgagcaataatcatcattaggaataagagattttaatctagcaatttcagatttaagagattcaatgataaattcctgttttctatacatcttctcacacttcttttttttcactcaaaatattaatagcttcttcaaaagcacttacctcattatcttcatactctgtgtcagattcaccacgtgccatgaagcaaacatcggagatgttctttcccttatcatcatctccacttccaccatctacatcacttagtggctcaaaggcggcacaaacttgttgaaaagccttcctaagattctccagcatcctcccttgggatgaacccttcggcttgttgttgttggtcttctcaccatctttgtcttatcttttgcctctcccaagcttaggacaatgcgaacgaagatgatcaattgaaccacattcaaagcaacgatttggaccacctcttttcctgttcctggcattattcatagctcaagcaactctgttagcaaccaaagccaaatcctcctcctcgatctgttcgagttgatcatcggatgtggcattaaaaacagcaagaaaagaaggcttagatgaagaagcatcaatatccaaagaagaagaatacgaagaaatcaaagcacttgacttagaatcaacttatcgagaaagaacattcatctcatgtgttttcaattttgtgtaaagtgaatccaaagtcaaagtagtcatagactcctgaatagacgtaactttcatctcccaaatagacatgtcaagaccattcaaaaagtgacaagaaatctcagattgtggataattagtatcataagaagaatcaatagatctaagatcactcaaaattttattaaacctagagagatatcatccaaagcttctccaggtttcatctcaaatttaatgtactcctttttgaaaatatcacgacgaagttctttaatgttatttgttccttgatgaaagttactcaaagcattccaaattttatgagcagttcgaaagtgcgcaacacgatcataatcagaacgagaaatagcactcaaaagaatgttgcgtgctttgcaattttgttcaaaagcagttttttcagccgcagtattaatagcttcaggaatcacataaggatgagaaacttttctctaaatatcataatcttcagccataatataagattgcatcctactacaccaatgagaaaaatccgttccatcgaaaacatgaggcttagttgaaaacctagcgggagtagccatggcaaaaactctagatcgataaaaatccaaagaagaaaacaaggctctgataccacttgtaggatcgaaaaacaagaactaagccaaccaaagggggggtgaatggttggtatacccaaaaaaccgaaaacttttagcggaaataaaagttaccctcgaaatcgacaaaagtcggtctgaccgagattgatctaacggtttgaccgtgtggatgtcgccggtctgaccggtatagatcacccggtctgaccgccgatgtcacctgccgcgcctatcgcggccgccggtctgaccgcccgtatgcctccggtctgaccgccgcttgctgtcggtctgaccgccggtatatcaccggttggactgccgaaactcggtgaaacacaaatcgaagaactcttaaagtggatgacgactttattgattatctctgtatttacaaagtgcaccaacagcactccttacaaaaatttcgactaaactcgaaaccctaactcaaaactaaactcaattgctctcaaaagcgataccgggaagcctcacgctccccctctatttatacatgaggtaggcagcctacaaccacgaaccaaactcatactaggagtcctaaacaccttagaaaaccctctagtacaagacacaaactttacataaccaatcgtaccaaatttggactccttccaaattcgactccgcatcccatacgcacacaatacctccatcgtatgccatatggaatctccaccaaccacgtgcatcaactctagcctaagtatctcgcatgatctctgaccaccacagacgtcgtcttatccccaagccgactcccggtccatcaccgcaaatactctcccgaggcatcgagtcacctacacatgaaataaacaaagaaaccatattccgagaccaagctatctccaacttgactcattagtagcaaacaacagtattatatatgtatagtatccatctagaagccataatcatgaattaatcacagatatccaaataaacaacccgaaaccgaaaccgacacagcgtcggccggttagatcgcgggctggccggtctgaccgctcgatcaccgccggtctgaccggcatacacagcccggtctgaccggtcacataaaataacgaacctacgattcacctgtaaatccaatcatctccaaaaccacttcataaataaattccaaataacaaaaccaataatctccaatgcccaatttgttatcacagaataataatcaaaaacacctttaattttacagattatacaataaaatgttttgtagaaacatcattgaccaatatagaaatggtgggttcgctcaagaaatagaaattatttgtatattgaacaggattctgtgtgtgtgttatgtatgtatatatatatatatatatatatatatatatatatatatatatatatatatatatactccctccgtttcgaaatgtttgacaccgttgacttttatatatatatatatatatatatatatatatatatatatatactccctccgtttcgaaatgtgtgacaccgttgactttttagcacatatttgaccgttcttcttatttaaaaacttttgtgagatatgtagggcctgttcactgtgctgccattttcaaccttaccaaattttggtaaagttgccaaaaaaaaagtggctatatttagtttgctaccaaattttggtaactatataagaaatcaggtcaaagtgaacaggccctttatatagagctagctagattgtactccctccgtttcgaaatgtttcgacgccgttgacttaaaatcattccgattattttctcgtaagctgcggcatatttttttttataggagtagaatgcatggttggctctaggttataaaggctctaatcgatttgagcaagaattatcagccgtagaaaaaaagaaaaattatttgcgaataaagctttttatattagatgtgttatttacctatttacttatggtttcaacgttaaaaatttaagactgaaaaatacgcgctgaaaaaaaaagcataaaattgactccaaaacactttttaattttaaattttgtccacggcacattcgtaatcgattatgtgatctggtcgacgggacggggatggaccagccgtccgagagctcataagtccatcctcaatcacgggaaatcggtatagtcgtttactctgatttggaaacatcattggtatgaacaaacttttatcacacatacttcatcccattttgacttatggatttttatatccaacgtcttatttgatttttttttataattaatatttttttattataagatgataaaatatgaatagcattttatgcatgactttttttaaaaaaagaaattcataaatctttaaattagacgaacgatcaaattgataaggaaaatgaaacccacagctacactaaaaatagacggtgggagtattatccaggacaacttatggaaaacggtactggtacgaattaatatatgctgttagtagctaggagcacaaattaagctttgattgagtgttactactcctacatcacactgctaattaagtctgacccaaaatgccgccagctgtccgcactccacactggtcatgagcgtctgatcagtgatcagtccgtaccaagttgtactaaaaacaaaaggtgtactgctgctaatcaagccaaaacacggtgcaagctaaatactctactcctatgcgtcatctggttaagctacttcaccaacttgctgctactaacttagagtaattacagaaactaatcattaattaattaagcatgaactccttgcactaatgcatgcagcatgcatgcaatgcatcactttggctgctgcttgccgggcttgagggtggacgacgcgccggcgccggccgcggaggcggcggtgggtggccggtgctgggtcgtcgtcgacgtcgaggaggcggcggcgtggttggtgttgagcttggcgaggagggccttgttctcctggttgagtgcctgcgccttcctccgcagccgctcgttctcctccattatgtacacgttctccaggtacagcttcaggttcaccctctccatgccagtcgatctcgatctcctgcactcaaaaatgcccaatcaattaattcctagtcaactaattactagcatttgctgcatgctaagacatgactcaaacggtagctaactaagccatgcattcttgcatcgtcgtactaacagttacaaatgacgcaggatcatgcaaccaagaaatgtgcaagttgctgatgagaagatgatccatggaaaatggagcagtttcaactcgagacagataagaaacaccaagtagtccctcacctttgatctgaagatgctgctgagctagctagagagaaggaagaaggaagatagtactgggatagcaggtttggcagaggaagaagaggagattgttcttgagctgtgcagagcagtggtgttcgcgtagacggccgtctactgtatttatagccctcgtggagtatagtggctgtatgtactgtgtactgtatatctgctctgctctgcgggtcaatcacggcctgcagttcagagttgagaatgaaatcgcgatgaattgatgacgcacttctgcttcgctcaaagatacgcaatcattcctcttccaagttccaaagttgaaatggtactccagcttcttcttccttcccagtagagtctctctcgtgaatcatgatgtggtttgaactgtaatgacaaatcgttcaaatcaatttgacttcatttgactaaaatcaaatgatggaaatgcagagtactctgtccaaaaaagaagggagcagcagcagccagccagccagcagagaagcagtggcaaggcaactccaggatgtaaattgaggtgatgctagtgtaaaaaatataatataattaaaacaagtaaaggtatatcaactaaactattttccaatgaaaatgaaatgctcatatgatcaaaagaactttttctattttgatttgtggctatattaaaatgttcataagtatctgtgaatatattgttttgtatactcggaataaattatgttttatcaatttgggtagtagaatcagtgaggcagcttgcatccttgctatctaggaaatttcttcactaataacgccgtgtttattccaaagtaattcttcaaacttctaactttttcatcacatcaaaactttcctacacacacaaacttctaactttttcgtcacatcgttctaatttaaccaaacttccaattttggtatgaactaaacacccccaacttccaactttccatcatatcacatcacattcaaaacatccatacacacataaactcctaactttttttccaaactaccaacttttcccaaactttaaattttttttaggaactaaacacatccaactaattagacttgttaatgactataactaggaacagggattacacaccaaccagcctcaacagtggatccgccactgccgagaagtcgagaaggaacatttactcttgcactcgattatggcctactcgtagtagcagtgtggtgaagtcaagtctttgctctcatcatctgatctcgcaacggcagatctcttctcttgctgttccaaggcagcagctaatgatgatcagcattcaacctccacgtcttctcttcttccttccatcacttctgcttccaagcttcaattgctctctcgatgagcattattgcaagagctagcagagcagctatcatggcggcatggcgcatcacttcatacagatcacaccacgattcgatgtgaacaatgcatcatgcatgtcttatgagcacaccgattagtgcgagtacaaatcttgaattgtcggtgtgtagagagattttgggtcccggagaattgaatatgactagtagtagattctacagacattttaacatctgcactgagtgacatttgagaatttagcaattcccataaaacaatatgcatagcatacagaaatttgttcaaactactcaagatatggttccaatgaccgagcttttttgttggtttacatgaatcttgtagacttgtactccgtactgtactatactacttcatctgaatttctgatctgatggatgggcaagggatggatgcagcaggtcctactaccggcagaataatcttggattcgagatttggattcttggtctgatctgacatgttgaccttgtagcagcattgaactccatctgtatgactggatgtgtgtgtccgtcttgcattgcaatgtgcagcacagagatcatcatcatgacagagccaactgaagctggcgtcaggagttgcattttcgtaaagggagatctcatggcgcctatagatacgagcaccccatttctgtgagttgtgatcaagacttcctgctggtagttgatgattctgcatctcctctgacaacaacacaaatgcatcctttgcatgcattacttgagagtagttaagggtgtgtttagttcacgctaaaattagaagtttgattgaaattgaaatgatgtggcggaaaagttggaagtttgtgtatgtagaaaagttttgatgtggtggaaaagttggaagtttgaagaaaaagtttggaactaaaatcggcataaatagggcaattgaaatggatggattgattgatggtagcactcctattgagttttaattattaccaacttaaaaaatacatttgtaattattaccattagcaatttaaaaatcatgttaatgaaaaccgagataaaatctgtatcttaatcagaaaagagcatgatctaactaaatacaagaaggtaataccaaggataggtgcaattcccagtgaacaaaaacacattagctagtgatatacttttacgagcacgagcaagatcaacttgggataatggcaccgcatgtgtaaacttgtcagtactgaagaagaaacattgtgttacttaaacaatcttcagcagttagcagtctgatgattataaatcaagttgcagcagcagcagcagcagcagcttgtaaaggactggcaattttatctgaaagaaaaagggagaaaaggaatgggcaattggcaattggactagctgtttcttcctggattattgaccattttattagctttcggtcatctactagtactatactacaaccagaatattcccctagaagagattagcaaatcgacaacagaagcagataggagaccgcccaccaacccgaatatttactctcctttacttaaggaagaattaaacaaagacgtaatagttattagtagcatcagctactgatcattttcatacctaagcaagatctatcaccaccaaaaaaaaaatcattaacaagttcacaatcaataagcgcttccatgatcaacaagttcactgcaatggttcgaataaattcacaacaaaattgagctacatttctccttacaaagctcccaaatctgacacacatcttgtgtccgtatctcctcccattccccctgatttacaaattacaatgggattctacgtatcgaatatgaaatcagtttcaattttacaacaaaattcagcagcagctacacatacacccacgtcggggtcaccgtcaccagtgcaacctcaccggcggcacggtgaagccgtgggcgtcgtcgaggaagggcaccgccgccggccgcgcctggaggtcgccgtagaagtcgtactccgcctcgtagtcgtgcaggtccagctccttcttctggttggtgtggtaatggtgcttggcgccgggcgacttgccgaagccgaagaggctcacctcgtcgcagacgccgagcgccatcaccaccgcctgcatccccgacgagtagtggaagtacctctcgtcgtgcctccgcgtccagttcgccgccggctcgccggtggcggagacgaaccgcctcagcgagtagtacttggcgatgcgcgcgcacagcgcgtcgaggcgcgcgtcggtgacgaggagcgggaacggggaggacggcgtggcggtggcgttgcagatgagcgcgtcgaggaggtgggcgggctggcagacgtacatcgccatgggcacctcgccgccgtacgggtggcagccgcaggcggcgcgggtgatggcgttgcgggcggcgcagatgtggaggatgttggagttgacgaaggagagggaggtcttgacgccgacgtccgcggcgaacccggcgacgcgcgcgttgttgaggcggatgacgaggtcgtgcgcgtcgatctgcgggccacggccggagccgaggagcacgccgctgttcccgaccacggcgcaggtccggtaccggcggccgaggacccccgcgaggtcgcgcatcacgccggccacattccccccgcggccgcggcggcggcggccggccaagaacgaaccgagcgatgccctgaacgaggcgaggagcttcccgtcgggggggagcgcgtcgaccgggacgcggaggcgg

SEQ ID NO: 5658 - DNA, 3412 bp, Oryza sativa
cggcgtcatctattaaaaaacggaggtagtatttattaggatgatccaaactacaatatgataataattatttcttagtctttgggttaagggtggttgtgccttatattttggaatggagggagtaccttatttcgttagatggtattataaagagggaaatgcaaagtagagaccatgctagttattcagaaaagggaaatttaatttaatgagggaaatgtgtgttccatggatcccaataaaaagatcagtggatgataatagatgacagacacatcatgtttatcagtacatcagcaaaggagtgtcatttatattttttccacgaatatctacatgtatgttcacataagaagacaatctacaagaaagaaataacagatacggtgtactggcttaaatagattttctacctggtcatataaatactgtatctgctgagcttgttgtagaacatgtgttgacatgagatgattaagtgctgacatctctatcatctttgtctctgtttcttggacagcatcaagaagatttgtcaactccacctaagatacgagtaaaaggatgcaaataattaatcatgcatgacaattcactagaatttcatcagcataatacatatacaccaaaatattacctgaagagctcttgtttcatcatccaagagttgttcttgaactcttagtggtgcagtagagacctcctgatcttcaacctttgaaacatcagattttaatacaaggtttggcttagatggttcagcagctttggtttctcgtttcttctgaatccgttttcttggcatcgctctgttaatagcatcttgaaaacgcatggtccgaagacgatcaaattgtgcagttactgagtgaagacgctcactcaaaatcaaaacctggtgaaattatatggaaaacacacagcttagcaaacatgaccatgtaatttgcataaattcgtactaagaaagcaacatggccatgtggttgcctatactagcagcactgaatcagaaaacaaaatttcacattgttcaaattcacctatttttacaggatggttgcagcatggctgttttgtcgtatctaatgtccaataatagcaataaactaaggtatggatatcctgctaccagctacccacatcatccaacttcatcaggacaataaatgctggacctgtcaattcttctatttaaaggataatactcagatttatctgtgtgttaaacaacttgtctcagtaaaagataattttgtgcaaggggagaagataaattatccacaaggagttgattagtttaaaatatatatatacaaattacaaactgtattaacaaataataatgcccggaatatctgtaaaatggaaaatgaagtagcaaacatatatcagaacaaatgagattttactggtacaatcctccatgtgcagatattgaaaacacaagagtgctactgcattttgtattggaaattagcaaaatagttgatccatggcaagaataagaaggcataccacaccatgctggtgagctatcaaatccaaccgggagctctcatcgcttgtaccaagccatgtctttgtacttccacctttttcttcatggatcctgttctttaggatatctatttgttccttgcatgcttttacaaaaacactgacctagacagataaaaagttgagaagacatgcctaatccatagccgaaaattgccaaaaaaaaatgcacacattttaccagtatgaatatatcaggatgcgataatagtattagtaccaaagaaagatactccaatgcaatgtcaaacaaaccttagtattagattttcaataaactcatccaccatgttgcaaagtatatgttttaacatgattgcagtgtagtgttgatgtcctaatgtaaccccgtcggaaaagaaagagtagttcaacaaaattttcaatgaactcatccaccaggttgcagagtacgttttaacatgatagcaggttacggtagatgtccataatgctcgtaggaaaagaaagaataaaatcaacaagtaaccactattcacctcatgctcaatgttgtcccttcttgctccgtggtgcgatgcatgtcaacatagtccttcctatgcttcacaataaacttctccagttccctgatactctcaagctacacgaaaacaaaccataaatatagtagcaagctaccataccaaatcatcaccacagcattgcagcaaagacagaattcgtaccgtcttgattgcagcctttgtaaagggtaatttggggggcggcttccggatgatgaaagaagacatgagcgcggctaactgagactgtcagaaggaaatcaacacaagggtggatcaacaatattctttcaggcgatatctgtgatagcttccattccagcgaagatgggggagaatgccgcgcaatcgcgccgccgttgagctcacctccgtgtacccatggccgagcgcggcgacgcggacggactccttgaagtcctcggccctgtcgcgaaccctcgacatcgccaacgcagagtagcagctaacgcctacggcttcctcctgtcagatctcatctctccgcgcagcactgattcgcgagccggcgagaggggaagagaggagagctcgcctcctcgctttctccgcgtccaccttgaagcccaccctcggcgacggcgacggcgacggcgcaagggggaggcggcggcggcggtgcgagggggagacgagagggcggcggaagaaaatttcataggactgcggtcctttgctcctaggaaagactttgtctcctatgcgacacgtgtccaattggaatttcaaagcaaggcttccactacactattcacccaaatactattaactgacgccgccgttatagcatgtgtagtgcgtacctctaacttgtcaccccagagcacgccgtccatcgccatgagtttttccgcccgcgtcgtcccctcacgagtcgtcgcgcgccctggttgggggacgcggctctatctccttttcggccaggggacatgcgcgagggacacaatgcggggacgggcgccacaggcgacgatctctccagctaccatattccccttccacccctctcccctctctctctcgcgtgcccgttcccctcgagaatgtgggggtattttggaaacttttcacatgaggcttctttgggctaggatacgcactgtggattagagtacctttagccagtttcttcaaattttgaagagtccatctaagtgtggctttggtcacaagatgagtgcccttgagagtgccctcagttagtgaggacactctaggggtggctttggttgtacatgcccttatgtcctcctcttcttggcttggtcttcgtgggcagtgataggcatgaagcaccacgg

SEQ ID NO: 5659 - DNA, 8879 bp, Oryza sativa
cgaaagttggatgcacattatgaaagattagcatatttctctgcttccaaatatgccagcaagaatggactcatagttttcatccactaggataaaaggtatcctattcgcgtatataagattttaataggattttagtaaggctaggattataactttacttcattgtcatgtcaaaaaaagttacaagaacatcatgaaagcatttttaataacaagatcactagcttctatctcttgggaaatttgacctctccgtatgcaaaccgggaggagatcatgcacggtcatttccgcccgttgcttgcacgatcaacgcgatcaattaaggttacttattagcacatgattaattaagtattagctaaacatttgaaatatatattaatatgatttttttacaataactttcctataattttttattacaaaaatcacattgtttagtaattcgggaggtgtacatgtggtaaacgaggaagtgaaggttgggaatcttcacttaagaacacgacctaacacattgatcggtaatgccaaaacttgccctcctccctcagcaacatattaataggggagatcaatgctgtgtcgtggtgatagtcacttcacgataatcttctgcccgaaaccataaaacctcttacgaccccaattacttgtgttggagggagaacttgcgattgtcctagggcattgtagatggccctcggaaggcctctatggaatcaaaccgcgatcactttgtctgcgctactgctataacacaaatattgcactaatggcttacctatcagttttttacttttaaattccgcatatattaggatgataatgtttaggctaaacaattagattagtatattagataatttacaatatcatttttatgtaccaaaactatagtatttcatctcttttaaatagtagttgtcgttttaattagcttttgttttaagtcgatcattaaattataaagatatatatagttttacattacaagattaatttatattttggatatactatgcgaaatactttcttcatatataccacataattttattttattaaactaatgaattaacatgaattgatagtcaaaattaaagatgtctatcttagaacgaagctaagacgataattaattaatttgagtacgtgtctatgtgaccggccggtaattaaggcgcaagagtaaattgatgcagtaggtaatcgctcaagcatacatatcttctgtgctgcatttcacgcacaaaatccgatcgagcgagtctgatgccaacatctactaattcagattcttgctagctaggtatagctcgggcccaacgcttggtgccattatctgaaaatgaaagaaagcatggccacacgcactaaaaattcatccaggaatttttgggcgtcaaaatacatttcatttgcgttgaatggttttactactcgactggtcatatttatctgacgtcaggagtacatgaaattgataagttttttttatgagtacaagttagaacgcgtgcgtgcatacataccatacccatgcctatgtacacctttgtggtgcatatactagcacatgccaaataaaaaaaagatccgatatcacatagcatgggtatgcacgcccgtgtgcatgtactccctctgtcctaaaatataataatttagaacccggatgggatattttctaatactacgaatttagacagacatattaagagaactattttgggacgaagggatattgctgtacatgagattaaattttagtaaaatatgagcacatgtgaaaaatagaaaataacgaatcaaactaaaagtcgcaagttaaattaagagaactattgtacataaagaaaaccttacggagttaaaacaattacgttaagataatacaattagactgctcctagcctcttcacaattaggatgaacacaatctatgccttttttttttaaaaaaaagagaaggacgatatgatcacaaatgtgatggcactagtacagaaatcgttttttccaggcagcccaaaaggcattttcgcgtgtggaaggctgacctgtctgcccaggatggtctgtgaagatcatcatctttgcgtgtgggctgctcaactacacacgaatatatatattcgcaggcaggccgcttaacgcgaccgcacacgaagatcgagtatctttattttacaaccaaaaaggtttctttattttacaactaatatgtacatcattataattaagatagtatatattgtactcattgtacacaatcttatagctcatccgttatataaattaatctaataactgacaaatataaaattttaggtcgaccactaattaacaaatagagcaagatgtacatcttgatttatatattattctactacttcgcaacctcaaacccttttgaaactgtcatgatcttgtatcttaatttctggtcctactataccccccttttctttttctttaaaatgaaaagcatttatgcccttttttctggctcactgtacgtcacactgtatactacgtgagatgctacaaacagggcttgactcgatcggctgtcccttcttcttttccttgatgaaagaaccctgcaactgacaaacaggaaaagtttggagaaaaaggcagggatcgatgtaaacttgctggagcttttcgatgcagtgagaaggtcgtagctatcgatcgatttcctttctatttcttttaaaagaaaagaattcatttgagacattgaggtagctatcgatggtgcaatggagctagctagatttctccttacattttctgcctttcaagtttagatattcccatggatatatatggagttggaccatggttgtaaatgtccgcggtgcgcaattctctatgtccatatcatacttcctctataaaaaaaaaaccaatctaaaattggattctttttacatagctggattttttttacataggtttagggttagcctcggaccagatgaccaccatcggttggcatatgctatagcatatcaacacaaccaggctgatgcttatcagcataagcttttctatcatctgatgctacagtccaaggagccaaccaataggctgtagctgaaaatcagccaaccgatgaggccgataacttcttatttggcctaagagaaaattatatggtgaaaatgtatggttctttatgggctttcatgcctaggccctggaccatggcccaggtggcccgggatcagacattcagaactgagaccgtcattgaccagagcttctctcttggccggcctttaatttgtcgctgccgaattcttccacaatcaacgactgttcgtcatcactaacctcgcggcacagaaggattaattcgtagcactaatacagaattgattattactgcaatataacagaaaaataaatcagtaacaattctaaataatttaacactgccagattaatttaccattcatcagcaagcatcgatattgaaaaccaacctttcatggcctgcagatcaaacacataacccctgaacaatctcgttgccatcaatattcggctcaaacgccaaagagtaagggtgcgatcctgatcataaacctcatccagttagctggataggagatcaagatggaaattaagtcgactaattgcaatatcgcgtggttatcttatagatatcgtgatgatctcgtggtaactttctcatttttaaaacctcatggttttccacgataactaagtaccgtagtaattatcatgatatcgctgagtagcagtagccatcataaaaagggtaaggaagacgatggctgatgcaatcgatctggtgagctttgaactgaattaatcaaaattactagtagttaattactctatttgtttcatattataagccgttttgaaattttttttaatttaagtttgattaagtttataaaaaatatagtgacataacataaaataaatatattatcaaaatatattcaatgttagacttaataaaaccaatttggtgttttagatgttgccaaattctttttacaaatttaattaaactttgaaaaatttaactaggaaaacaatcaaaacgaaatgaaacggagtaagcgctatcctgagactttctgatcaggcagctgcaggcaacaaagcgtgttgattcagcaattaactgcgatactatcattattatcaactttacttttaattagacattgtcataacacacatgcatggatcattgaaaaattaataggccatttggaacaaatatacgaaagagacccacttataattaattaagttttataaaaaagtaatttaaaaagttcggaacccttcccacccagtaaaaaaacgaagcagtggattaacttattaattaaatattaattaatacgattttttaaagcaactcgaccatataattttttataaaaaaatacagtttagcacttgtgaaacgagagaaagatgaaaaagatcggcatgcatgacaggcatgcactaaaataatctaactaattactcggccaaccggttgctgggaacataacttgaatccatccactaatccatcaaattaaaatattaaagagtttcttgcccagaagcaatctaccaagacgaggacttcagaggagagatgaaccagtcgctatagatcgatcttctagttgaccacttcagaaacatctaacgctcagaggctataaatatggctgcatcctttccatatggccaaagcatcagatatagctccatacacaaaacaacaatcgactacttctacaggatctgtagatcaagagcaaaagttccatcaacttaaacatggccgcctccaacttctttcttctcacagctttcattgctttggtcgctactcaggccatggcttctgatcctagtcctcttcaggacttttgtgttgccgacaagcactcgccagatatattattttatcactgatcatgcaattgcatcaaattgattacacattcatgttgtacatatacatgtttctagcttccgatctgaccattgtatgttcttcaatgcagtacgtgtcaatgggttaccctgcaaggatgcaaaggatgtgagtgttgatgacttcttcctagcagctaaccttgacaagccgatggacacaaccaagagcaaggctggatccaatgttacattgatcaacgtgatgaaactcgcaggtctcaacacccttagcatctccatggcaaggatcgactatgctcccaaaggacaaaacccaccacacacgcaccctcgtgctactgagatcctaaccgttcttgagggctcactctatgttggttttgttacatctaaccaagcaaacagagaaaacaagctcttcaccaaaacacttaacaagggtgatgtcttcgtgttcccacagggtcttattcactttcagtttaatccaagctatgataagcctgcagttgccattgctgcacttagcagccaaaatcctggggcaattaccattgctaatgcagtatttggatcacatccaccaatttcagatgatgttcttgctaaggcatttcaagtggacaaaaaagccatggattggctccaagctcagttctgggagaacaaccataactaaattattgatgcttgataaggttcagaattagtgattggtataaaaaggatttgttgattattatattagccaaaggctatatacttcatgtaatcctaaactcgatatttatacaattctttttacgaataatgtataacagtacgcacatatatatgttacattatgtatggtctggggtattaatttaatatagttgatttcttgggtattttttaacactcataaagatggataattaaaatcatattatagtagggatgcatttccctcgttcaatacttatatttgttatgtagctcacatgatcatagtactcatccaaattaatctattctttttcaattcttgtgattatcatgaaaatttgaacgcttcaaaaacatataaaatttgtttttagatgtgaaccaaattcatttatatataaccgttagttactgacaaaaccaacaaaataaattcaaacaaattatctacaaatgaatttttgtttgatttttttataactagcaaatctaaaagtatgataaacatattataatgaatcaggaaacaattgtgtttcacgtatcatcatgtctgacaaatcataattaaaatttccaaatacagaaaaaaagaaaaatctaacaattcaccatcgcccgttctcgtcgctggcattgcttaaactcatgcctctgacactaattaagttgtagtaaaaaaaattagaagatttggtttctgctcgtatgaaagagtacaataataagcaattttgataaaagtacatatactacacgtaattcaattggtcatatatccatcatatctctattattataaaaattgaatatgtttttgccggtattttgttatatcatccgtgtatgagttggtttttaagttcgtttgcttttgaaaataaatattcgtatttgaattggtttttaagatcgttcacttttagaaatacagaagaaaccatataagaaatctgtttaaaaaaaactcgcatactaacttgagacgatcggacgtctaactgcagctcatgattttctatatatatatatatatatatatatatatatccaagcgaactgctacagtgaatttcatcttaactaaatcatataatagtaataagattaaaataaactttacccgttacaacgcacgagcaatttttctagtatatatcaagttaacaactctgctccagcacatgctgaagaggaaggaagagatcgagttcgatcgggctaattaacagaaagaaagggcataatagttttactaatctctttttaccagttaaaactactactataatgtttttagaacggatgaattataatatagtgcgcgcgaaaaggacaaatatttccattattggaactatttctttatctaaccctgtttgggtatccagctgatcgaccaggagaatgacgagccgccggccgatgtgatcgatcgatcgatcagccggtgatagagctttgaactgaaataatcaaaactacaaattagttgaaactgtctcagggcaacggggagcatgttgatcgattcagcaattaccgatatcctttttaattagcatgcatgtgtgctagctcttgaaaaatcagaccttattatattgatgtaacacacatgcatgcttaatacgcggagatcattgacaaattaaaagggccatatggaacaaagttactaaaggagtaaagaggccaagtatacgtacgttacatagagagaagacatggtcatatgtttatctgcacctgatactgtataacacagccaggcttcatcatcaatctaatgcatgcatgacaggcactaaaataatctaattgattaactaatcggtcaccgtgttgctgggaagacaacttgaatccatccactaatccatcaaattaaataagttcttgcccagatgcaaatctatcaagaccggttcagactttagagcagatgaacaagtcgttagttcagcctttttttatttttcttattgaccacttcagaatcacctcattctcagaggcctatatatatggatgcatcctttcctggccaaaaaccatcagctagctgtagctccatatacacaacaagctagcatcgagtaatacttctgcagaagcaacagttccatcaacttaaacatggcctcctccaacttttttcttctcatacctctcatcgctttggtcactactcaggccatggcttctgatcctagtcctcttcaggacctctgtgttgccgacaagaactcaccaggtatagtttttcgtcatcgatcatccaattgcatcaaattgatgattatctcaaacatccgtaatgtgtatatataagtttctaggtttctgacccatatatgtttttcaatatgcagtgcgtgtcaatgggttcccttgcaaggatgctaaggatgtgagtgtcgatgacttcttcctagcagctaacctcgacaagccgatggacataaccaagagcaaggctggatccaacgttaccttaatcaatgtgatgaaacttgcaggtctcaacacccttggtatctccatggcgaggatcgactatgctcctaaaggacaaaacccaccccacacacaccctcgtgccactgagatcctaagtgtaattgagggctcactttatgttggatttgttacatctaaccaagcaaacggagaaaacaagctcttcaccaagacactcaacaaaggagatgtctttgtgttcccagagggtctcattcacttccagttcaatccaagttatgataagccggcagctgctatcgttgcacttagtagccaaaaccctggggcgattaccattgctaatgcagtatttggatcaaatccaccaatctcggatgatgttcttgctaaggcatttcaagtggacaaaaaggcagtggattggctacaagctcaattttgggagaataaccataactaaattaaattattgatgcttatctgttgaaaattagttatctgtagtaaaatggtttgttgattgttagtagctaaaaattgtatacttcatgttatcctaaaaatatgttatttgattctttttacgaaataatgtataccactacgcacatatacatatgttacgtgatgtatgatctgggatattaatttaatatatttgatttcttggtacctttttaacactgaatgatacataattaaaatcatattac

SEQ ID NO: 5660 - DNA, 15489 bp, Oryza sativa
agttcaatccaagttatgataagccggcagctgctatcgttgcacttagtagccaaaaccctggggcgattaccattgctaatgcagtatttggatcaaatccaccaatctcggatgatgttcttgctaaggcatttcaagtggacaaaaaggcagtggattggctacaagctcaattttgggagaataaccataactaaataaattattgatgcttatctgttgaaaattagttatctgtagtaaaatggtttgttgattgttagtagctaaaaattgtatacttcatgttatcctaaaaatatgttatttgattctttttacgaaataatgtataccactacgcacatatacatatgttacgtgatgtatgatctgggatattaatttaatatatttgatttcttggtacctttttaacactgaatgatacataattaaaatcatattactagggatgtattgccctcgttcagtacttatatttgttgtgttgctcacaagatcgtaacaagcatccaaattagtctcttctttttcaattcttgtagttatcatgcttgagaaacataaaaaaaatgtttgtacatgcgaactaaattcctttatatataaccatgcattaattactttaaaaaccaatataatataaacaaattatgtaagaaatgaaattttgtttgattttttattacttcgctagtttagtgagcggtttataggtgtgaattgtttaataactagtgaatggtttataggtgtgaaccgttcaataactctaataatcaacatgtagtgtcttactttcaaatctacgattcagtagaggtgacgatacacaccactcgagactcaagagtttattactcttttgaatgtagtaatttcataagattttcacaaaaaaatcgttcaattcttacgagtatacttcacaattaccacgcacgttctaaagaaccccttgaaggccatctgatcctaaatctcatttggccaacaatggagttggtgacctaatcgatcgtacatgaaacaacattacaatgaactgaagacaaaaatatgaaacaacattaaaatgcctagtacaacattacaatctaacaaaaagaaacatgaaaaacattggcttaaacattagaaattttaaacattaaaaaaactgtatcggctatatctgacttcctcctcccctccaatggttggatcgggctttcttcgacaacctcaaacgctgcaatgtgatgacccggtgattctttctataaatgaccttgacttccttgttgtcaactgcgatggcatgaccaccacttgctccgtccgctgcttctctacgataggtttccctcctcctcgctgtcgtcgttgtagttgtcctcccgttgccatcggcatcggctacccttatggtgacatgtcatcatcgccacatcaaagccttggtgggagatagagacagacacacagagagagagagagtagagtaatcaagtgcgcgataagggggagagatgtgagtgagacaagggagagagaaatgattgaatgagtggatgggaatgattggcaggaagccggtttttttctcctagatccagtgcccagcttggagcgttttcactagaactatacttttttatacttttttgggaaattgctaaaaaaactaatcacaatttcattttggtaaatgctttcaaatataactatggtatagttgtagtaactataatataattacactatacttacattgtaactacattgtaattacaatatacctacattctaatctctatataacttagctgtaaagttgcatatttttttaatctttacaagttacattgtagttatagtataattattgtagaattatagtacaactatactgcagttatatttgagagtttttcactttaaaaaattgtggtacctttttttagataatcccttttttatgcaaaacacactcctgaagatagaggaaggataatataacaagcgctaaaaagataaatatttctatatattggaagctagtatttgttttaactcctctcctagctatccatatgcagctggccaggggaatgaagagccgccggccgatgtaattgatgatgtaattgatctggtgagctttgaactgaattaaccaaactaccaatagttattagcttgaaactgtctcggcagctgcaggcaacagagagcgtgttgatatattcagcaattaactgcaatactgacattatcaacttcccttttaattagcatgggtgctagctcttgactaattaatcagacattcagacgttatattgccataacacacatggatgcctgaatatgcggagacgaaagggaccaagtatactttacatggatagagaagacatggtcaatctactcgttaacgtacattcacggttatttttgttacaacttgaatgtcatattaaacttgtattgtatatttgtaaagagatatattttaatttaatttaattatcttatcatttttttaaatcttcttgagagataaaaatccatctccctatctttatcataatatgagcctgttcactttgatgccattttctgataaagttgctaaaattttaactacgtttagtttgttgctaaatttttagtaagcacatataaaatcttgccaaaatttagcaaccttgttaaaattttagcaaacataccaaaatttagcaatgctaaaacttggtaaggttgaaaatggtagtaaagtgctctgtgtttctattcacctgataacaaagacagccaagacatcatcaatctaatgcatgcatcatgcatgacaggcactggaataatctaattaattaattagtcggccaacctagctgttgactgggaattaagatagcttgaatccatcaaattaaatagtttctttcccagatgcaatcattaagagttcaagaccagttcagacttctgaggagatgaacaagtcactagctagctcatccttttcttattgaccacttcagaatcatttcatgctcagaggcctatatatatggatgcttccatggacaaaagcatagactacagctatacaagaagcatcgaccactacttgtacacaagcaaaagttccatcaacttaacatggcctcctcgaacttctttcttctcacagctctcatcgctttggtcgctactcaggccatggcttctgatcccagtcctcttcaggacttctgcgttgccgacaggaactctccaggtagtgtacttcttcactgatcatgcagttacatcagattaacaatgatatgagatattcatgttgtacatatatatgtttctagctttcgatctgacctttgtatgttcttcaatgtagtacatgtcaatgggttcccttgcaaggatgctaaagatgtgaatgttgatgacttcttcctagcagctaacctcgacaagccgatggacacaaccaagagcaaggctggatccaatgttacattgatcaatgtgatgaaactcgcaggtctcaacacccttggcatctccatggcaaggatcgactatgctcctaaagggcaaaacccaccacacacgcatccccgtgctaccgagatcctaactgttcttgagggtacactctatgttggttttgttacatcgaaccaagcaaacggagaaaacaagctcttcaccaagacacttaacaagggtgatgtcttcgtgttcccacaaggtctcattcacttccagttcaatccaagctatgataagccagcagttgccatcgctgcacttagcagccagaaccctggagcgattaccattgctaatgcagtatttggatcaaattcaccaatctcggatgacgttcttgctaaggcatttcaggtggacaagaaagctgtggattggctccaagctcagttctgggagaacaaccataactaaattattgatgcttgataaggttcaaaactagtgattggtagtaaaaagagtttgttgattattatattagctaaatattgtatacttcatgtaatcctaaactcgatattttatatgattctttttatgaataatgtatatcagtacacatatatatttgtcacatgatgtatgatctggggtattaatttaatatcgttgatttcttgggtacttttttaacactcataaagatggataattaaaatcatattactggggaagcattgccctagctagttcagtacttatatttcttatgttgttcacaagctcatagcactcatccaaattaatctattctttctcaattatccctacatgcttgagaaagataacaaaaatgtttgtacatgcgaactaaattcctttatacatgaccattaattactttaaaaaccaacaaaatctaaacaaattatgtaagaaatgaaattttggttgactttttattgcttggctagcttagtgggcggtttatagatgtgaactgttcaataactagtaaacggtttataggtgtgaaccattcaataactccaataatcaacctgtagtgtcttactttcaaacctacgatttgctcaagactcaagagtttattactcctttgaatgtaggaatttcacactttacaattaccacgcacgtcctaaagaaccccttaaagaccatctgatcctgaatctcatttggccaacaacggagttggtgacctaatcgatcggacatgaaacgacattacaatgaactgaagacaaaaatatgaaacaacattaaaattcctagtacaacattacaatctaacaaaaagaaacataaaaaaaacattggcttaaacattagaaattttaaacattaaaaaaaatgtattggctatatatgacttcctcctcccctctaatggttggatcgggctttcttcgacaacctcaaacgctgcaatgtgatgacccggtgattctttccataaatgaccttgacttgttgtcagctacgatggcgtgaccaccacttgctccatctgctgctttgccacgatgggttgctctcctcctcgttgtcgtcgttgtagttgatcctcccgttgccatcggcgctagctgcccttatggggacgcgtcatcgctgcatcaaagcctcggtgggagacacacacacacacagagagagagagagagagagatagtagagtaagcgagtgcgcgataagggagagagatgcgagcgagacaagggagagagaaatacttgaatgagtggatgggaatgattggcggggagccggttttttctcccagatccaacgcccggcttgaagtgttttcactaaatctatattttggaaattgctaaaaaaaaactgtcgcaatttttttttggtaaaagctttcaaatataactatggcatagttgtagtataactataatataattacactatagttacattgtaactacattgtacttacaatatgcttacattctaatcttgatataacttagctataaagttgcatattttttaatccttacaagtcacattgtagttatagtataattattgtagaattaaattacaactatactacaattatatttgaaagttttttacttaaaaaaattgtggtactttttttttataatccctttttttatatacaaaacacactcctggagacacaggaagtataatataagaagcgctaaaaagataaatatttccatatagggtatgtttagcaaataggatatgggaggtcggattgggaaatggaaatagatgaatggctaggattaaataaagtgtgaagaatggatggctaagatgcaatgttgccttttggagggtgggatattatttctcaatcctatttgccaaacacagccatattggaagctagtatttgttttaactcctctcctagctatccatatgcatctggccaggagaatgaagagccggcggccgatgtaattgatgatgtaattgatctgttgagctttcaactgaattaaccaaagtaccattagttattagcttgaaactgtctcggcagctgtaggcaacagagagcgtgttgatatattcagcaattaactgcaatactgacattatcaacttcccttttaattagcatgtgtgctagctcttgactaattaatcagacattcagacgttatattcccgtaacacacatggatgcctgaatatgcagagacgaaagggaccaagtatattttacatggatagagaagacatggtcaatctactcggttcttagtaatagttaacgtacattcacggttatttttttacaacttataggtgtcgtatcaaacttgtatgtttgtaaagggatatattttaatttaatttaattgtcttatcatttttttaaaatcttcttgagagataaaattcatctccctatctttatcataatatgtttctctgcacctgataacagagccaggcaagacataataaatctaatgcatgcatcatgcatgacaggcactggaataatctaattaattaattagtcggccaacctagctgttgactgggaattaagatagattgaatccatcaaattaaatagtttctttcccagatgcaatctattaagagttcaagatcagttcagactttagaggagatgaaccagtcacaagctagctcagccttttgttattgaccacttcaaaatcatctcatgctcagaggcctatatatatggatgcatcatttccatgggcaaagcatcaactatagctatacaagaatcatcgaccactacttgtacacaagcaaaagttccatcaacttaacatggcctcctccaacttctttcttcccacagctctcatcgctttggtcgctactcaggccatggcttttgatcccagtcctcttcaggacttctgcgttgccgacaggaactctccaggtagtgtacttcttcactgatcatgcggttacatcagattaacaatgatccgagacattcatgttgtacatatatatgtttctagcttttgatctgacctttgtatgttcttcaatgcagtacgtgtcaatgggttcccctgcaaggatgctaaggatgtgaatgttgatgacttcttcctagaagctaacctcgacaagccgatggacacaaccaagagcaaggctggatccaatgttacattgatcaacgtgatgaaactcacaggtctcaacacccttggcatctccatggcaaggatcgactatgctcctaaagggcaaaacccaccacacacgcatccccgtgctaccgagatcctaacggtttttgagggtacactctatgttggttttgttacatcgaaccaagcaaacggagaaaacaagctattcaccaagacacttaacaagggtgatgtcttcgtgttcccacaaggtctcattcacttccagttcaatccaagctatgataagccagcagttgccatcgctgcacttagcagccagaatcctggagcgattaccattgctaatgcagtatttggatcaaatccaccaatctcggatgatgttcttgctaaggcatttcaagtggataagaaggccgtggattggctccaagctcaattctgggagaacaaccacaactaaattattgatgcttgataaggctcaaaattagtgattgctagtaaaaatgttttgttgattgttgttagctaaatattgtatactgtataacactacgcatcaataatgtataacactacgcacatatatatgttacaagatgtatgatctatggaattactttaatatatttgatttcttggtactttttacactcgtaatgacgaagaattaaattcgtattactgggatgtattgccctcgctcagtgcttttgtgttgtcgctcacaagatcgtaacacattcaaattaatctattctttctcaattcctgtggttatcatctaaatttgaatgttgaaggaacatacaaaatttgtttataaataggaaccaaattcgtttatacataaccattaattactgacaagaacaaacaaaattgcaatatagtttccatacgacgacgacgccaagagacacgcctccgtggaccctgtattcgggcttcaagcgccttctcggcaaagggttatggaaattaatacttatggggttttaacagttttaacttaaaaaattgattttaactttagagagaatctaataaatgttattgacaagcaccatatttcaaaaaataccaatgtacaaatcaacttgtcacctactactaattaagcatggcaggcatgatctggaccatcggctgtggattaggcccatcaccaacgacgacatagataatctaccggagcaattgactttcatcatttggaagaatggtagtgccacagagaaccaacaaattaatcagttaatctgaacacttgacacttgcaggcactacaacaacaaagctcaacaccactagtacagaacagcatgtgtgtttcagtctaaaatactgcaaatctgcaatgcaactgaactgcttcagatagtagcatagtgctctgtacagatccagatggaaatgtagaactccgtgttatcacaaacaattactacattgtcttttcggacaactgtcttgcaaccctgtagaacatctatgccatctcccccataaggaatgtacaggagaacgaaaaaaatgcgatgacaaatgtatattaactgtatcctatagctatgacaatgatgagtttctagatggcgaatctatggcttcagcggtaaacgaaaacgcctggcaaggtttcctttgtatatcatacttgcatcaccagaaaaacttcacagaagaaattgtcatataaatcgcagatcacatactatttctcactgccatccttctcgtctaatgctccactaggcttctcagaccttactggaagaacgctccgccgctctttgccacctggtttcgctgatgcgttcccataccatatcatcccaacaacagcgaggatcatcccaaggactacctgaaaattcagaccttccttgccaaagaagagaaacccaagggacaacacgagcactgtcttcatgtggcccaggacttggaaggatacggcagaaaaccgaccaatgcagatgaattggctcagattaacaccaatggcaatgacacatgagagagtcaggaaaaactgcagaatgataaaaatgccatcgtaagataaaatggaaaatatgaggtcaaatacatacaaacaaatcaaacatgcactcaaattcatcaatattctaatcaagtacagtttacctatagattactaaaaagcaagacattgcacacaaaaggaaagctatagactatagttgtttgaagttacagataacgagcaatgctgtaaagtaaagacttctttggtcacaagatataacataatgctagtctaggccatttgataaacttgcaacattacagaatgtgaaccagcaaaatgccaaccagcagcaaatcaccattacacaactaaccaaactgcaaggcgaattacctatggaaaaactagaacatgtatatcagtgagatcagatacagagcattgtaaagaggcttgcctcttaccaaagcaatcgatgtgaaaccaaagtgatccacccttttgcctgtcaacaagaaatctacaaagggccccactagcagaagggatcctgcttgggctggagcagtgtgacccaggaggttgaatgagttcagagagtactttcgttggagaaaatgaacatactgcaaaggaaaatagaagagttaaaattgtattgtctatgcgtccaggtaaggaaaagaaattaaggtgctatttggctataacttaagaaatgacaaaatcaaacaatgattaaggagtgccaattattcataactaacaaggactacagggaaccaacaatgattcagggagtgccatctgccaattattcatcattcgtcaataagcagacccatagataagcagagtcattgttgtgccaccatgcaataatttctcccccgtaaaaatgtttatggttgccaaaggacagctataggaatagaaggcagtattatctcatagcagataaatgggacataaccatacaagtacaacataggttggtttaacttacatattgttgcaaagctgtgctccaaacagctataacagcagcagccagaccttttgcatttacactgacatcagtaactgtgcagaccgcaacacctataagcacaaccattatgctcagctttgtgtcccgagaataatgtacatgatcgaagacaacctccaggagacatgatgcaggtatcatgcagagctttgctatctgaagagaacaaaaggattctttagcttttgaaacttgaaagttcaaagccatgatggaatttagctagcagaaccatcctttgctaacctgataaaaccccacagagttccacatcaagctcacattcattccaacaatcgacaagttcgaaaagatcacaaatttaatcagatctggcagtggtaagtgggagggctggctgaggcctaaccaccgaaacacgatagtcatcaaggtggttgtcacaaaatgaaggccagttaaggttgtggctgcaaaacacagaacataatcagttacatggcatggcaggagataattccattatcatacaaatgaaacatgttgaggggcagcccataaatctggttggatataagaaatcagataagttacaatgctcccggtgttccattaaggtccttttcatgttcagaaggcagtgtggcaacttgtgacaaaaaaaaaagttctgatcataggctcatagcagctagaacagagtggctttgagagtccagaggatacctcatagctcatatttaactcgtgttagatcacaaaaaaagcaagcctatctggtgaacctttttggcatcattagattaggcatacaagttcagttaaagatttatcgatcgtctagaactcaaatgattggaatttgtgctagcattgcgaaaataaatgactgaaggtttacagatgcctgttagtcagttgatcaattgcatgtccaaaggaacaaacatctggagtctacaattactacacaagatctagtaatatttattcgttcaatattaaatcaaacaggatactgctagtttgtcattcagaacacggagtaagcctagaataaaacatcatcatcacaaaataaagaaccaagatatctgaaggtagcaagtaacacacacaccgaaactgaatccatgcgtagccatcagagccttgttgaccatgatgattccaacagacgtggtgatgttgaaactccatgccgcaaaatccagcaccttcttcttgtcggatttgctcagggaagaagccatttcgctcgaatttcctccagacttgaacaaatcaacacccaacacttggcacgggcgggcggacctaacaaaattttttgggagaaaaacaaagaacagcaagcattactaccaaggttatgacagagagaaaaagcagcttctagatctagaagagaaagaagatgaggtgcgggtagaacgagggagatgagagaagaagaggcaggggggaaggggggggacgtgggtaggggcgggtgcttaccggcggcagccaccgctgctcgccggatggagctcgtcggcggcggctggcgatggcgaggccgaggggccttttcgtttttgttttttttttcttttcttttcttattatttttgcagcgaaagccactctctcccagatctgcccctatgatgtctgagggctatttgtactatgtttggtttgaaattttgatggaaatttgattaaagagaaactggatcacaccacatgcgttgctgggaagtttatataaaaaaacaaatattttctctaggttgattatcttatcgtttttataaagacatgtctaaaaacaattttaaccactacttattattattataatatatataaaagtatgtgccaaatgcagcctcgatctgaagataagttattatgccctcctcctatgtgtgcaaagtcaatactcgctctgtcccaaaataaggctgtgtttgagggagaggggattgagaagattggaaagatacgcaaaacgaggtgagccattagcgcatgattaattgagtattaactattttaaacttcaaaaatggattaatatgttttttttaaaagcaaactttcatatataattttttttttcaaaaaacacatcgtttaatagtttgggaagcgtgcacgtagaaaacgaaacaaacaaactccctttgttctccaaacgaacgcagtcaaatgcagttttgcactgttcgcgtctaacgtttgaccgctcatcttatttaaaatttttctatgattagtatttttattgttagtgcatgataaaacataaataatactttatgtgtgactatttttttaatattttcataaatttttcaaataggatagatggtcaaacgttcaacacggattcccacaactgcacttattttgtgacggatgtagtactctttaagataaaccaccattgccaacttaaagttactatggggttgtttggtcctttaccttataatctttggtagcgccaaattttcactatattggcactaccaattctttggtagggtagagatacatggtacatatttgaattgctaccaattagtgccaaattgttaatgagcattatcaattatttggcttcatccaaacatacactatcactattcaagatgccaataaattgataagttcacatttttttggcttcaataaaaaatagccctattccttgagagcgaggagacagcagatggaagttgagaggtcgctgcatcagatctggttcttcctcttagtttctgtggtgctgtgcctcaaggggcggagcccaataggcccgaggggggttcccaggaacccggcccaaattctgaaataccttgttacccctataaatcaccacatgggcaccccctcagcccaaaacctggaaccccctcctccttcgtctggcccaaaacaaggcccatcgctgtgtatttattagagacagcccaactgagaggagaggaggaatcgcgcacgtggttggatcgacagttcgacacggcgtagcggcggcatcgtttcatctcccaaaatgaagcgcgtgattcggtgattgtttctttctcctcgtccgtcgccgctcctgctcgcctgctccgcgtgactccgcgaccggcgaccacgcctgacatctccgactacatcccgtcgtgcgcacgtcgccgttcgcccgcggaccgccacagcccgtgctcaacgcggcgaccgcccggcgctcgcctgccgacgccgcccgtttcccacgcactccggcgactccgcgacctatgacagccctaaatcctatcatccaatccaccactccgtaagtcatgtacccctgcttcttccctcttccaattttgctagtttaccactgatttaatcttaattttcttgcttgcttttgcgatgaacgcagccatgcagggcagtctgggcagtggcagcagcaagctggccggcaatggctggatccacgagctcgccggtttgccctcattgactcgtcaaatctgcctagtgaccacaagtgcttctatcaaaaatcacatccgatagccaccacttacagcaagtggtttatcggttcatgaatataaccaccgcaaatttgataaatatcaatagataactgtttttatttatgtcaaatcatttcatgacttattgtttgttgataactaaactatgcctctcttttttaaggtgattgttgcatggaggaatgaaaatggtgacatcacattttgcatgatatattcatttgttttgggtatggagcccatgacacattattaacttcatatatattattatcagttggtttcttcattatggtacgtattttttttaatttttccatgcactttttcatatattgttattaattagggagatgatacttatatgtattgggtatgcaactatttagtataatattgttgagctatacatgtcgatattaagcaaagaaagttaggaaccctctcgttttttctctagctccgcccagtgcctgtgcctgctcttgttctgtctattacttttgtaaatacgggaaggcaagacactaatgggtgggtgcatatggtaaaagagggcttcgcatcctctgccgttccaactgaaatggcatagagctacagtgtcaagccgttggggcatttatatctgttggataagttttggatgttcgagattaaacgctacagtaacgacgaaaataagcaaaaacattttttactgtagctacagttttcattgcatcagcagcatgttactgtagcttcctcacgtttcactgtgcgcctctgccgttctccccccaacggcacaggatgggaacccggtaaaagaggggtggttaacactgtgttggtctgcaataagcatgctgatgtagatagagatgtaatgtgacaagactagaggttaaatgcacatttcattcttctcttgtctaatatcaggaactgtgttgcctcgtccaaaccatctgagctttggtctgttttggtttgccttgcacctgtcccttactactttactgtacttaaacgcaatttgtattattagatggtgccagaattatttaaacgtagacttgtgataacatgccactgatggaatcatttcaggcttcagagcgcgtctatcatcatggcaaattttaaaatgggtaaacaccgattaattgaattttatgcccccaaaccaggcaaattaaagtgactgactgtattgaagttcaaaaattacatttcgttcgtaagattgcagctttgcatttcataaaatggttagcatcttgtccatttcacaaaacgtgctttgtcacgtttgcggcagagtctcagatgaagaatgcagtaatacattgcacgtaaaaggccagtaaacctagcgagacatggatgcactgataacttgatccactttcagaatgaaaagaaaaaaaaatcacggcgtttacataagcttcatttgctgtaccaatccagaaagaggacggaaaaggtaagaacaaagaagaaaagcaggaggaaggttctactgctgctgttgcgctggatcgcctgggatagctccttgttcccacgctccacattgtttgtagcttcaactgcctgagaagaaggcatatagcacaattggacctcccgagtcatcagttaaagatcttataccccctccattctataatataaggcacaaccacttttcttagatgtttcataatataaagcatgcatgcaagcatgcaattaactataac

SEQ ID NO: 5661 - DNA, 11261 bp, Oryza sativa
ggttaccccgcacatactcgtggctatcatgtacttattttggagactaacaaaattgttgagacttgcaaagtttcttttgatgaggctagtccaggtactagacccgatattgcaggtacactgtcacaggttcagggggaggatgattgtatttttgaagacgagagcaacgacaacgacaacgacaaggtcggctcggccggttagaccgggcgccaggccggtcagaccgccggcacacctccggttagaccggcataggaggtgcggtcagaccggccagggtcgtcggctgagggttctgttgatgctgtttgagatggtcctctagagattacaacttcgaccagtactgatacagaacatggatcaacttcagaagtcactgctcctttgcacatttaacgacgacatccgccggaacaaatcattggtaatataggtgagcggactacaaggtctaaggtaacgactcatgatgtttgtgcaaattctgtatttgttgctttttttgaacccaaagatgtgtcacatgcattaactgatgaattgtgggttaatgccatgcatgaagaacttgaaaattttgagagaaacaaagtttggactttagttgaaccaccttctggacataatattattggaactaagtgggttttcaaaaataaacaaaatgaggatggtttgattgtgagaaataaagctagacttgttgctcaaggttttactcaagttgagggtttggattttgatgaaacttttgctccttttgctagaattgagacaattagacttttgttggcttttgctgcttcaaaaggttttaaattgtatcaaatggatgtgaaaagttcttttctaaatggttttatataggaggaagtttatgtcaaacaaccaccaggttttgaaaatcctgattttcccaaccatgtttataaattatctaaagctttgtatggtttgaaacaagctcctagggcatggtatgataggcttaagaactttttgcttgcgaaaggtttttcaatgggaaaggttgacaaaacgctttttgttcttaagcatgctgataatcaacttttcgttcagatttatgtggatgatatcatctttggttgttcgactcacgctttggttgtagattttgttgagactatgcacagggaatttgagatgagcatgatgggtgagttattgtactttttgggattgcaaattaagcaaacacctcaaggtatttttgtgcatcaaacgaagtatacgaaggatattttgagacggttcaagatggagaattacaagccaatttcaacaccaattggttctacagctgtgttggatcctgatgaagatggagaagctgttgatcaacaggaatatagaagtatgattggatctttgttgtatctaactgcttctaggccagacatacaatttgttgtgtgtttgtgtgcacgctttcaagcttctcctcgtgcttcacatcgtcaagcagtcaagcgaataatgtggtatttgaatcatacacttgagtttggaatttggtattccacttcatgttctatatgcttaagtggatattctgatgctgattttgggggttgtagaattgataggaaaagtactagtggaacatgtcattttcttggtacatcattgattgcatggtcttctaggaaacaatctagtgttgcccaatcaactgctgaatctgaatatgttgctgctgctagttgttgttctcagattctttggcttttatctactttgaaagattatggtcttacttttgataaagtacctctcttttgtgataatactagtgttatcaatattgctaagaatcatgttcaactttcacgcacaaagcacattgatattcattttcactttttgagggatcatgttgagaagggagatgttgaattgcagtttttagacacaaagttgcaaattgctgatattttcactaaacctttggattctaatcgttttgcttttctttgtggtgaattgggcataattcatccttttggcatggtttgagggggagtttgtacctcatggttttatcaagtaataatatgacaatgaaaaattgagaaaagagagctttgtttatacatatggtattttcttgtgcatgctagcaatactatgaaggtttatttgtctctagcatagcttgtctgtattctaatcttttcatgagatttagattttacttttaagggagatgatgcatgacacttaaattctatacttgaattaagtaaatatgcaatgttgatgctagcatatggtttgatttgtaaatgctctatatatatatgctttattgacttgttattcctcaaatagctttaattgctcattgtgaaaaagagaataaaaatatgaaaaaaatgaataccgaatccttggaaacagtcttgacgacagggatgtattcgatgtgagaaaaataatgggtgccgaatctctagaaacagtcttgacgacagggacgtacctggaataaaagagaaaaatatgagcaaaaaggctcaagaaaaagaaaagttaaaaaaaattctcttggttattttgtgctaaaggttatttgagaaagagtgataaatgcaataggtgtatgagtttagtgtttattcttcaacctatgtgcttgttaagatgttgcattataaatcgtatgaaatcatgaattttgattgttgattcaagcttaattgtaaaatctttggttcatggttatactttaatgcatgcttgttatattatagatggatttatcttctttttattgcaacacatgacttgatatatatgtatgctaagcccttgaatattaataaacataattcctatgcttgatgaaatcattgtcaaaaggaggagaagtaatgtgaaaatttttggatttttggagaagcaaggtgaatttttgacgagttgttgagaagagcatgtttttttttgggttcatgagggaatttctttcttttaaaaagggggagaagttttcttctggattttcgagcacgatgtgtacttttgtacgaagtgtgctttttaccaattttgtttttatttttccaaacaccaaaacatttttgatggatttgccaatgtgttcatcaagggggagattgtaaaatcaaatgtgtttttgattattattctgtgatgaacaattgggcattggagattattggttttgttatttggaatttatttacgaagtggttttggagatgattggatttacaggtgaatcgtaggttcgttattttatgtgaccggtcagaccgggctgtgtatgccggtcagaccggcggtgatcaagcggtcggactggccagcccgcggtctgaccggccgacgctatgtcggtttcggtttcgggttgtttatttggatatctgtgattattttatgattatggcttctagatggatactatacgtatgtaatactgttgtttgctactaatgagtcaagttggagatagcttggtctcagaatatggttactttgtttatttcatgtgtaggtgactcgatgcctcgggagagtatttacggtgatggaccgggagtcggcttggggataagacgacgtccgtggtggtcagagatcatgcgagatacttaggctagagttgatgcacgtggttggtggagattccatatggcatacaatggaggtattgtgtgcgtatgggatgcggagtcgaatttggaaggagtccaaatttggtacgattggttatgtaaagtttgtgtcttgtactagagggttttctaaggtgtttaagactcctagtatgagtttggttcgtggctgtaggctgcctacctcatgtataaatagagggggagcgtgaggcttcccggtatcgcttttgagagcaattgagttgagttttgagttagggtttcgagtttagtcgaaatttttgtaaggagtgctgttggtgcactttgtaaatacagagataatcaataaagtcgtcatccactttaagagttcttcgatttgtgtttcaccgagtttcggcagtccaaccggcgatataccggcggtcagaccggcggcatacgggcgatcagaccggcggcggcgacaggcgcggcaggtgacatcggcggtcagaccggcggcatccacacggtcagactgacgatcaatctcggtcagaccgacttccgtcgatttcgagggtaacttttatttccgctaaaagttttcggtttttaggtataccaaccattcaccccccctctggttgtcttagttcttgtgttttgatcctacataatccttctacttaacggacaatctctactacttcctccgttttatattataagacttcctagaattgcccatatttacatagatattaatgtgtctagatttattaatatctatatgaatgtggacaatgctagaaagtcttataacctgaaacggaggtagtatttcaaagtgagtcgtggtggtctctgtttttcctttgtaattaaataatagatctaaacaaatttccaatgagctgcgaaatttccagctaactgtgctgtttctactagtaatacgacttattagatggtctgaaactctgaatttgtttttctgaaaggtctgaaactctgaattgataaaagatagtatcacgtttactaagtaggcagcctactgggcaacctaccatgtcccctacgtcatttcccaacaatctgcaccaacaaaatctaacaaaaaaagaagaaaaagaaaaagaagacatcgagacagacatatcaacccaaccaccatcaagtccccgactctctctaccacgtctatacgcgtgcaaaccgcaaagcatatatacacctacactgcactgcactgcattgcacgtacccaaccgatcgaaatcgcaccaccaagattaccatttcacatttcgcaatggcagccgtagaagcaaacgccgcaacgacccaccatgaaatcaccacggccgccgccgtcaccgccggagagcggcagcagctcaacgccggcggcgaggacgacaagaatattgggatgatcgtgactgacgacgatgacgaagacgaagacgacgagctgttcgagctcgacatcgccctcatcgaccaccgtgacggcgaagagtactacaccaagcgcctcgtgacgagcagctgttgcgtcgctgtcgccgccgcagccgccgccgccgacgacgacgacgaagaagacggcggtgacgcgctcctagccaactgcctgctgccggtgagctcggtcagcagggcggtgccggtgacggcgagcagcagcttcgtcgtcgtctcgtcgtatcccgttggccgccgctaccacggcggcggtgggtgcggcgacgacgacgacgacgacgctagctggaggtggaggaggttcttcttcacgtccggcggcggtggcaggacgcgtattggccgccacaacagcaataactctgcgaggttctccttctcaagattccaaagcttggcaaattttcagcgatactgatgaacgaatatgttctactgattcaaaggggcaagaaagagagatgaaatttgacgtgtatatatagccgatgtacagattgagtttctgggattgaaattttgtactagctagcttagatagggaaactattttaacagctcgagtggatgtccacccgtttattgcatgtcatctaaatggttataaaaaaaattaaaaaaatatgaataagatagatcaatatgtaatgtatcaatccacaaacatacaatttaaaattcaacttctacagattgtaacaaaaataacaaacaaaactcaaattactatatgtatatttacagttaaatttgttatttttgttacaacttgtagaaattgaattttaacttgcatgtttgtggagtgatatattacatattgatctatcttaccaatttttttgaaaatttttcgtagccatttagttgacatgcaataaacaggtgtacttccactcgagctattagaatccatcccagcttagatatggtaccaatcttatcaaattgtgcaaaattttcagttgtttggaattaagggcatttgtgattttactggacaaaatttatgtctgttacttcaagctttgcccggcaattgtacaaaattattctaaatgtaaatttaaaattaaacttaatttaagttagtatctttttgtggtaaccgccagtttagagcgtgattgaccattcaggtcaagagaagagaatgtgcggtggttgactggtccatatgtggccagttgaatcggatgcccacaaaagaagcccacttaggccttctctgtataggccgaaattttggcccatatacatttgagggccgaaccaaatgaggcctcaattgcaaatttacttttacaatgtgcggcccaagcctactactggtagacatacgctccgcttgttgaataagtacggtgtacggccacctcgccgtcgcggccacggcccctctcctcggcgagcacgccgccgcccgcggcggcgggatatcccctgtagatgaccacacggtgatcgtctccgccggcccgggacgacttccacggcgagccaggtgaagcgggtgaggattctctcggcctcggcctcggccaacccatccccatctgattttacagttcattgttaccgcatcattctgtttgctgcacctgcgctctctgctactctgctgctggtccgactgtttctgcgcaggagatttgggatttccagcagattacacgagtatgcttcaaatttctcatcatgttgtgctaatggggtacagcctgattagcaatgggggtacacttgtttgtgtaaattgggattagatccgaatccaatccgatttctagggaggttgagatttatgaaatgatattcatctagaatcaagttcttagagggaaatgttgtgattcaatgggaaaaggggaaatagtggaggagagctcatagcctgatagtcagattttttgcaagaatgtgtacatgctacagaatggattattgccggccgtttggatgttcctctggatcaccgacaatttcatatgggtgttcctctggatacaatgggtacatcccttttatgtcatgtttttaggaatgtggtagcaggctagcggcgctggtgcaatacagttaggagggtcaggagggtctttgtttgtccttctacaaggtgacacaacaagatctaacaaacttcatgtccagcagatcgcgtgtcaacaaaagtgcacatcttgtggagccagaaagtgcatttggtggataaagctttttttgccagctagcccctgtatcagttatagattgctaatatttgcatgtgaatgcactggtatttatcatgactctcaatcttcttacaaaaacaatccattacttaatttttgatacgggaaacaatctgacactgatacaatctgtcaaatgcatttggtttattgtagattttcttgaggcaaatgacgtaatgatgaagccttgatccacaatctagtgatgtggcagataatgtagacgacaggagaaactattggatggtttttatttatcacagcggggataatgacagctggaattttttagcgtctcctggcagcagtctctctctgagcattgaagtagacagcagcgacaggaaggccaagttcgttctcctcagcaaactggcgtgtattgaaatgatccctagaggatggcacaactacagcctgcctacgcttctgcttgaagagcacaaaaacgaacctgtggataccaatgctgggctttgggctctcatagcttatgatttcccgtcctgcaattcaaatgccagaaagatgcatattaagaacaaatacatgcaagcatggaatgatctaatgcaggttagggagaggacctaccaaaagaggcatccgttgttccaggtatatcagttacaatcctgcataaatattaagggtaaaatttaatgatttggccacaccatggtcattatctgttcagaaatatattgttttttggaagaaatatttttcttattagaaatatgatgttttgtatgaaaacaagaaaaatatgtggtattagactactagtgccatctccatcagaaacataaattttatagtgaatcaataatcaccaattggacacaaatgtatagattttggataagaagtgttgaaggttaccaatgtaggtgttcccttagatatggatcacttggtcctggcacatctgggtctgtcataacctgaagcattccgagttatggttaataggggggggggggggagagtatgaaatgcactgaaagctaactatggaactcccaggatagagttagaccagtccgtaccaatgtgaagaaagaacgcatatcacccccttggacctcgactcttggtttagatacaactgctgatgggtagaactcatggccattaaagacaagcttgtttgaattgtaggttactatcatcttcgtacatgggttgaatgaatcaataacttctccgatcacccgcccaacaacaagaggctccacagacctagacatggttggagccttggagggacaggtaattatattttccgaaattagtgctctggctagttgtaaatgacaaaacctagtgcacttcaatgtgcccttggttgcttattgggcattgtagagtgatgagcctctatttatagtggcaagaagcatgctgtcttctttcaagttgtagacttgtagggatatatgatagaattttccaccagaatcataagatatgtatgaatgtgcatatttgtttgatcttatttatacatattcctctattccaggccttcttttgattatttataattttatatgcatgtcctgaagattaagaaaacacttacttttttatttgattgaaattaaatgtttttaaagtaattttatttttcttgttattttggatatcaactctggacacaaacttgaccattaatttatctcactatatgttagtaatatattgatatgacaggtttttaattatcagtcctattaataccattttacatgacaaatccaattaccctttttttattgtagcataatctaaatcttactaggatagattgcaatcattctaaattatcattaaagaaaaacagagggagtatcatagatcactacctatgttatttctttatgaaacataagacacttcaggcaaggagatctctgaagattatgttgctgaatttatgttatagtggtgggaaaaggggctcatgaccctatatgtaaggcctgcatgacaatgcagtctgcagaatttttgcacactatcaaattgtcatgtaatttctatacttttctaaagaaaaacagatgagctattatacaaatttattttttagttttttggcaataaattgacagatgggttttggggatggagctgcaaatagccacaaataccttaccgaaaagaaacatgtagataaaatttcccacttttaggaggtatgcaattgtggataaaatgagaaaaaaaaagaaaaggaaagggactataatccttctggagtgatgccgttcacctactccctctgtcccaacaagaatcaatgaatctggacaaacacttgtccagattcattgtcctaggataggttatactaagttgattctttttgggacggaaggagtaaaatacaaattcattcttgattgctagatttgatgttacactacggaaacataaaggcttggcttgctgagattcttatcctactgttttcaatgaccttcttttgttatctatgaggcagatgcactctacactgtctgcgtggaagcctatcaacccccaaatgtttgtcgttagcagccttgtttgtctgggtaagtctcacgtagcttcttctttttctgttaacaaaaagcaagctatggagttgaaatgctgttggaatttttctttctcaaactgtgataccaactggattataccattattatctgtttactctcttccttggagtgctatggcagcacagcaaggaacagaataaacgaatgaggtgcagcgccgcactgctgccaccacttcaccgtgtgggggtactgtctagtgctgagatgtcacttcactgataaaaagatcataggttcttcttgattgaggaattaaaaatacttctatattgccataagtagtggagccaagtacagccttttgcactgtgctcttttggtctagtgctatcatatttgcttgacattttgtgcaagtaaaaatactgtagtcaagtacaccttggcagcatttttctactcctaatgccataatatttgcttgacacagctgatttagtggaacctcataactgttggctgtaactaatggtaacttatctgtgatgtagactagcagtgcacctttagcttggtgtgctgacttgtcactagtggtcaggacaggcgtgcaaggtcagctgtgagttatcattgtatttcttagacgaatatttcttcagctgttttgtaacaggtaattctccactagtcacagaagattaaaattgcttatcaatattgttctgcttcgctaatcggtttgtataacccttacacaccataagcactttccacttccatgcagacagtgatgttttctgtttgctgtcaaaattgttattgggtaaaaaggagacacccactgagccagaagatgcacaatggtaagctacctgatctaacttttttatgactaagttgcctgaattcatattggtgggaagatcattgtgggacaatgcaggtaggaaatcagatattcagatcatgacagggtgactctagaggaagccatgccccaaagaatctctattagatcaatgtgtcgctgcttgattgagtatgagtcagctcacaagattacactcaatgtgaattttggctatcttttttgtttctttgaaattgatttcaattccgtttatcagtggtgtggtcaatggccaatagatactgatatcataggttgctccaatcagtaaatgctgataattttcaataggttcctccaatccgtaaatgctgatatttttcatcttccagaataatatttcattattcaattaccgtatcctgatgcacatttcacttgttcacccagctccagaactttggcagca

SEQ ID NO: 5662 - DNA, 42603 bp, Oryza sativa
atgtcaccaaaaatgtcacggggaaatgtcactgaatctgcgtccgtgaacacgtgtgagttcatgtgtgcagcgtgcgtacaccgagttgacagtggtggggggattgtcgagcgcacacacctagtcacatgtatcgggagcacgagagggcgggagcggcgtcgcgcgtggcagacgcgacgacaataagtaacgctctcgcgtcctcttcatgcaaacttgagacggaatcgcgacctcctaatcacgacaaaggtgatctaatcctgtaattcttttggctgtagttataccaacgcaaaaaaaagctgtaaacaatatattattttcttattaaggatgtgttcatttggaattgttaatccttctcccagcatgtaaaatggaacaatagatcaatatatgattaattaaatattagctaaaataactttaaaaaataatcaatataattttttaagcaattttactgtatatttttttaaaaagaaaatactccatttaacaatttggaaaacatacgtgtgaaaaaaagaaagtagaagtttggaaagtgtattatagaacacaatcttaagacttggtaagacttaagactttagcactaactcatgattgtcttgatatcttctgcatgctttctaactattccctccatctcataatataaggcatgatcaaatttggcacagtcttcaaaatacttaattaggctgtgtttagttcctgaaaagagttggaagtttggggaaagttggaagtttggaaaaaaaaagttggaagtttacatgtgtagaaaagttttggatgtgatgtgatgtgatggaaagttacaagtttagagtagttggggatgaactaaacacggtcttaatcatgcaataatatgagcttcgttttgcgtgtcggggaggaacccctcctcccgaatacaacctagctaagtgagcctaaatattgtttagggtgtaaagcataccaacacaatagttcggggttgcaaattagacttttttttcttaattttaaacagatttcgctgctttaattattttagcggatgatctggtggcacgctttcatcgacgctagttaatcgatctgtacttccatggacactccggcggccgccgactggtcggagcttccggccgacgtgctcggcctcgtcctcctcgagctcgagttccccgacctgttccgctccgccgccgtctgcaagctctggcgcgccaccgcccgcgacatacgccgcctcggcctctactcccgcgcgcagacgccctgcctcctctacaccaccgccgccgccggcccgcgcgccgccgtgctctacagcctcgccgacaagacgacgtcctacacggtccccctcccggacccgcccatcgcggagcgccacatcgtcgggtcatcccacggctggctcgtcaccgccgaccaccgctccgagctccacctcctcaacccggccacaggcgagcagctcgacctcccacccgtcgccaccatcgaacacgtaaggccactctacgacgacgccgggaacctcaacaactacaagttggtctactacgacggcggcggcaacagtcaccggagcaacgacgatgacatgcacacggtgacgcacccgccggagacgttcagggagttcttgtatctcaaagccgtcatctcctccgacccatcgcgcggcgacgactacacggtgatgctcatccatcacccatatcttcagctctccttcgcgagatccggcgacaagaagtggacatggatcaagatggggaacaatgagtgtgagtggttcgaagattgcatctaccacgacggcgtgttctacgcccagaccgttcacggcgccatccacgccattgatgtcgtcagtgcttcttcctccttcacccatagactgattctcaagccgaccatgggtgaattgggcaccctctacattgtacgtaccacggaaggtgacatcctgcaggtcttgcgagtcacggaagaagatgaaggtagcgagcataaggacgtacgaacaactgaaatcggggtgtacaaggttgactacaagaagcaagatcttgatgacgtcgatgacataggtaacaatgcattgtttattggcactagttactcgatgtgcttgccagtgaaggattatccacacttgatgccaaatcacatatatttcgacgatgactacgggtacttggttcaccgtaaacatcttcgtcgggacgttggagtttatgattatacgaatgacactgcgatcgatgtggagtatcctcagccgtggctgaattggccactagctccagtttggattactccaagttttactaaaactgcaaaatatagttgactatataaatgcgtgtaatgttaccctttgtgtacatttttttagtaaattttataaaactattgatactttaactaaattatcacaaaactgcagatttataatgatgtatcataaaactacttcgttttgttccttattaagtgatgtttcggacaatgttgaggtcaaacttttataattttgactatcaataactttaaaaatatttagtttaaaggaactagaacaacatatataaatttatcttttaaagtactataataaaagtaaacatacatttatttattatatatattatagtagaaaaataagatcaaacatatatcttgtagaccgtgtcattgtctaaaacgccaatcaaaatgaaaccggagggagtacagctttaataataaatttatcacaaaactacaaaactacaggtttaacactactagaaaaacaatttttttatggcattaccctataattgtcgctggtggctatatgtaaaaaccgctagcaaaaacataacgaggggtggggggttatggactaccagcgaaaaccgattttcacgggtggtcatgataagaggtcgaccataaaaaataactctattttttgaggcggatctcttaagtatccgcattttcgctggtagtaggtaaagagtactgctgcaaaaaaaaatttcgaggcgaatatataatcccaccgaagatctcagtctttccaccccacctacccttctccatctccctcctatcttcttacccttctccaaatccactcttccatcctcctccctccccaccgaggcgcaggcgacggcggctccggcagcggcaaaggggatgggtggcggcggtgaccgggctcggcggcggccagtctcggcgacgacgacacgtgggcgatggatccggcggcgggctctccttgtcctcctccctcctccaccgctgccagttgccgtcgccaccaccgctgcgggctgccatcgcctctaccgcctctccgccgcgagctcagggccggccggatccggctgccgcgacgtcgggggtggccggatccgctgccgcgtcgacgggggaggccggagccaccaccaccacgacgggggaggtcggatccgccgccgggtcaacaggggaggccggagccgccgccaccacgacgggggaggttggatccgccgccgcgatgacaacgtgaccgctgctgggccgcaggcggcggatccggtcgtgacgagctcctccccgtagagggtgacgagatcggcgtattgggattggaattgtgggttggaggattgggattggggattttagggttttttttttttttgcaggaatgtgaaatgtgatttttcggtttgtaagttcatttgttcttgatttctctctaccgttctctgcttgcttttctttctcctagagatcgatcgataattatttgagctcttatggtgcatgtgattgtttatgccagcaaaaagagcatgggtaagtatctgtggaaatttttgaatggtggagcgttgacggggctgacggagcgccgcttttttttttttgaaactttgcagtattaacactggcggctcacagtgtaaccagccagcgataattcattttccctagtggcctatcttaggctaaacgccagcgaaaatagatctttgctggcggctggcttaagacgaccaccagcgaaaatgaattatcgctggcgttcgataactgctagcgaagatcttgatttttattggcctttgtttgtggcggctccaaattccgccagcgaaagccaaaatggccgccatgaaagatggttttcgtagtagtgtaaggctaagtatcacaaaactaaaaatttaataataaaattaccacaaaactgtagagtttggggtttaaacccttagcactaatgttatggttaagttataaactttcaagttttgtgattgaattgatgttaaacttgtagttttgtgataaaatttgttattaaatctgtagttttgtgatactccaccttaaatttgtagttttatgataaatttgatgttaaaactatagttttatgattcatatataacttaaattagtttagtgaaatttactctcttttttgttgatactcaaattgaagcatcagaattctctggccatttgattaatcgatttggatggaaactttaatttgatatccgatttgtcctccaatatatcaacaaaccagagtgctataatatgctattatatggattctttttcctcgttttgctatttttgttttgagtaaaatgtagggcggtccttaaacttgtaggagtgtgtcatttaggtccctaaactcttaaaatgcatatacaagtcccagaacttgtcatagtgtgtcatctaggtcccaaatgaccacagccccttcaggatattacgtggcgttgatgtgacatgccacacggacatgacatggcattattttaaccgacaaatgggacccatttaatttctctttctttttcttttttttcttctcatttttttccctttcttctcttttctatgtgatccgtgtagaagaaagggaaaaaaaagaatgagaagaaaacaaaaagaaaaataaaagaagaaaaaaaaagagaaaaagacacgccacgtccacgtggcattgccacatcagcgccacgtaggatcctagaagggatgtgtcaatttgggatctagatgatacactttgataagttatgtgacttggatatgtattttaagagtttacggacctatatgacacaaccctacaagtttaaggaccgctaatgcattttactcttttgttgtctactccctccgtttctaaatatttgacaccgttgactttttagaacatatttgaccattcgtcttattgaaaaacttttgtgaaatatgtaaaactatatgtatacatataaatatatttaacaatgaattaaatgataggaaaagaattaataattacttaaattttttaaataagacgaacggtcaaacatatttaaaaaaagtcgatggcgtcaaatatttataaacggagggagtattgactaacgaccgacaactttttaaatctatgaattttgtactccctcctttttatattgtaagatggtttgccctcatctagatttaatagcatcaatataattttatatacatcttatcttaactacttacaaaattgataactttccattagtacactgctggagaaacccacaatagtctcggtttgcaaccccctttagtcccatgttgaccacgaatccaggtctaaagatgcgatctttagtcccgattggtgtgttaccaactgggactagcgctaccttctttagttttttcattgttttttgttgtttgcatattgattttgaactaaactcaacaataaaatcatccacgttcatagaaacataaaaaaatcatccacaaattcagagatcgaatcaacatactcaaattgttataaaaaattcacatcacaaatttacagatgcaaaaacatcacaaatcatccacttgtctacgccggagaaaaagtcgcgcaggcccacggcgccaggccaccttcgctcgctcctcgctgttgctgctacaagaaaaggagaggataagagagaggagagaggaggaaagggaggaggaggaaaagggaggaggagtttgtaatcgagaaggagaggataaatgtgagggattatatcccacacgttgatttagtcccggttggtaatatcaaccgggacaaaagatagtaggggttagacgttttttgatccgggactaaaatgatctttagttctagttaatgttgttgggcttttcaaccggaaaaaaaaagatgtttagttcctgttcctattggaatgggactaatatgatttttggctgacccagtagtggtaacaccttatttttgtctgtcaatcgtccgattctcaatctctccataatagccgactcgggaacgacgagatccggctgttgataaaaactacttcagtttatcccgaattcgttgggatgggaactgagccgaaatccacgggatttagcgcaagattgatggagctttcttgaggaaattgtagaggagattgggaggaacctattataatatccaatttagaaaggggagcaaaggggaggtgggattggaaggagaggcagcgccggcttcgcacgggcacaggggttcggtctggaggagcgagcgggaagaagacggcaatgtggcacgtgggccccgagcgatagagagagaggagggaccgagggaggctcctagacttgctctgctgctgctgtgccgaaggggaaaggaagaaagcaaacaggccgaaaggaggaggagacaaattagacttgaccggagagaaggcaagcctgctggagagagggacagaaaaacagacttcactggaattggtccaagaaggagggaggattttaattacttttccatttaaattaatcactgaaatgatctttgaattttcaaaaacacttaaaatgcttaaataattccaagaaaaatcaagaaaatagttggacactcaaaagtatttaaaaaaatatttatctagatcatttaatgattaataattgtttaaataattattgaattattctttgtattgttaaaattaataaaagaaaatttcagagagtataattaattatggagaatttaataatgattaaatccagccatgttttaattaggaaattgtatttctcacattaaacttcacttgtaaattagtgaacaaaatccacaatcccttgtgagaaggaaaataatattgacttggacattcatttatgttcttcaagggactacatgaatggaaatgatgccggaggaaccagtagcaaattgaatgatagggcagaggtgtctagtaaggacaaaactagtgtttcggagctggaggatggaaatgtttgttcccatcatgggattgaagagcctaatgaagaatcaatgcaaggcattgtaatggaacaagaagaattaagtgattcagaggaagatagccagcatgtcgaatttgaacgtgaggaaatggatgattctgatgaggaccaagttcaaggtgtcgaccccttgctggctcaaaacaaggtaatattgcagtttagcacatatctgttattctagtatcattttactgttcatttctggatgtagaattctactgatttccccattctctagaatgatttcaccaatggcttttaacatatctattgcactctgttgcttatatcatggaaggttacctttgtatgattgcttttgcaatttcttggacttacctgaataaaaaagtgaagcatcacattgtcacatgttcaatcaataattggtgacaacgctgcaattttccctgaaagatctcatgtttgaacctttcttctatgaattaatgcttgcaatatgttctttctcctcttccttttgacatgctgataggctgatagctatagatgtttccttgtgcaggaggtttcaacatcagtgggttgtggggagtatgaaggtagtaataatcagagccagaaccaacaaatggtgtgtttagttcacaccaaaattgaaagtttgattgaaattggaacgatgtgacggaaaagttggaagtttgtgtgtgtagaaaagttttaatgtgatggaaaagttgaaagtttgaagaaaaaatttggaactaaactcaggcctacaggtgagtaaacagggtgcagcaacgcagaaaccacagaggctttctaatgccacaccagcaagagaaaagctgaagggggataatgcgaaacgtataggatctagaacaagcccacgatcatccacgtcccctacaactgaacctaaccaaacgaaaaccagaaggcctaaagctcagcaggtacagattggtgccgagcgcaagtccagtgattcaagaagaagcagaaaaaaacctgctccaatttccagcatcttgtctcatttgcacatcggctacctgtttgcctggccgcaatattctccagatgatagcacggcaatctgctgtcattcgcatttctgtgaacggagcagcaagatcaacattcgaaggtgagaccttgcaagtacatgtccactgttgaatagcaactaagcaagactgaagtggtgttccttgcttcacctctgacaccattgacacattagcctgccattgagtagttaattgcttttgattgacttgactgagtttgtgtcctctccactctccaggaaagtctcagcgagtcatgtgttgtgttacagcttgtaacatgagccaatgtgttaatgtttctgtaaagttggcgtagcgccatggccattgacgctataatgttagtaatgttgattagtgcatggcttatttggttgcacatccatttttcctaccatcacatatcttcaacctgtactgcttgttatttagatagctcactccaattacatattgcaagcttgtaaatatttttcaagaaggcatttcattccttaaaacatttttccccaacggaaaccgttggccggaattgatttcgccttatttgtagagaaatagcatacacagaacagaatgtactgatgtatatacgagggttaacgacgttgtgaaaccgctaatggttagtttgtgaaaactgatacagtatgttttagctgttttttttacggtttttactggtttttggtaaaatggtgaggagcggtttttaatttaaaacggaaaggtaaaccctgggagtacaattcagtcgttcaaagaaacagaaaaaaaatcatcagtgcctcagaggcagaaatcacctgtaatatgtgtataatcattgttgtatgtgtgaagtatatatttccctatttttggcatagctaaattaatcctttattacacaaaatctatggccgtccagcgtaattatgcactcctgtccactcgtccaacaacaacctgctaaatttgcgtcttgcaaagatcacctgttcatataatactctgcagggctcccctctgaaaaaagttgagatttcagacaattaacatcactaggagagaaatcaagaaacaagctagccagcaatggtgtctctccgcgcggccatcgtcctcgtcgtcgccgcctcgtcggtcgccgtcgccttctctcgtacgccacgcaccccgaaactaattgcatcgatcgatcgatcagcaatggcgaatggcgattgaattgatttggatggatgcagatgcggaagggaacgaggggccggacttcacctacatcgaaggcgccatggacgggccgtcgaactgggggaagctgagcccggagtacaggatgtgcggcgaggggaggtcgcagtcgccgatcgacatcaacaccaagaccgtcgtcccgcgctcggacctcgacacgctggaccgcaactacaacgccgtgaacgccaccatcgtcaacaacggcaaggacatcaccatgaagttccacggcgaggtcggccaggtgatcatcgccgggaagccgtacaggttccaggcgatccactggcacgcgccgtcggagcacaccatcaacggcaggcgcttcccgctcgagctccacctcgtccacaagtccgacgccgacggcggcctcgccgtcatctccgtcctctacaagctcggcgccccggactccttctacctccagttcaaggaccacctcgccgagctcggcgccgacgagtgcgacttcagcaaggaggaggcccacgtcgccgccgggctggtgcagatgaggtcgctgcagaagcgcacggggagctacttccggtacggcggctcgctgacgacgccgccgtgcggcgagaacgtggtgtggagcgtgctcgggaaggtgagggagatcagccaggagcagctgcacctgctcatgtcgccattgccgaccaaggacgccaggccggcgcagccgctcaatggcagggccgtcttctactacaacccgccgggcagcgccgtctccttccaggaattcgccaagtgattctttcttttttttttctttcttttttttttggttttttgtatttgatgttgagttgatttgattaacatttcgacgtatgatatgcactatatataattaattaacatcgcaaaatactttttttttcgagaatacataaagggctcgcgtatctttgtattaactagtgggggtggggattaattactatatgcttggacatttttccgttcttcaagattgacgcatcgatcgataaatgtatatatttgtagctaagaaggggtaaatatactaggagagaatacactctattgtcattgagtttgtctctgtcaacgatttgctactgacattgtatgtttctatcagcgatttatcaattgtttgctaggttttcccccgttgttctactcttccgtgtcaaagagtgcatgtcagattaagcagaaccaccagctaatccccttcgatgcgcagccaccgcgccgcaccaccggccggggcttgagatgggaattgaagcacgacggagatcgagactcttctactttcaagatatgatggtatagtcttacataggtgtaggatcgaacagtaagaactaattcaagcagaggaggggtgaatggttgtagtaccaaaaaaacaaaacttttagcggaattaaaagttaccctcgaatcgatgtcgatcggtctgactggaatagatctgccggtctgaccacatcgatgccaccggtctgaccagtatagatcgcccgatctcaccgcccgaagatgccgaagtcgcctgtcgccgccaccagtctgaccaccgtgtactcgctggtatgaccggtacaaagccgtcggtctgaccagtggtgtctcgccggttggaccgccgaacccgagcaaacataaattgaagaactctcaaagtaaatgacaactttattacttatctctgtgtttacaaagtgtagcaacagcactcctcacgaaaatctcgactaaactcgaaaccctaactattctctcaactcaatgctctcaaaagcgataccgagaggccacacctccctctctatttatgcatgaggtagacagcctaaagccacaaaccaaacttatacaagaagtcctaatccacctaggaaaccttcccatacaagaaaccaactttataaactccaattgcaccaaatttgaactccttccaaattcgactccgcatcacatagacacacaatatctccattgtatgccatatagaatcttcaccaaccacgtgcattgatctttagcctaagtatctcgcatgatatctgatcatccggacatcaccttatctccaagttgactcccgatccatcaccggcaacactctcccgaggcgtcaagattacctacacatgaatcaactaagaaaccatattccaagaacaagctatctccaacttgactcattgttagcaaacaacagtattacatacgcatagtatccatctagaagtcataaacacatataatccacggatatccaatgaaacaacccgaaaccgaaaccgacacagagtcggtcggtcagaccactggctggccggtttaaccgcatgcatagcttcagtctgaccggcagcacctgccaggtctgactggaccaaacatccagcagcacctgttcatcacctgcaaattcaataatctccaaaaccacttcgccaataatctccaaatatcaaaatcaataatctcatatgccaattattcatcacaaaataagaatcaaatacactttgattttacaataggtgctcatagagataaagtatgtgtgtactcatagtaggtgagtgcacacgcgttatatgtgtctgcatttgtactatctttctaaaaaaaggagagtgtatatgtggcgtgcacatctttcgtgtaattgagagagaacaaacaatataggaataagtacacttgaggccccttaacttgttaatgaattcgattttcgtcctccaaccagaaaaccagatacaacaggtttctcaattgtcaaaatcagtgccgataactagataaggtccctcgatggtttgcacgacagttttggttgacgtggcgtctatgtggctaatttgattcggtcttcatctgacgtggcgtttacatgacaattcgatctaagaaaaataataaacctcgtgggatccacatgccagtttcacacaaattaataaaaaaatagtgggacccatgtgggccagcccacataattattctcagccctcctcttcttcctcctctctcggtctctctacataatattattaatttgtgtgcgaaactgcatgtgggtcccacggggtttattatttttcttagatcgaattgccacgtcaatgacacgttagatgaagacagagtcaaattagccacgtaggtgccacgtcagccaaaactaccatccaatctgccgagggacctcatgtgcactggttttgacaattgagggacacgttctatctggttttccggttggagcacaaaaattggattggtcgacaagttaagggacctcaggtgaacttatttccaacaaattgtaaatgggccgagtagagccagcccagcggctactggccttggtccaccttggctatatatatgaatgggcctcagattcctcggcccaggcggtacacgagcaaagcgaggcgattcttcttcttcttcttctctggtggtgtggtcgggaagctaaacccgggagaagccgcagcgcagcgagggtgacgaggaggaagacgaggggagagagagagagagagagggaagcagcattggggttcgtcgcctccagatctccgtctccgatccggcgactgagctctcgatcgcctcctcctccccgccggcaaccgccgcctgctctgggttcgccatcgatgcatgcaccctgctttaatttactcctcgttcgttgctctctctctctctcttatcccctatcgattcgattccttcgagttgatgagcaggtcccctccgcgatcgatgccatggatgtgaagggtcgctccgcctccgcgcccgcatcgccgtgcgtcgtgctcggggacgacgccgccgatgccgcagcggtgcgtgtgtcctcttcctcttcctcttcctgcctctggttcgattggtttgcgattcgatgcgctcgtgctcctagttttgcttttgcgctcaagagagtttttgtctgggtagtaagtagtaaccaccgcctaattaactactcctactagttaattgatgattggatgatgccgcgtgttacatagctgcctgttcaatttcgatcaatacaaaaactcgtccgtgctgtgatttttttttttaatttcattctgtttctctgcctattgagcaagacattgttactagaggtgttatggtttgattttgttttttcttcacaggttgccaaagttgatcggaaatatgggagtatgctcaatgctgggagtccactccaaattctttacacagatcagttagctgatgcgaaaggtggtcttaaggttagtttcctcactcagttgttattgttgtttcattacaatatctgcctccttggcacctgtatcttgtggggagaagaaaaatgagaaattatgctttctggaagtgaatcgagtttgtgaccagacattttgtatttttggcccttcccagtcacacgccttctgaaggtggttgatattgtgatctgcaacaacaatatatgacattcttctgtcctctttttttattcaggcaaatgcaccatgtgaaataacttctgttacagaatgcacctgccctctagaactacaaggcatgttgaaggaggaatgtgttgatcagtacaagctactatctgacaggctgcttgccaaggtaaggttttatacttattcacacatatgcttaatctatttgagcttcacgggttgtttcagcagtaattttcttgctatatattgaaatcttaagactagatcggcttgtgaaaaccagaactcttaggaatgacaacaaaaatatttttcagatagttcccaaggttgcaagagtcaagaaaccagtttccagttcagaggtatatgcagagtttggtgtttctgcatattcaaaatatggtacaagaacagtgagtacatcattgagaggtaagcccttttcccttagctattgaagtggctatgactgctgaacttttaagtatgttttgaggctttttttatgatttgtcatatatgtttgctagtggttagctacttagctgtgtgacacatttgcagttttaactcgatgtattcaatttaaggggtgcttgttaccattgctgaagaaaaatcactgcaaatagttcactactgttctaattcttgctgactgtatctactttaccttatgagttatgattagttgataatgatacaattctagtgtttttctaacttttagatattatttaactagattagcatttttgcttatttcctctaaatgtgtttctctttccatgtttttcagttcttaaactgagtcagatgtgggttttattcctggtgatccttctcttagtctgtcctgtctattcattaacacatgatggaagtgcagagattggtacttgtcggtttgacaaaacgagtgttgctgcactctcttgcaaacagcctgatgggaaatggaggccaccctcagtgacatgttgtaatgcattgctgaatgcaattgatcatttgccagctagcaatgagagcggagtgtgctgtctgtgtcgctatttgcaactaagataccctaatgatgggcatggattggtatcatcttatgttctatgccagggaaaggataggcatattgtcactacatggtcttcttttccaatcacatcatgttatacaggtatacatttcatttctgttacctttactattccatcttaagatctggagtaaattaaagtctctaaatatttttctgtcttgttttaatcagtatgcaggcaggaaaaaacttcatcgagtggtatgagtaaccctgtccagaaggatcatcctgtgagaaatgcacatggaactggcaatgaggtcttcaagatcccttggatatttggttcagtggcattctgtgtgatattacttattttcctttggtacctgtggtggtctaaggcagcatcaaatgcatgccaactgcagtcccttcccctgaaccgaaattggaggctgtcatcagatggtggtccatgggctgagcgcaggcgatcctctgggaggcgttcatcggcacaactgaaggagcgcaggatgtcatattcataaacttccctgaacagttggaaggattggaatatctggttctaaacaagttcattcttctttcttgacgggcagtgctttaattgttggtatgatatgcattgttgaggatgtgatggtgtttttgtctcaaggattgcacatacgtgaacatagcaattcacaactgctattgcttaggagttctgatatgccaaagaatgttgtctgaatataatggccatgtttaagtgcagtaagtctgtgacattgtacatcagttatactgtctaaaacctaacaatgaggagttccagaccagtgcacaaagatacttgctacttttttttgcgtgtgtgtggaaactactcactttgtcaacatgccctggccttaaagccaaagttcatggcttggatgtcaaaaacaagcttaaatgatctgacagctctattccctagcatttggacccctcggacacctgcatcatccggcagaaaagtggagcaaattacattgtttgagctttcatagaatgcattttccactggcagcttcaaggtagacctgataagtttcatctccactgttggaaagtcattccagtttgctgagccactgtttgaaatgaagcaaatcctcctttcatcccatcctctggtatatcccttggcttgcatttccttcgtcatcgctttgtccagtgcatcaaacaccggggataaaatgtatgtatcagcagtgccagaatcaacaattgtcatcttggatatatagatatatggatcaatttcaagcctgattccattgaccatcatatcaagctgctgaatagcatatgctggtttatgatcgtagtagatcaattttgtccacataagattgatatctctggcatatggcccaatggtcagtgacccttcattctcatgatctctggggaagcagtaagaaaacgcggtataatctgtctgctgacatacctggttgaagaatgagtaacttttagtcccaaaaccaattatcccagcattgactccattgtaaagattatcttctccacagccaaagatgaaattatcaatgcttctgttgctggcaagagtgagcctgtctttccctaagtacccaactgaatactctcctgacccatatcttaagctgtagatacaagtatcatcctcttctacacacccatactcaacagcaagatccatgtgcatgccattgcaagcctcagttgagcacccaactttactgtaagttgaagaattgtaagggttgaatatttgtccagcttttgcagcttggtcatagcattttatctgacaatttttacactgaacccaggagagagttgagccggtgtcaatggtcacaagattgaagacaggtggtgtgccaaggctgatgcccatgaaatacttgttcttgcgcatgctatcatcgcctatgacggtggaggagtctgcaggtatgtttgctggctggatcattgtagatatgaaggaattgtttatgtggaacacagagaatgtaaaggctccattcgtgtttaaaccaatacctgtgttgttcaggagaaaaacagtgtttcatgaatcaagaacaagaacacataagtatgatgtgttaagaatgtttggcttaccaatattaatgcaaggactacaggtaaactaccatgacatagttgcaaaagaagtacttaatcttggtttgttgatggtttttatatgttgcctcgtgtcataagtgtgtttatttttcatgattccatatttaatacgaaaaatccatacctaaccgaattgcattctgatggaatagaatacccatgcaaattgcaaaataaaactaccttgcacatcaggtttacaagatcacttctgacagcaaaagaaaaaaaattagtatttcacctgccaagcttttttgggggaaaaaaaagatggcactttggtatggcattccaacgtaaagcagagctttcttagcttcgattgtgagcataattaacagattagatgaaaaaaaaggaatgacgagcgcattttctagaagccatagcatcatatagcagtaaaatttgaaacttcatttctgagttgattttttgctttactcatcatagtcaagttttcagcattggcttttaaactgctaataatatggatatagaagttctgcccatagcttaaacgatcatagcataatacagttgaaattaaaaaattaaaagtcattaaccacacatttgactgaattttgtataacatacaaatcgcggccacccatgtatacgtttttcatgtaatcgggggaaaaaaaacggaaacatgattaccgtaggttgatgaggaggctggactagtaatgctcatgcacagtcgaattgtgcaccatagcgaaatcaccatgacagccaagaacagctccatcaactatgtcgatcttcacaaagtctaagctaggtgctgagtaataaaatgaaatgtctctaattctcctatttattatatgggttttaattaacacatgctgcctgacaatatgcatgctccaactaccaacaataacagatatttcatcacgatgaatatgctatttctttttttttctcccctagaaatccacttaatttctctactgtttggctgacatgtgggcccaacaggcaaaacccttcctgttctatctcattctcatcgtcctggattaattaatccaacccgaaaatgaatcggattaggatccaacgaacccgaagaagaatcggattaggattcaacgaggcagatttaaagccaaagcgatcgaatttctctacagagattgctcgatcgatcgatcgatgatggctcgccacatcttggcggcggcggcggcgacggcgctggtgttgctatgctgttttcatctgccggcgacggcgatgatggcggataccatcaggtacgggccaccgagggtgccccaccggctgggcaccgtcatcgccgtcgacctcggcaacaccaactcctgcgtcgccggctacggcgacgaggctgatgcgccgccgctgttccggctctgcatccccacctcggtcgccttcaccggcgacggcgacgccctcgtcggcgaggctgccaagaaccaccccgccgccatctccggcttcaagcgcctcctcgggacgaggtttggctcgccggaggtgcggcgagctgccgagcacctgccgtacaagatcgtcgactggtgcacgatggctcacatcgaggtgaacgccggcgccggcggcgcggcgaggagcgtgtacgcctccgacgtggcctccatggtgatcgccgagctgaaggctcgcgccgaggctcgcctcgccggcggcgggaagaaggtccacaacgccgtcgtcaccgtcccctactacttctccgacggcccacgtgaggcggccatgaacgccgccaggatggccggcctgacaaccgtccggatcatcgacgagcccaccgccgccgccgtctcccacggcctccaccacggccgcctgcgcgacggcggcaacgtcctcgtcctccacgtcggcggcggcacctccgccgctaccgtcctcacctacgacaacgccgtcttcgaggccgtcgcgtcgcgccacgacgcccacctcggcggcgatgacttcgacgccaggatcgccggccgcttctcccagctcatcaagcgcgaccacggcggcggcgtcgacgacatcgcccccgcgaagctgaagtcgcagtgcgagctcgccaagaggacgctgagcagccacgacgtcgcccaggtgaacctccacgccaccaacctcgccaatggcgccttctccttctccgggtcactgacgagggcgcagttcgaggagctcaaccacgacctgttcgagaaggtcatctccctcgtggacgcggcaatggcggaggccagacgcgcggtggcggggttcgacgtgatcgatgaggtggttctcgtcggtggaagcacaaagattccgaggattcgagagctcatcaagaactacttcgccgggaaggaggcgacggtgaaggcgacggcgagcattggcggcggggcggtggtggtggtggagcctgaggaagctgtcgtccatggcggtgggcttctgagccatcccatggaggatggctaccattgcatgggagccggtggtcgccgtcagatagggtcgccaatggatcgctgttaccatgaattttagctgaatttgaaatttagactctcttgtgtacaactactgttgtattaatcgttgatataagagatgtagtgacataatagatgctctcttcgtttcaaattaattgttctaactttatcctaaatacttctatcaatttttaaaaattcagattcattggagagctatacctgtaggcccaaaacagtccgaagttattttttatggaagtatcgtttggtagtggtaaataattcaacaacatatgaattatatgttatacaaaaatatttctcaagctgaatctaaaaattgtatgaatatttacaaatttatagtcaaaggctctctttggcatagttcttcgagttgggtgttgctagctcaataaatcaatgaatctagatttgcgattacaatgataacgttaagataaattattttgattctattttaaatgaaatttaaaatttctaaacatctggtgacaatattttggcctgaattcactcggatttgtttccctcggattagtctctgcatgaattaattagcagttgtgatacgtttccttcccacgcacgcatgcggccagcaacatataatctagcttggcccaaaattgatgagtacacacatcatgtgtcgatgcggctaggtgaagagattaaagaaattacaaataaaaattgtgtcactgcgggaatcccacgaccttcacgtcgcacacacatacctttcctactcaggtacaagcgtttcttatatttagatgagacttgcgtgctagttatattacagtaattacagtatatttatattgtagttacattcgtgtgattttaatgaaaaaattgttaggtgatatataggtagtgatttaaagatatgccaaacagggtcaaagatatgagtgtttaatttaggataaaattaaaacgataagtaatttaaaacaaagagaacataaattatgttgtgaacggctgattcgagcattagtttcatgcagtgagacttacattaagctgtaattaagcaataccagttcaactcaaagcttatcactcatagatcacgcttctctatggcaatatggcataatctaaaacagttagaaacccaagagcacatcatatcactttggttgtagcataccaaatctttgaatcagtgatgtagcacatgggcaattacaaatatatttacaagttttgggttgttctagaaacctgggattaattaggccaattcgaaatgcataaagaaaaagtataaaacgattggttcaagctctatcctactagtgagtacttttgtttgtttgaagaagtctctgacgttcatcacgagtaacaactaacggatcactaattgagttgtcgtgtggcttgtgcactgaagtccttttctaatctatggtcgaacctttctggtctttggtcacttggagctcatcagtttggactatttgttcaaacatttcctctttaactttattctttatgatgttgacaagacagggacagtattaatggacttgcaaatagcggaagaaacaacggttatatatgcatattttcgtcaattataaatgatagttgttatttgtatctttagcattatgctccgagtagtttcttataattaatttgtgattttgtcgttcacattaattggctctagctttttcgaagcaaatgcccaaaaaaattactacattattaaaaaacaatgggctctgaattctaataattaattaactagccagtggcctctggtacagttttcagctagattatgtcttttgcaccatacttccttgcttgatgctgtttaatcaatcatgccctatggctaccctgattaattaatacaaagtttattccaaataccactgtatcaattatcttcagagtttatttcagatacctgatctgtataaatcatcagagtttatttcaggcaacaccgtatcaatcatcttcgttttgttctgatgctctagccagttcataggaggtgacaggtaatatatgacgcagaatgagaactaaaaaataattatcgccttaatttaggaacaaaccacaaaaacaaaatgaagttgccctgcaaacgtgatggtactactaatcagccagtacactctaaagccatgaaaaaatatgtatgttcgttcttgtagcaagaaaagtattttgttacgcatgtcaactccagttgcaatgtgaacatgccatggaaaatttgaaatccacattccgttcttacgtacggtcaatatgcgccatattgcaaattcttcgtgcgctataattagtttgacaataatgtcatgatttattagagtcttccctcggcaggtttcgccgtttagagaggggttactcttcgcctcacggtaaacacaaagaactaaacaaaatctatcaaaaaaattacttttttcttctaaactttaccccgttacgcacccagacccttcctatcaccgacgataagacatacatcatgtatagattcatagtcaaggtttgtctattatttttggacggagagagtagatggtaagggaaaccctgctcctccacgcatgcttatagctgttggcaagagaaaaaaatcagcattagtctcgattctctgatcttggtctaaagatgctccgttgaagatatgtgagaatattttccttgacaagcaaaaaatggatacgtattttattccaaaagagacccctgaatcttcaacgagaggggaaggtggtgttgaaagaatgagcaactggatgatccttttatttttgttcaagtaaagagttgtactttctcttatcagacgtttctcaagttaacatatcggaactaaacttgtctatcatttaaaataggaaaaagtacgaattacccctccgaactatcgcggtcgtccgaattacccctgaaccataaaaccggatatttttcatcccaaactatgcaaaccggacgaattacccccctcgatctaatccgcggtggttttggtctacgtggcgtacacgtggcatcccagtcagcgttttctaattaaaaaattgtgggacccgcatgtcatagtcttcactttccctctctctcactcttcctctcttctctctctcactctatctcactcttcactgcttcgggaagacacggcggcaacgggagacacggaggagcgggcggcgggcggcggaaggcggcgcacgggggcggacggcggacggcagcgtcgcggcgaaggccgagcggaggcggctgcgataatgtacttttctatttgttagtagaagaattatgctttgcagaaaaacacgatgagctcttgtcaagcttggacttggtccatggactcataacatataatgtacttttctatttgtaagtagaagaattatgctttgctgaaaaacacgatgagctcttgtgcccccacaatatctttttttttccaaaataatagggctaaatagggataggataactcccttcatgatatcctattagcaacgaaaatagctagttctcgatccgatttgctcggaccgaatcgatgatgtacttcccttgtcttaaaataaatcaacttttatacataaattttaacttatagcctatgttcagaggatctaaacatgccctatctataaaagatgatttattttgggacagaggggagtacaatgtattttctaaaacgcaatggatgtggattaggataggtattgctaaaatttgatagatatggattattcgatcttttttatgcagatcattcaataaagtactactatagaataatccattttttatatattactaactaaggatatggtatgtattgttttctaaaatccaattaatgtgaattaggatatggtattgttaaaatctggtgtatatatattatccaatttttgtgcgaaagtgctattggacatgatctttttatattaccacaccatttttttaacatacaaacatattaggaagcaagatcagagtttaggggataaaccccagtacattacagataagatctgaaagcacagagccaccctattgaaatgggaatttaactggactaaaggagtagacttcccgatgaaactgagcagcaaaaaaggagcagattgacggggagctacggcaatgccgtgacaactgcttcctaaagactcatttgacgtgcactccacttggtaggccggtaatccccatcggctatctccatggaaacggcacaaaacagaggtttgatgctgagccgtagattttggggtgagcttcaccggactcagcaaaggatatggaggttgtcattgaatctgaagagctctaacatcaaacctatcaatcgaagtcgcgcatgtggtctgagctcaacccgaatgacaaactcggcatggtttctactgataaagaacaaaagagaagccaaatccaaagaccaaccaaccttcaacatgaaagagtttgagtggctgaaaagagacttcaccatttgattggaccatacaagctcatctatcaattttaataacaagtcgataattccttatgagcagactttgctacgcaaagaatattattttggacaactccttacaagcagactctacctatgtgtcttcatctgcaaaataatatattttcaaatatatcaacaacacaacatatgctatgcacgaagagtccaattaatatccatatataccctatcatgaaccaggtccactaaaatccccgcaaaatataaaatcattaatcattatagataatcaaagtactaaaaatgaggagaaaaaaattaaaaaaaaggcgataatgacacgtaggctggcagcgatcccgagagcacgtccctcccttaaatccacgcacctcgccgaagttccaatcgaaaatcaaatcaaatcaaatcccaaccaaaaaaaaaattcaaaatcaaatccccaaaccccaccatctccatggccgccgccaccgccgccgcgcgtgacctcgccggcgacccgccggagtcgacgctcctccgcgtcgggggcgaggtcgcgtggccggacgtctatgaccgcgacgactcgctcaaggagaacaccaaccccaagtgcatcctcaagacctacggcggcggcggcggcggcaactcgtcgcagaggttctccggcaacctgaagccgacggcggcgccgatcattggcttgtcgaggaagctgggccatggcgggggcggcggcggaggaggaggagggggtttccgtccccccgcgatcttcccgaagaaggccaagaccggcggcggcgggcgcaccccgagggcggcggtgcccgaccacgagcccgggtcgcccaaggtgtcctgcatcgggaaggtcctctccgaccgcgagcgcgcgcgccgccaccgccggtggtcgctcgagacgaggccccgcggcgtcggcggcggatgctgcccggggctcggttccctgttcgtccgccggagccggtcgaggaagaacgtcgtggagtgcgtcgacgaccagtcgccgcccccgcctccgccgccgccgccgactgcggccgcgctgaggcggagggaggagaaggtggtgttgatgaccgaggaggcagcggcggcgccggcgccggcgctgggagggatgacgcggttcgcgtcggggaggagggcggcggattgggcggctgagatggagatggatggccacgtggcgagatctgggccgttgtagcgtgatctggaaaccatgtgaagagaagacatcgtgtacatggaagtttggtttggtttggtttggtgtgatttttagctggttgttgatgtaatttagtgcaagttttgaagtttgtgtacatattgaaaattaggagatgagaatgatgggattcaggtcagcaaactttgtctaattttgttctgttttgatctgtttctgtttgatgtgagttgaatggagaagatttcagtactggcatgcttgcattgatgatatgtatgcaactctgactttgcatgcctaacttttttttttccttatgtaaggacaagtagtgcactagtgtgattttagtgtagtgttgatgtgtgtatgtctgaaaattaggatgtgagaataatgggtttcatagtactaccaaattagtcaaaatatgctctttctttttcttgtttctatttgatgtaagttggatggagaagattccagtgttgacatgctttcattcatcatatccatgttccaatgactttgcccttttcttttctttctttttttttgcaaggacaagaagcgtgcttttgatgagttgatagttgattttaagcgtactatgcataagtccgataggttatctgttacttgcaccagtcataaatatttgatggacgttacttacaagatgtgatttaacttttaaatatttgaaacaacaataatttctcgaatatgcttaatccaaaattaagaaaagggtaggcgtagatttaacttgaaaaatattatcataaaatcataagcgtattatattttatttattgttttttaatatatattgatagtgaaagttttaaaaagtttgggtggatcttttcctcgtcaaatatttagaggagtacgattaagtgggatagagctatgagcctgagaaaaggactaactacacttcacaatgagatgaaaaaactaacaagtacatttaacaacgagaaaatgttgatttcgaaatcgctggaatgttgttaggttgaaggtctgatgagtgtgtctgaaaatcgataggctgagagtaacatgaaattgatgaattatgctcaagaaacactacgtgtatgagaagtagagtatatgtttagcctgagaaaagaaccaaaggactaagaagtacagtttacactgagaaaacgtgaatttaggaaatgcattttccttgtctcatccttgcatctcccatgactttgcattgagtaacttgtcggagggacaagcagtgtgctttttggggattcggatcggttgcagtcacaatagttaatattgcacgcaactttggccgtctatttttgtgatcaacggtttaaattcataactacagtaacatgaacagtattccatgctacagtacaacgaaagtatttcgtgctacataccacgaatagtatttcgtgctacagtaccgtgaacagtacaccgcacgatctaggccgttcagcttgtatccaaggatgctactgctactgcttaattttctaaaacgctttttagaaaatctgctttttggtggttgataattggtaagacaagtcaacatgttgcgtgaatttaattaattagataaggtattttctaaaacgtatatttagataaggtatgaactgagcagatacagattaaaaactgcaatgcataatagttcagatcatagctagattcgttaatatacagtatatataccaataacttcaatcaatactttatacaagaagttaagcagtgcaattaactgaatcccagcgagaggaacgcatatatacgccgaatagggttcatccaaagttccaaactacaacactgcaactgaacatcacattcagtaagcataatacaaatatgtaaaacaccctatctgataattattgtctactcccatacaatacaaagatatccatgtgatgtaggatggctagagcagttccacaagcaacagcttcgtcaggcctcaattctgtattcagctcccatcaaagtaatccttgataattagttcttgaatctttgggatcatttttcttccaccaatgacaacaacctcatttgatcagattcttcttgttgttcaactctgttgtcatcttggaggtacatacggatcaatttccatttgatcatcacatcaggctgttgatgatcatagtaaatcaatttcagcatatatacctgattgaaaaatgagtaacttttacaccctcacctcaaccaattataccagcattgaatccactgtaaaaggtaacctgctccgcagccaaagatgaaattgcctttcaaagttatcttctctgcagccaaagatgaaattgcctttaaaagttatcttctctgctgcgttcatcgtcttaagaccaactttactgtaaattgaggctcatcaatccaagagagttcaacctttgtatcttgaccatagcattttatctgacattttttacactgaacaatccaaaacattttatccgacactttttacactgaacattaatccaaaagagagttgagcccagtgttaatggttgctgtcatcacctatgatggtggagccttccggtatgctgtcatcaccaattaattaaacataacgtgcatgattactttaatctagaagggccaccgtttgtggattaggctcaacaccaacgacgacataggctatgaaaaagaaaaaaaaaaggagtgccagaaaaccaacccaaccaatctgatgagcccatttgaacgagaaatttctccatttaacacgagattcaaatgcataactgtaacagttgacacaggccttgtcattcgactctactacactacaacaaccaagctcaacttcgaacgatgcttttgctgctgctgctgctaaaaaccagggtagtgaaggccgcataaactgtgtacagcatgcgtatttaagcctaaaatgctgcaatgcaacttaactgcttcatatagtaacatattactctgtacagatccagagggaaatgtagaaattcgtgttatcacaaacagttactatattgtattttgggacaactgtcatgcaaccctgtagaacatctctgctgtctcccccataagaaatgtacaggagaacgaaaaatgtgatgacaagtgtatattgactgtaatctatagctatgacaatgctgagtttctagatggcaaatctacggcttcagcactaaacgaagacgccaggcaaggtttcctttgtatatcatacctgcatcaccagaaaaacttcacagaagaaattgtcatataaatcgcaggtcacgtactatttctcactgccatccttctcgtctaatgctccattaggcttctcagaccttactggaagaacgctgcgccgctctttgccacctggtttagctgatgcattcccataccatatcatcccaacaacagcaaggatcatcccaaggactacctgaaaattcagaccttccttgccaaagaagagaaacccaagggacaagacgagcactgtcttcatgtggcccaggacttggaaggatacggcagaaaaccgaccaatgcagataaattggctcagattaacaccaatggcaatgacacatgagagagtcaggaaaaactgcggaacaataaaaaccatcgtaagatgaaatggaaaatttgaggtcaaattacaaacaaatcaagcattgactcaaattcatccatattccaaccaagtaaagtgtaactatagactaataacaagcaagagattgcacataaaaggaaatctatagactatagttgtttgaagttactgctaacaagtgatgctatgaagtaaagacttttgtggtcacaagaggaaatgtaatgctagtctaggtcatttgaaaatgagtaaatttcataaaatcccacatattatggtccaagttgcacaaaaccactgggattttggcatgtgacatataaccccacatattataatcctagagtttcacaaaaccacactattgatcattttaacttatatctaccacacttttgagttatacaatcacatctcaaatttatgagcgttttatccatcatataaatattacatccgctttgtaaaattttaatatatgagtatgtcaaaatggttaacggtgttggtttgtgaaactttagaatcatggttttgtgtcacatgccaaaattcctgtggttttgtctaacttagatcagaaacaaagcattgtaatgaggctagcctcttaccaaagcaatcgatgtgaaaccaaagtgatccactcttttgcctgtcaacaagaaatctacaaagggcccaactagcagaagagatcccgcttgggctggagcagtgtggcccaggaggttgaatgagttcagagagtacttcctttggagaaaatgaacatactgcaaggaaaatagaaaaggaaaggaaactaatgagtaatttgtctataattaaagaagtgacaaacaaacaaatgatttagggagtgccaattattcataactaacaaggactgcagggaaccaataatgattcagggagcgccaactattcatcattcatcaataagaagacaaatagatagccacagttactgttgtaccaccatgtactaatttccccctcataaaaatgttcatggctgccaaaggagagctataggaatagaatgcaatcttatctcatagctgatatataagacataaccatacaacaagggtggtgattttaacttacatattgttgtaaagctgtgctccaaacagctataacagcagcagccagaccttttgcatttacactgacatcagtaactgtgcagactgcaacacctataagcacaaccattatgctcagctttgtgtcccgggagtaatgtacacgatcgaagacaacctccaggagacatgatgcaggtatcatgcacagctttgctatctgaagggaagaaaaaggattgtttagtagttgaaagtttaaagccatgatggaatctagctactagaacggtcctttgctaacctgataaaatcccacagagttccacatcaagctcacattcattccaacaattgacaagttcgaaaagatcacaaacttaatcagatctggtattggtaagtgggagggctggctgaggcctaaccaccgaaacacgatagtcatcaaggtggttgtcacaaaatgaagaccagttaatgttgtggctgcaaaatacaaaacacagtcagttacatggcatccattatcatacaaatgaagtatgtgtatgttgaggagcagcccataaatcttgttggacacaacaagaaactggataatatagtgtgcttccactgttccattaaggcccttttaatgttcatcaagcagagtggcagcttgtgacaagaaattatgatcataattctcatagcagctagaacagcgtggttttcaggtccaccggataccttataggttcacttttaatttgttttagatcacaacaaaaacaaatccggcgaacttctttggcatatggattatctagaattcaaatgattggaatttgataaaaaattactcaaagtttaaagatgcctgtcagtcaattgtttaattgcatgccccaaggaacaaacatctagaatccacaattacataagatctagtagcatttattcgttctatactaaaacaacataatactgcaagtttgtcatcccagaacacggagtagcctggaataaaacatcacaaaatatatatcttaaggtagcaaaaaacataccgaaactgaatccatgtgtagccatcagagccttgttgaccatgatgattccaacggatgtggtgatgttgaaactccatgccgcaaaatctagcaccttcttcttgtcggatttgctcatggaagaagtcatttcgctcgaatccttgaggcttcaaatcaacaccaacactttggcaggggaggacctaacaaattattttgggaggaaacaaaactgtaagaattggtactaaggttaaaacagagagaaaaatcctcttccagatctagaaggagaagagaaggaaaaaggttaaggcacagagaaatggtgcgcgcgggtagaacgagaggaaaagaggacgcgcgctcaccggaagcacgccgtcggccggcgccgctggctcgaggggtgatggatggagatcggcgaactcgctcgcgagtcgagaggccgaggtggcgggtggggagagattggcttgggcgcggcgaggaggagccagaggcgagggtacgcggcggcgggagcagctggacgccgccgggcaccgccgctcgcgtcgcggtggtggagatcgccgcgcgacggcggaggcggcggcggcgggccaaggagattttgctcgtgtggtgttttttttttcttttgttttattttttttttagcgaaatgaaaacaagtgtctccaaatctcccagatctgccactatgtggagggttatttatagtgtgctttagtttggtttgaaattttgaatttagtaccaaaatatgtccaaattcctcgattagatcgccgtgatttcgttttcaagtaaggtgtcaagaaaatgccagcccatccttccatcaccgcgatattacaggagtaatattttttcttttttcctttttaagtagtattttctttgagaagtaataaggacctgctcgaaagtgtttgatcaatgatggatgaaactgaaaaattgtacttcctccgtttcagaatgtaagtcattctaatatttactatatttatattgatgttaatgaatctagatagatatatgtatatattcattaatatcatatgaatgtgaaatatgctagaatgacttatattgtgaaacggagggagtacttccttcgtcccgaaatatagcaacctagaaccgaataggatgtatcatagtactatgaatctggaattgctcgtccaggtttaacctgtccagattcgtagtactaggatacgttctatcgggacctaggttgctatattatgggacggagggagtaataattattcaagtatagagatgaataatttaaatattaaaaagttgattgatctatttaaaaagttttcagggaaatattaacgaacaattcttttctcaaaagatatcgcacagtttaaacatgcatctattaaactttaaatcaacaattgtgttgtgtggttctgtttgtgaaagtactatatgtatcagtgttccgcttaactggttgattatatttattaattaattaatacggttgacacaacgttggggttaagatctgtatactttttttagaacaatatctgtatacttaattgtttattaataatgtaaacacatacaccgtgcagttagggtgtcacataagcatggcagctcatacacgtagggtccatgcatccattatattcagatctcaaatcagatttgggcatgcaaccttttttgagattccaagccatcgcactcaaatcaacatttcatccaagttactactaactagtccgttgattaagattatatactcctacttaagtttttgtatgtatcttcaaaaaaatgtttcgacatgtgtattctaaaatgtgattgctgttttggggggggggggggggtttggaaaactgaccaagttaattctatatattaattccattgactatatagctcatgtatttatgaagtaaaggtgtgatttggcacgccaagctacgcatacaaaaggcatgagcaggtcagaaaccaccccatgttttatttgtatggagtaatacgaattgtatgttggtatcatgcatatgctgaatcgatcgatcatctgttggagtgttaattggacaactttaattgtcgtgcaggttgttacatgtgcaattaattggccagatagtagtaggagtactactgtgtttttagtcaagtcgtgtacactcctgagagtgattaactatcggcaacctagcttaattactgatttgtcggtgtgtgtacatggatgcacatgcacctgatgggccaagtaagcagcaaaccatctttagcttttcaggcccgtatgtgattgggccgaactacggcccaaagtcaaaacgtattaataaaaacaaagatcccttcacctagatttctttcataaccacacaagcataatagattaatagtatcattttggtgttaaaagcaaaatatcatgtttttttagaaacattacgagcgaagacaccttcgaaagattggaccagcaaatattaagattaataacgaagtcatcacagttattatcgacagatatattatatatcacttaagaaaataattagctataaatatagacacctatgtcgagtgtagaacttgaacctgatgagctgattccaccacagttgagtaacattcacttcagaaaaaaaaatcatttcctctctaaaaagccaaaagcagtgctgcaggctgcagccatgatgcgactgtatacgcgtacctgcaccgacaaattacgaaccattagtccatttgtactctcctggccaaaggaaaaaattggaaaccattaatctagttgccaataagcaatcaatctcaggagtgtacacaacgttgactaactactacaactcacacgagatatcatcgatgatcactgaattcagcagggtacaatatatccgtattatgggaactagacatggattttcaatgtgatcatgccctccctacgcatagctttcgcgtgccgaaccacacctttacttcacggaggaattgaccctatatcattgaaaaattatgattttagttttcacccaagattgtttaaatctcaattctgatgtacaattttacaatcctaattaagggtaagttcttataggattgactactttcttgtttattcttggtatgcttcctaaaccgttaaatgatacgtttagtgaaaaactttttacatataagttttttttaaaaaaatcaaataaatctattttttaagtttataataattaataattaaatattcacatgccaatcacatatttcggtatctgtgccactaagtagcagagttgaacgactcttttgaacgtctaagatgtctgattctacaattctgtataggcaggatatattactttacattttaatttatacaattctatgattgcgatcccatatcgaattttccaatccgatccaggatcgtgattttaacaaccttgataccatcgaaagttaactctattactctatttatcattgcatatccaaacttttgttagattcattttaattttatttatttatccccatctcacgctcaaagttggtatcgatatcactctatcccaaacttgactatggctacctctatcatcctcaagcttaccacggataaactgcccttaaagtcgcacatagccgtggtgattgaggttgcaaggttatccatggttattaccctcgattagactcacacaagcaatgtccttgaagtcacccatgaccacaacaaaatgaccattgtgctcacaaggccaccatgtacagtacccttgatcgggcttgccacatgtcgccatcctcatcacagtcgagcttgcattgttacccatgtttgccaccatagatctagctcgtcgataatcacttcctcacctccgcaagggaacaatgtaagtgaataaagatccatactgaggtctcggaggacgtcttggtagagtaatcttcacttgtgatcatctctagaagtttgagttggatcttggtggtcactcgaattctagagaaagacctaggggtgttggattgaaggccgaggacttctgtcgggatctttgcacgatgaggcaagaggttaaatcaagatctaactcttcagagtttctcgacaaatagtaggatccgtgtgatccgaacttcgggaaaaaaaatccttttgtctcccctgtgcatattttgtgcttgcccgtgtgattcaattactctgcttgtctactgtgtatcgtgctgattgaataggcctagaagtttgattagatttgaagtcaattctctcatttatttcaatcccagaagttcctgtcttagaactccggaagttctggggtgtctgagctgccaggaagttccgtcgttcttcacgaggaggttctgagccctgttaaaatttgaccgttgcgattgtttttagtatttttcaggaggaaaaagtacgaattaccccctcgaaatatcgcggtcggccgaaattctcccccgaacccgaaaaccagacatcattcaccctaaacttttaataccggacgaattacccccctcgacccaattcagagcagttttgtgctacgtggcgtacgcgtggaaacccagtcagcattttcctttttttaaacatggtggggcccagctgtcattctctcccatctccttttcctcatcccctcttcctctctctctctcgcgacgtcaggcgcagccgcgcgggtggtcggcacacaagggcggcggtgggtggtcggcgctcacggcgcgcgcgagggcgggcggtgggtggcggcgtgggagcgggatgtcggcggagaagcgaggcggaggcggagaggagcggtggccggagcttgttgacgagcggtggtaggcacgacgaggagggagaactggtctgtgggctccagacagcagtgggtggcgaggagggggcgtggctgggagggcgaggcgagcgtggctgggttcacgaggcgagcgcggtgggcggccgggagggcgcggcggcaagcgagggtgcgggcgcggctgggtgcacaggcgagcgcggtgggcggcatagagggtgctgtggtgggtgcggttaggtgcacgaggcgagcgcacggagattccggcgagccctctcctcccgcctccggccaatatgctcccactgcggtggccacggggaacatcacgagctcccgcagcggtggcggcggcctccgtggcagggcgatgtctgccaaccgcttcattggtatccctcgacgctccaggacgagcctcctcttccggcgctgacgcccgagtatgtcggtctttgcaggaaggcggtggagtacttcgattggatgtgccgtgtacggccggcctgacgccatgtccaacgcgttcaggatactcttaggtgttcttccgatttcctcgtcgttgtgatgtgaatgttttcttgataatgtgttgctgtttcctccctagtttggttaactactagattgcccatactatccataattgaatacctgcgccacctcccaccaaccgcgcggcagcacctaatgacgcgctgccgcccaccgccccctcgcgtgccgaccgcccgcgcggccgcgcctgaagtcacgagagagaggaagaggggaagaggaaaaaggagatgggagagaatgacaagtgggccccaccatgttaaaaaaagggaaaatactgactgggttgccacgcgtacgccacgtaggacaaaactgctctggatttggtcaagggggtaattcgtccggtattgaaagtgtagggtgagtaatgtctggttttcgggtttaggggggaaattcggccgaccacgatagtttaagggggtaattcgtactttttccttttcagcaacatctattcacccccctcccctctaggctacatctttaagctttcaccattgtcgaccacgtgtggtgtaccataccgccaagtcgacgacgaccaggtaggttttcccaaatatgatactcaagtgatactaatatatgagagcactaccagcttcgaccaatagaaatagagctattaccttacagataaggggcccgaaccttgtatagaccttgtatagaaatccttatctccatctcttatatctcaatctcgcatatgccctggtaccaacgatctccataccatgcaaataccgtagtcgtgatctacaacatcgtcaagtagtatatactgttttaaagttggctgcagtgtatactggttttcggtcaatattagtatatgcagtttttttttacattggtatatactgtttttttagtagtggtatatactatttatcagttcgtagcggtatattcttttgtttaagctagcgtcggtatatactgttttttatttactagcagtatatactgtttttaaagttagtttcagtatatcctatttttcaattagtagcagcatatgctattttaaagttagtatcggtatacggtgtctttgtcaggggttatggataccacatacctaatagtagttgattaaatctcggcagtaccaataacctgcggatataggaggagttccggataagaaaagacaaccacagttctacatggaaacgacaatgactactcggattgtatccatattggtttcctagttctacttggacaaggggacacttatgggtataaatacaaggccccctagaaggagaggggacaatcaacagacacatccaccacaatctacggaacaatagatcaagacagaagatcaacatataagccaacatataccaagacaagacgccggatatcgacttcagggataagcacggctagtcccctacagtgtctccggatactgtcaggagagacatagcgttgtctctgatctcgccgggcacgaacttgaggaggaagactaccctgttatcaactacgagtcagaccttcagaccgccatgtcgacaacagttagataggctaccccaaatattgtactggtgtgattatggtgaataagagcaataccggcttcggccaacaggatgtagggttattacctgacaattcaggggcccgaacctatataaaaatccatgtctccatcttttttacctcagtctcgcgtatatcctagtaccaatgatccccatactatgtaaataccagaatcgcgacatcaaacatcgacagtggcgcgccaggtagggggattttggtgcttcaggatttagacgagataggtttaagagatggattcttcaacaacaagctactcgacgacttcggctatggaagatctaacctgaccggagtatgtcttccgacgagatcggaagcataaccgaaaattcggtccttcgagatagatagcttcaagacgtcgctaccgctgcggcggacatcgactcagccttcctcatccttggttgactcgatctccaacgcggcgtccctagaaaaaacagcaaagttacggccggcgaggatatgcaactttgttcaacctcggacaacaattagatacggagtactacattggactcccatgcaaactagtcgtgctcctacgacctaaccacaagtaatcaagtcggacacgacaacagctactgcatgcccatgattgagcatgcacatggacaactgggaggaaagaaaaaaaacacacgtattcatacagtacgtgtccatcaagttagtatattaatttttttaattaatctactaatttcgtagatatatccggcatatatctacacaggtacgcattattttatataaaattttccgtacctattttcagactatacaatattgtcagatccaaaatttattatgtttatctagagcatgtattttatacaatatctattgcgtgagtgtccccggtgttaaatcgactacaatctaacgctgggggctcgctctatttccttccgtataaatcatgcttgtttacggtttacataatgcctgatatttacatctgctcgttatatcctgataatactaaaagatccatgcagtttttcgaatacatactcgacattatctactatatgtcttgccttctagaaaatatttttcaagaacaattgagcactcgagtaggttgtggtcaagtacactacattatcgagaacgatctcgacgaatgcagagtcgtcgcgcccaacctaccaacaaagaccgactacctatctcatagcaccggccatggctggactactcgagaaaaggttgttaacggataattcctcgcaaacgccgtcggcttgatcacccgacatgattgcgaacggacatccagatatgctacaagttgggtgtgtgagtcatgctggccacatgagacgcacatgtaataaaccaactctagcacctccattggtgttcgagagataattctacacattcgctggtcctcgaaccagtacatagcaatctctcgcaccgcaacctccattggtgttcgagagataattctacacgttcgctggtcctcgaaccagtatgtagcactctcttgcaccgcaacctccattggtgttcgagagataattctactcgttcgctggtcctcgagctagtacgtagcaatccctcgcaccacaacctcaaatggtcgaggtacgactacagcaataacgcagcggtcctcgcaccacgactgcaaatgatcgagagacacctactcactggttctcaaccagtcaatcgtagtgatctctcgtacatttacttctagtggttgagttacgtctactacctggttcttgaccagaggtgtagtgattctcccattacctctacttcaacaaagttgatatcaggtacacaataatgccaagtgttttacccagagatcccttaccacaaagacacctagcgttgaaacctatcctaatgtccctttacgctgtcttgacaaggcctccgaggaacctaagagaacttcggctggggacgcccagagcggataaggccttgtcggatccttcagagacgaaagaccatgtaagatctggtcgtgtaagagttctcgccgtgcgtattaaccaagccgtgtaatcggaaattgggttttctaacttcacggctaggggctaggatcagtgcttgttcaaccgaggcaggtaaaaggtccaagagtcttatcttccgagaacaattctccgatgagaaggctgggggctagggagagtgtataactcaacaaactgactgatcgaagtcggtaaaagagtagatgctcatatacaaaacattggtctgtaagtttaattcattttcggttttccatacattctataacatgttaccctttgagcgttcgctcgggggctatttctatctaatattcttttctgagtattgatttcaggaaaattctattcgacattatctaaggctccatgtctctatggttctacaccaagatcgactaaggcgagtacgacaaatgttgacaaggcttcggtgcagattctacgccttctcgatcgctcgagaacggttggtggatctcgacaaggaatacgaaatgaagaaatggtgtacccgccgagataaaatttcttgacttcaatccaaattctcgattacagcaagacgggagacttagtcgcatgttctgtacttttttggttggcgtcggagattgactcagacaaaccctttaggtgcccgcacgagactgataaaggaagtctaacgttatctctgaactcaccgagaacggtcacatgagctcgataacagttactccaaggcctgcgcgcggttgagaatatgaattcgttcatttgcatcgaagtcgggggctactgtcagggttatggataccacatacctaataatagttgactaaatctcggcagtacccaccacatactatgtcctatacggaaacaacctgcagatataggaggagttccgaataagaaaagacaaccagagttctacatggaaacgacaaggactactcggattgtatccatattggtttccctagttctacttggacaaggagacacttatgggtataaatacaaggccccctaggaggagaggggacaatcaacagacacatccaccacaatctacggaacaatagatcaagacagaagatcaacatacaagccaacatacgccaagataagacgtcggatatcgacttcagggataagcacggctagtcccctacggtgtctctggatactgtcaggagagacatagcattgtctcttatctcgccgggcacgaactcgaggaggaagaccaccctgttgtcaactacgagtcaaaccttcagaccgccatgttgacaacagttagataggctaccccaaatattgtactagtgtgattatggtgaataagagcaataccggcttcagccaataggatgtagggttattacctgacaattcaggggcccgaacctgtataaaaatccctgtctccatctcttttacctcagtctcgcgtatatcctagtaccaacaatccccatactatgcaaataccggaaccgcgacatcaaacgtcgacagtcttttactagttagtagttggcacgggatttccagttatcggagaatattaaggtgcacagaaggggcgagaacgtcggattttttctacaatagcctttgctttttgtgtagtttgaagccaatgttttacgtagagaaacccttcgaaagaccgaatattctatgtgaaggagagaaaaatcgcaaattagaatcgagctgtaaaagattggcagacgagaggcgttttcgcaaaacgacacccactaaccctagccaccatcgccgttggaagaaaattgcataggacaatagtccttcgctcatccgaaggactttgtccctgcacatgacacgtgttaggttatattctcaaagcacccctcctttgtccctactaatctcacgcacgatgccgttagacctagtcgtcgtcttcttcccacgcgggagacgactaggtgcaacgaagtaaccgggccttcgtgcttgatcctaattcatgca

SEQ ID NO: 5663 - DNA, 30138 bp, Oryza sativa
caaaccttgagaagacaatttcagaatttgctaatgaaggagtcagagaaggtaaaagactatttctcaagagttattgagatcgttaatcagatgcgcctctatggtgaagatataaacgaccagaaggttgtggagaaaattttaatcagtctgcctgaaaaatacgagtacattgttgctgctattgaggagtcgaaagacttgtcgactctcacaattcagcaactaatgagctcgttggaatctcacgaagaaagaaagcttcagcgcgaagggagctctattgaaaatgcatttcagtcaaagttgagcttcaggcctcaaaactcaaggtttcgcggaaattttcaaaaaaaatggatttccaatgcgagaccgtggttatttttagaaaaatggcttttccaggcagaaggaagatggtcaagagagaagagaaaaaggtacgtccagttcaaatttgtggtgtgacatttgccaaaaatctagtcatactacagatatgtgctggaagaaaatgacctgcaacaagtgcaaaagaaagggccatattgcaaaatattgcagaactcgagaaattaatcgggctaatttttcacaagaaaaggaaaaatctgaagaaatggttttctcttgccatactgctcaagaagaaaaagatgatgtttgggttattgacagtggttgtacaaaccatatggccgctgatccaaatttatttcgagaaatggattcatcatatcatgcaaagatccacatgggaaatggctctatagcccaaagtgaaggcaaaggtacggttgctgttcaaacagcagacggtccaaaatttataaaagatgttttgttggtacccgatttaaagcaaaatttgctaagtattgggcagcttctagaacatgggtacgcggtttattttgaagatttttcttgcaaaatattggaccgtaaaaataatcgtctggttgccaaaataaatatggagaagaacagaaattttctattaaggatgaatcatccaactcaaatggctctcaggagtgaaattgatatttccgatttatggcacaaaagaatgggtcatcttaattacagagcattgaagctactcaggacaaaaggtatggttcaaggccttccatttattactctcaagtctgacccatgtgaaggatgtgtatttggaaaacaaattcgggcttcttttccccacagtggagcttggagagcaagtgcaccattggaactagtgcacactgatatagttggtaaagtgccaacaatttcagaaggaggaaattggtactttatcacatttatcgatgattatacaagaatgatctgggtatattttctaaaagaaaaatctgcagccttggagatattcaaaaaattcaaggccatggtggaaaatcagagtaatcgaaaaattaaagtattgcgcagcgatcaaggaggagaatatatctcaaaagaatttgagaaatattgtgaaaatgctggcatccgaagacagctaacggcaggctatagtactcaacaaaatggagttgcagaacggaaaaatcggacgatcaatgatatggccaattctatgctccaagacaaaggtatgcctaaatctttctgggctgaagcagttaatactgcaatttatattttaaatagaagtcctaccaaggcagtaccaaaccgtacaccttttgaagcttggtatggtaaaaagcctgtcattggtcatatgagagtatttggttgcatttgctatgctcaagtgccagcacaaaagagagtaaaatttgataataaaagtgatcggtgcatatttgttggctatgctgatggtatcaaaggctatagactttataatttggagaaaaagaaaattatcattatcagagatgtgatttttgatgagagtgctacatggaactggaagtctccagaagcctctagtactccattattgccaaccactaccatcacactaggccaaccacatatgcatggcactcatgaagtggaagatcatactccaagtccacagccatcaagtccaatgtcaagctcaagtgctagttcagattcaagcccgagcagtgaagagcaaatttctacaccggaatcagctccaagacgggtaagaagtatggttgaattattagaatctacttctcaacaaagagggtcagaacaacatgaattttgcaattattcagttgttgagccacaaagtttccaagaagcagaaaaacatgataattggataaaggccatggaagatgagattcatatgattgagaaaaataatacatgggagttggttgatcgtcctagggacagagaagttattggagttaagtgggtttataagacaaaattaaatctagatggctcagttcagaaatacaaggcaagacttgtggcaaaaggctttaagcaaaagcctgggattgattattatgagacatatgctcctgttgccaggctagagacaattcgtaccataattgctctagcagctcaaaagaggtggaagatttatcaacttgatgttaaatcggctttcttaaatggctatcttgatgaagaaatctatgttgaacaacctgaagggttttcagtccaagggggagaaaataaggtattcagactcaagaaggctttatatggattaaagcaagcgcctagagtgtggtatagtcaaattgacaagtactttattcagaaaggatttgccaagagcataagtgagcctactctatatgtcaacaaaacaggtacggatatcctaatcgtctcactctatgttgacgatttgatatatactggcaatagtgagaagatgatgcaagactttaaaaaagatatgatgcatacatatgaaatgagtgatctgggcttgctctactattttctcggtatggaagtgcatcaaagtgatgaaggaatatttatatcacaaaggaaatatgctgaaaatattctaaagaaatttaagatggataactgcaagtcagttacaacccccttgttgccaaatgaaaagcaaaaggctagagatggagctgataaggtagatccaacaatttacagaagcttagttggaagtttattatatttgaccgcaacacgaccggatattatgtttgcggcaagtttattatcaagatatatgtctagcccaagtcaattaaattttaccgctgcaaagagagttttgcggtatatcaaagggaccgcagattatggtatatggtataagccagttaaagaatcaaaattaattggctatacggacagtgactgggctggatgtcttgacgatatgaagggcacatcaggctacgctttctcacttggttcaggtatgtgctcctggtctacaaaaaaacaaaatattgtcgctttatcttcagccgaagcagaatatgtagcagcatcaaaagctgtttcacaagttgtttggttgaggagaattatggaagatctgggcgagaagcaatatcagcctactacaatttattgcgacagtaagtctgcaattgcgatcagcgaaaatccagtcagtcatgacaggacgaaacatattgctatcaagtatcattatatccgggaagcagttgatcgccaggaagttaaattggaattttgccgaactgatgagcagttggcagatatatttaccaaggctttatccaaagaaaaatttgtccgcgacagagagctcatcggagtttgcaagaaataaattaagggggagtttgttggagttaatttatttctagaacataccagcctactctctaactctctctctactactcatgaaacaaaagtcaaggagcaagtccttcctctgtgaaatttctagagtagtgtagacaataatatgttctttgtgagttctagtattttcatgcatgtaccagtactagttgtgttcagaaaagttcctagccatcctataaataggcagctatgtcctagatgtgatgctgctgtccaacaatcaatgtaacgtgcaatacttgagcaaagcataaccagtttgtgaaacaaacacagagcttctctcctctgttctccttctctgttccattgctagcaaaataatccacaacaacaagattgacatgaggtcaagccccaccgattcattgttagttgttagggatattaattcttcttgtcggctctagcgctagctcttcgtcactatggccgccgcgtcaccaccaccgccggtcaactagttagacctaccggccgacatgctctgcaccattttcaccacgctagaattctcaaacctgcttcgttgtggcaccgttcgcgccacctggctcaccaccgcgcgcgctctcctccgcgacggcttctactcccaccctgaaaccccctgcctcctcctccgtcgccgatgccgagctctgcagcctcgccgacaagaccacctatgccccctccttcccaggcccacccatcagtgaccgatacatcgtcggctctgctactcccatcagtcattgccgacgcccgctctgagctccacctcctcaacctcatcaccggcgatcagatttcgctcctctccgtcaccaccattgaataggtaaaccccattctgaaagatgacgccggcaataatgtcaccgcctataacgtcttcttctacgacaccaatatcccaagaaagtaggacatgattccggcaatctaccagctcgacgagctccacaacttcatctacatgaaggcaatgacatcctccgacccagcgactggcgatttcaccatcatgctcatccacaatccttacatgcagctagatcatcagacaagcaatggaataagatcaccttccacaacaacatccgcttctccgactgcatcttcgatgacggcctctttctacaccatcacttaccacagagtggttcatctcatcgacatcaatccggattcttcctacgtgacaggagtgattgttcaggagactttacccatgatgtatctcattgtctaccttgctcgatccccgaatcatggtgattttatacaaatattcagattcacaagctcgttggagacggatcaaacggtgacacgcactactgaaatttctgtgctcatgcttgatcttgatgataattaaggacaggtttgttgactatgatttaggggacaatgatgtgttcatcggccgcaattacaccgcctgcctttctacaaaggattatccggggttgatgccaaatcacatctatttcactgatgatgatgagtgctcgcttcaggcctttaaaggtactcctagggatattggtgtgtacaactacgaggacgatactttgagtgaggttgtgtctcctcagccatggttgaaatggccgcctcccttttggattactcccagcttcaaagacttcccaaacacgtatagacaatgaaaaattttatggtccttaatatatcaggtacctctttttcaagataaattttggtactttgtgatacatgaggtaacttaaaaaaatatggtatcaaaatttatattagaaaatttggtatattctcaagtactgtaaaataactggtggatcatcacaatcttccctataaatttgtaaattttgttgaattcatttagatattatttggaccgtgaaataatcatgaataatgaaaatcttccctgcaatatttttttcgatttattcaatcttattgctttagatacttcgcactatgtgcttattatattagctaacgggctgttcgatttttatatttttgcatggggctactggatttggtatacaactcttatttttaaaaattttgactcgacaaatacaactgtaatttatatacaatagttttgaaaaaaatcaaattggatttgatatacaactctcaacatatttttcatagatacaatttttttttacttgataggtttatatgattgggttatgtatacaactctcttttctttccataaattacaaatataattgtaacaatcaacattttttttctttttctattcttaatgttagaatttctaggctctaaatgacatcttttttaagctatctttagatagatagacagacagacagacagatagacatacatatagatagatagacagatagacagacagacatatagataaatagatagctttctttttatagaaaatgtacaaaaccatagttagatatagatagatagattatatatctgaattttagtgacctgaagaagtagcttcatttttttttggatacgcacaaatgaaattgtttcgaaaatttctagttaaagaacagttagtaatgctttcatgccttcgttttgtgttaaagattttgaaaatggacaagaaagacgaatgcatcgaaaagagcattatttcccattatatatatttcaaagcaaacaccatctcccattattgttttcgataaaattgcaaaaaccaacatgaaagtatgttgttctttttgtaattaagacatgatacgtgtgttaactggaactttaattcttccaatcttctatgcaataacatccggtgtcaaaagatcatctgctgatgaggaaatacactatgattatcacttatcatgtatatatggtgatccaattatgctcctggagcacgcaataagttcggcacggggaaatcttttcggttttgcagagtgagaacctgacaaattttgctgaattttgtcaagagagtactgaaaggatgaagtcaccgtacggttcagagagagaaatgcctgcaagtttaagcaaagaacgtttatcttttcgtacttggctttgtatgtggcgtacttgcagatcttaccctatgcataaacatacttatccagctatcctcttgattaattatctaattaagagcatttcaattttttgggagatcctaaaaaggaaaacacggcaacgaccatcgtacgtttatataagaaataatctcctgatcaaactgccttccttcgttgaccacagaaattatattgtttagcatgcttgatggttacttatttcaggcatggtcggcagctaaatactagaaaaaaaaacataattaatgctcccttaacatgttgatcatacaattaggcagccagcaaggacagtgttctatatataaagtacagttgcatgtgtctcaattctcaaagaaaagcaaagtcgtcaactcgccataccaaaatggaatatgcttagcataataaatttttcataatcatcattatcttaaaaaaagcgaaatatttcatagtgatggtcagatggacacgtggaaattgcttacattgtccagccaagcatccggcagaagaacatgagcttctccgagcttccccatttctgcactcaacaaagccagccttctcctctgtttctttttcctttccttttctttttttttgttatgaaaatattgttcggtttctgtttcttaagggagcaaaatatttgaaagacaagtcatccaaagctgacgaaacactatatccagaagcttgatttgcagctgaaatgtatccaaatttggacgacattcgctcactcacggcaggctatatctatttatctatctatatatcatgtactttcgttgtccgcatagtttagattagatttacacggctttatatatctatgcgcctcttgttgtgtcatatcgactgatatatatagttcttctcatcttgcatgcaattgcaagcttgtccaatatcgtcgactgatcgatttgggcgagagacgacttttgtgagcttgtgaccatatggcaatggcgagcgtagcagcgttgcgtctcgtcgtcctcctcgccgccgccgtgccgctgctgccgccgccggcggcatcgctggccgtgacgtcgacgtacgtgcggccgacggcgagggcgacgctgtccgtgctccacgacggcgatggccgaacgccgcagcaggtaagctctcgttcgatcggtcgatgtccatgtcagatgtgttctcctcctctttctttctttcgctcgttggttcgatcgatttcagaggaatctgaaaatgtttacgtacacgaatgaatgcttcgaccatacagaaagttgagtacttatgagttctttctttgtgctcaatcatgagtaatacgaaaagttactttctgtaaattttgctgatagtgcaagtaatcagcatgcatagtttcagtacagtaatcttcctgactcctgagccatccttcatccttttctttttctgttggaggttctgaaaagaaatatctcaattatctgcatacattaagtttcaacataatctgtgttgaaaagattatatgttattcatgttgtcagaattgtcaatgatcataaccggaaaatgatttatattttgtactgcatgatgcttaatctctctttctgaagaatgaagtttatatttcaagtaatttcagaagaagtggtgaggggtctagagtctagacggttctattagacagtttgcatgaatcaggaagcaagtactcggttttatacatattaattttgtcattttcatgcatggtagccctggtactacttgaaaaatatgagaaacaaagttggaccaaaatttcctaccacatgttgagttggaacaaaagtcaattgcaaatatgtgcttcaatctattcaggtcaattttaacatgagtggattagcaactgaaacttgtgggcactgcacccatgcccaaatttttttaataagcacaatcatttattaccattgttgtccctgctagctagtatacatgtatggctcggtatatatgtaatagagttaaaaaaacataaactacaattatgttgctgtctttcttctgaatcatcaagttagctaacaaaataagcaatagcattggcgtattatttgccagtagaaagatagcccatgaaatttctgagaaagaaagtgaaataattaaagaaatatgttaatgaattgtggattgctatatatttagcctgaaattgatgttcatgtacagcttagaagattgcaaagtcatgccagtgaaggtgatcaatatcatagaatctgagaggaaattaaactgatttccaaagaaaaacctcagagaaaatcaagaacccagtttcttcctgaatctgtgttcagagaactcaatcgctgctctgaataagattacagtttgtctatcagattactacagtttttgcaacaatgaagtgtatcttctcaagaatgataaaaattaaaattacccttttgcaatagttgacaaatgacttggcaattaactgtagctaaacttcatttgctagtgagcttgacacattttgctgaaacttcaggtgcatatatcagctgtaggctctgacaagatgagggtgacgtggatcaccgacgacgacgcgccggccaccgtggagtacggcacggtctccggcgagtacccattctcggcggccggaaacaccaccacctactcctacgtcctctaccactccggcaacatccacgacgtcgtcatcggcccactcaaacccagcaccacctacttctaccgctgcagcaacgacacgtcgcgcgagctctccttccgtacgccgccggcgagcctcccgttcaagttcgtcgtcgtcggcgacctcggccagacggggtggacggcgtcgacgctgcggcacgtcgccgccgacgtctacgacatgctgctcctccccggcgacctgtcgtacgccgacttctaccagccgcggtgggacacgttcggccgcctcgtcgagccgctggcgagcgcgcggccatggatggtgacggagggcaaccacgaggtggagaggatcccggtcatccacccgcggccgttcacggcgtacgacgcgcggtggcgcatgccgcacgacgccggcgcgtcgccgtcggggtccaacctctactactccttcgacgtcgccggcggcgccgtgcacgtcgtcatgctggggtcctacgccggctacgccgccggctcggcgcagcaccggtggctgcggcgcgacctcgcgggggtcgaccgcgccaagacggcgttcgtggtggcgctggtgcacgcgccgtggtacaacagcaacagggcgcaccgcggcgagggcgacgccatgcgcgccgccatggaggagctcctctacggcgcccgcgtcgacgcggtgttcgccggccacgtccacgcgtacgagaggttcgcgcgggtgtacggcggcggcgaggacgcgtgcgggccggtgcacgtgaccgtcggcgacggcggcaaccgggaggggctcgccacgaggtacgtcgacccgcagccggcggcgtcggcgttcagggaggcgagcttcgggcacggcaggctggaggtggtgaacgccacgcacgcgctgtggacgtggcggcggaacgacgacgacgaggcggtggtcgccgacgaggtgtggatcaccagcctcgcatccaacccggcttgcaacaagaagtattccatcagcttgtattgatgtgtgagaaactaggatgacgataggtagtgtgattctcttgatgattatactacttgataaatctctctcacataaattatatagtatatggttaatttgtaagttatgatatgaaaccatatttttattagcaaaactaatttataaattgattggactagaagtgcattcgtacaaagaaacacacacctcataaagctttgtaaatacttcgtactactttgtaaagcggtttataaatgtatatactttgtactgtaccaaagaagcaataaagcttcttgaattttaatgttgattgacaactaaaatatacactatatgtgacaaggtgtatgcatttatactatagtctatacgtattttaaaattttagtaaaactctgggtaatccaaataggaagtgtggctaattcagaaagggtttaggtgaaaaagtactcttcatgacttcatcatcatcattcaagtagatgtcatttggcataaattgtgggtaaatctttcaccgacagttagttcaggagacgccgccgccgccgtcatggagtctagcctcgtcgcaaacaaccttccctccgtcgcacccatacctgctccaccggcggtgcgttggcgtctccccggtgccaccttgctctggctcttctcgcgcctcctctcctctccttgctgatcctgctacatttccccgtatcagaggcagcgacgaagcttgatgttgtcgacaaactccccaatagagatggcaatttcccccgcaggactgggtcccctacgggggagtcggggccggggacccacatttgggcggggaggagacgggggagacatttcacccacgggtgacccgctggccggggagtgtatatgaactctcaaaatatagcccataaaaggtccaaaacagtccaacccagaaaaaaacggagatatataaacaaaattactaaaccctaaccttatcctctcactagtccccccatccccatctccctcccgtccacaccacgcacggcggttgggcggcatagggcgcacgacggtggcgcggcgcagggtgcacggcgcacctctggatctcgtcgtcgccggtcgccctctcccttcccctcctctcctctcccctccagcctcccatcccgtccccttcacttctccctcaagagtccacctccacctctccctccggcagtgcaaacgacgcacgggatggcgcatagacccgatcacatggtaaggcgcggcggccggcgaggttgtggcaagagcgcggcggccagtgaggttgcggcaaaggcgcgacggccggcgaggggataggtgcggcggcggccggcgaggggataggtgcggcggcagccggcgattcacggtggccgacgattcatcctattttttatggtgtgtcaagtatgtgcaatttttgtttttgccaatttgatgaatgtcttgtttttttttcctgattggatggagatgctatccaatgtggggccccggtcaggttgcggggccccagagagatcagggacgggggttgatttggccccgtatcaacagtcagggccaggggcggggggtgaagtcgggggtcggggacggtggcgttccagcctaacccggccccgccccgtcccgttgccatccctactccccaagacagtgatggagccgggcgccggatctgccctctatgccacatcatccatcgcaccgaaaggatgaaagcagcatgcgagctcgggtaggtgatggcggagctagcgccaagctcgaggagagggttaatggcacgggtggcttgggcgggggcgttggcgagcagccgacaggtagtcacgtgcgcgggtgagggatgacggtgcgtgcagctggccagcggcgtcgtgactcgatgccttgctctctgtggccgtgaagatatggacgacagggtccacatgtcagcggggtgtatatgggggtattttagactatacgaaaatacattggtctattcatgggtccaatagcctttgggacgtagaatatggcatatttaagatatatgaaaaattgtaatggtatccttctaattaggtgaattgtgatgatattttttaaaacatgcacatttgtaatggcatgaatccaattgacccatggtgtgtttgagaagagatgagaagatcaagagacaaaattgagacccataattagggcatgtttggcagagctttggctccacttatcctgaagccagagtccagaaaaatagtttcagttccatccaaaatgtgactagaattagctggagttttttcacaaaatgaactagagatgtggagctggatttagactgctccacaactctactccagaccgagcccttggagctaaatttaggagttggagccctactaaatagacctttaattgattattaattgttttaaatttgaaaaatagattaatatgttttttaagtattttttctattaaaagttttaaaaatacaccgtttattagtttgggaagcgtgcgtatgtaaaaagggagaaaataatacgaggatatataatacatgtactattggtcaggggcggatcccatgtgattcatgggtattcacctgaatacccatagaattttaaaaaaaaaactatatataggtatgttatgcatatatacatgagaaattagaaggaagtgcagcatgtatagtccaaatgaaaagaagcccatttattcgcaacagaccatacattcctccccatcttggcccaacgaataggcccactggcccaaaaacgaacaaatccctagttcctatcccccagtcagccagtccccacccctcttgtcgtcccagccccaatccgccacgcctccactcatccccaccgacgggcgacggggcatcgagagcatgacgctcggcggcgccggccgccggctcggcgcgtcgccagaatcgccaccagcctcatctccctggaccctggtccctgggcctgctgctgcggaggtggcgcggcctgcgacgacaccgccgcctccttggggacgggtgacgctgagcagctgaggttcgcacggatggcggcggcgttgcggcgcacggcggcagccagttgcggcgacacacccccgcgtcggcgcgtccccttggtccctagacggctggacagtggactgacactggtaaaataaatcctcttgtcaaattccccaatcgattggccattgcttaattgctattgcttagaagttaaattagtcagtcagaaatttgaactgtaggtcttgaaatttgaaaaatgaagaagaattgaagtctttgtgggaaaggtcaaccaagtctcagaaagtagcttccacctctgatccaaaaccattaaccaatgagagtgaagttcagatcccagaaaatgccccttctagtcctattcagctactacttgaagcacccaatgcccatgatagtgatatgtccccaagtgtgcatttggagatagacatcttgactattgtgctactgtttgtacctttaaggctttaaacatgtcattaccactcctgtatgattttcccagtccaattttttgagttctgtatgattttttttttcaactttgaataccctttgctcaaatcctggatccgttactatgggtatcgtcaacatgttttgggcaggtactatgactcctaacactccaatgccgtcatgtgatgggctatagcatccttttttttttgactaaatcaccgggggaagagaatccccacctaaatatattgagccaaatgatcttacacagagcaagctttacctacgcaagcgcagggggcctggggccctggaggatagaaaaacagaatacacggagaaatacaacgaagagagaatagagaaagaaaaactcctaaaagattacaattgatgaacgacacctgcaaaattatcttgccaaattccaaaacctactgctaaaccccaactaagcaacatccaattcctcacacagccacaagcatgtcgaaaaaaagagaggcaagggaatgctgttgaagtccaaagccaccagcatgaagccatcaagaagctgacttgatcttgttgttgtttggatcagagctcgccaacgccctttgggggaaggaagccctaaaggagggagggccactgaaggttgcggctcgaggccacccgcattaagttttcttcaatcaggctttatcaaattgcttgttagatcaactttctccaacgcccttcaagggaaggaagcctcaaaggagggagaaacactgatccttgcggtcctggacatctggagaaagagggtgaagacgagcacggggctagacagaaggggaaatggctaaggggattctcacagaggaaaaacatcaacgacaacttttggaggagggcatagaaccgtagcaatccgagctgatagaggagcacaatttccaaacaagcacgccagattgagaagaagttgaagggcaaaatcatcagcgatgtttggaactagggggtagagggcacacaaacgaggatactagggggaggggaagcggaagaggttctgttgcaagggacgacgaaggtgcggtggcgacggcacccgcaggacgcaccgccaagtcgtgccatcactagccgcagcatctccggaggcacgtaggcccctgagcatcgaccgagggccggggcaccgaccaccattgccgttgtcgcggtgcacgccgcccgaggcacatgccggccggaacccgccctcagcgccggggccgcttcgacgcggcgccgctcctgccactgccgtccaccgcgccgcgcgacgaggcgacaaccccagatccgaccgctagggtcccggatcggcgcgccaagcctagccatcaccgacgagtggggagaggggggggggtggcgccgacgaggtcgtgccggcccgccgtcgctgtagcatgcgccgctagccgccaccgggcaccgggtccagcgctccccgccgcccccttccagtcagaccgcgggagggccagctccgccgcgcccactctggcctccaccccgcccactccggcctccaccccgccgaccgccagcacaagcgccgccgctccgcctcctccgtgcggatggtagtgacgctcgcctccggccaggtccagcggcagggcgccggatccagccacgggggtgccagatccggtggtggcaccgccggatccgaagcttcatgccgcgccgttgccgtcgcccgcccatcgcgcgccgcgtcgtcgtcctcgcgctgagtcgtcgcgtcgccggggaaaggcctcgccgccgccctcacggttggtcgcgcggaactccggcggcggcgaggggtgggagaggaagggaggaggcggcgggggctagggtttgccctccgtgtcgcccgcgcgagagggcgacgcggaggtcggaagatccagtactgtttcctgtaccctcggctataacatcctggattagcgtattcttttatgtgagaccctggttaactaaactatgtgtcacttggttttgaaggatttgatgaacatggaagatcccaaaaagtactcgcaaacagcttaagcaacatgataggagtagaatagaagttcaggcatgatggatcacgtgaagctggactgaagtgccttcgccatcagtgtggcgaagatacgaagaattccagcatttttgatcttcctcttcttcaaccattcaatactcgtaactcgtagtaacatgacaaataaaatagggataattacatatgtacccctactttaaaagccaattgctgttttacccttatttttcagggtttgcatttttacccccactttttaatctgaagcaaccgtctaccctcacttgtgacagccgtttgatgggtcccacattgtgcgttaaagaaatacaaaggaaaataaaaaaagggtaattatgaaattacctttgtacccctgagagtggatagggttgagtgagtcttccacccgtgcgtacgggaaaagcaggtcgaatccctagcgcggggcggcgcggaggcgacagcgagagcgcgcggcggggaggcggcggtggccgagggcgtgcggccgcgccggcgcccgctcccaggaggtagacagcccgcctcttcttcctccgcacggaacagtgcctcgccgcgccgcgacaggacgggaagccctggcggcgcgcactcgcctccgcctccgcctcgtcctgccaccgctcgcggtgctgctcctcttcgcgctcctcgccgtcgcggtggcgcgggcacgcggccgcggatggaggaaccatgaggggaggaggagagcaacctccgcctgccgtctgagcgcggcgtggcggatgacgcggtggcggaggacgacgccgccgaggacaccagatgggccgtcctcatcgccggctccaacggctactacaagtaccgccaccaggtgattttgctcgcccgcaacccctcgaaaacaaaccacgctctcgccgcgcggttaatcgtggcggcacgtatggtttggtttggttcggtttgatccttcgcgtgtgtgcgctcttcgttcggtttgatttggttggtttcacgggattggttccatctccaccaacgcgcgcaatcgccgcagaagtagaaaccctgagccgtttcgtgttgccgcaaattccaaacgtctgttaaatctctcgttaatctgattcatgataaacgtaatccacaattaatttgagattactgccgtgaagagagaattcgtcgtgaagagagaattcggcgtgcaaaatcacacgaagctgaaaaaattggagcaaaattgcaataaccactgagagcataattgtccttttcctctacaagtaacacagataaaaccggctgttagaagcaggggcacatggctgcttcagattcaaaaagtaggggtaaaactgcaaactctaaaaaagtgggggtaaaacagcaattggcttcgaaattggggtacagatgcaattgccacaataaaatattatccacatatggcagtgttcgtttctaaaaaaaataagaaaaccattaacgcatagttaattaatttttaagtattataaatttgaaaattttatttcatattttaaatcaacttttatatataaaattttctcatagaatgtacctacttaaaaccatggtaataaaaaatgaggtaaaatttatatcttaacgagaaaaaaaaattagattcatattactatcaaacttacgtaatgaactaccagtgattctttgagattacgacagaatatcgctgtatcagttcacctccctaacctttgcctctcactcacacaaagtgcaaaccatattttcgtcggtctacttctgggaattcgttgtgagcgtgcgtcgcaaccaaccgtttctcacaacagcaaccactcaccgaacgaacccggcccctgggccccaccgttgcagcccaaccacacaccgaccccacctcatccctggccccacatgtcatccacccaaatcacccacttgggtcggggtgggtcccaccacatctctctctctccctggctctgattaatttctccccaaccccactcactcgccgcgtcggcgaccaccaccactcgagctctaaatggcagccgccactagatctcgccaccatcaccgacgacggcgacctcaccgccgccggggatgaagcgccgccacctcccgcccgtcctcgtcctcctcctcctctcaatcctctccctctccttccgccgccgcctcctcgtgctgcagggccccccgtcgtcgtcgtcgtcgtcccgccaccccgtcggtgaccccctcctccgccgcctcgcggccgacgatggcgccggatccagccagatcctcgccgaggccgccgcgctgttcgccaacgcgtcgatctcgacgttccccagcctcggcaaccaccaccggctgctctacctccgcatgccgtacgccttctccccgcgcgccccgccgcggcccaagaccgtcgcccgcctccgcgtcccggtcgacgcgtcccccccgacgggaagctcctcgcctcgttcagggcatcgctcgggtcgttcctcgccggccgccgccgccgcggccgcggggggaatgtggccggcgtgatgcgcgacctcgcgggggtcctcggccgccggtaccggactgcgccgtggtcgggaacagcggcgtgctcctcggctccggccgtggcccgcagatcgacgcgcacgacctcgtcatccgcctcaacaacgcgcgcgtcgccgggttcgccgcggacgtcggcgtcaagacctccctctccttcgtcaactccaacatcctccacatctgcgccgcccgcaacgccatcacccgcgccgcctgcggctgccacccgtacggcggcgaggtgcccatggcgatgtacgtctgccagcccgcccacctcctcgacgcgctcatctgcaacgccaccgccacgccgtcctccccgttcccgctcctcgtcaccgacgcgcgcctcgacgcgctgtgcgcgcgcatcgccaagtactactcgctgaggcggttcgtctccgccaccggcgagccggcggcgaactggacgcggaggcacgacgagaggtacttccactactcgtcggggatgcaggcggtggtgatggcgctcggcgtctgcgacgaggtgagcctcttcggcttcggcaagtcgcccggcgccaagcaccattaccacaccaaccagaagaaggagctggacctgcacgactacgaggcggagtacgacttctacggcgacctccaggcgcggccggcggcggtgcccttcctcgacgacgcccacggcttcaccgtgccgccggtgaggttgcactggtgacggtgaccccgacgtgggtgtatgtgtagctgctgctgaattttgttgtaaaattgaaactgatttcatattcgatacgtagaatcccattgtaatttgtaaatcagggggaatgggaggagatacggacacaagatgtgtgtcagatttgggagctttgtaaggagaaatgtagctcaattttgttgtgaatttattcgaaccattgcagtgaacttgttgatcatggaagcgcttattgattgtgaacttgttaatgattttttttttggtggtgatagatcttgcttaggtatgaaaatgatcagtagctgatgctactaataactattacgtctttgtttaattcttccttaagtaaaggagagtaaatattcgggttggtgggcggtctcctatctgcttctgttgtcgatttgctaatctcttctaggggaatattctggttgtagtatagtactagtagatgaccgaaagctaataaaatggtcaataatccaggaagaaacagctagtccaattgccaattgcccattccttttctccctttttctttcagataaaattgccagtcctttacaagctgctgctgctgctgctgctgcaacttgatttataatcatcagactgctaactgctgaagattgtttaagtaacacaatgtttcttcttcagtactgacaagtttacacatgcggtgccattatcccaagttgatcttgctcgtgctcgtaaaagtatatcactagctaatgtgtttttgttcactgggaattgcacctatccttggtattaccttcttgtatttagttagatcatgctcttttctgattaagatacagattttatctcggttttcattaacatgatttttaaattgctaatggtaataattacaaatgtattttttaagttggtaataattaaaactcaataggagtgctaccatcaatcaatccatccatttcaattgccctatttatgccgattttagttccaaactttttcttcaaacttccaacttttccaccacatcaaaacttttctacatacacaaacttccaacttttccgccacatcatttcaatttcaatcaaacttctaattttagcgtgaactaaacacacccttaactactctcaagtaatgcatgcaaaggatgcatttgtgttgttgtcagaggagatgcagaatcatcaactaccagcaggaagtcttgatcacaactcacagaaatggggtgctcgtatctataggcgccatgagatctccctttacgaaaatgcaactcctgacgccagcttcagttggctctgtcatgatgatgatctctgtgctgcacattgcaatgcaagacggacacacacatccagtcatacagatggagttcaatgctgctacaaggtcaacatgtcagatcagaccaagaatccaaatctcgaatccaagattattctgccggtagtaggacctgctgcatccatcccttgcccatccatcagatcagaaattcagatgaagtagtatagtacagtacggagtacaagtctacaagattcatgtaaaccaacaaaaaagctcggtcattggaaccatatcttgagtagtttgaacaaatttctgtatgctatgcatattgttttatgggaattgctaaattctcaaatgtcactcagtgcagatgttaaaatgtctgtagaatctactactagtcatattcaattctccgggacccaaaatctctctacacaccgacaattcaagatttgtactcgcactaatcggtgtgctcataagacatgcatgatgcattgttcacatcgaatcgtggtgtgatctgtatgaagtgatgcgccatgccgccatgatagctgctctgctagctcttgcaataatgctcatcgagagagcaattgaagcttggaagcagaagtgatggaaggaagaagagaagacgtggaggttgaatgctgatcatcattagctgctgccttggaacagcaagagaagagatctgccgttgcgagatcagatgatgagagcaaagacttgacttcaccacactgctactacgagtaggccataatcgagtgcaagagtaaatgttccttctcgacttctcggcagtggcggatccactgttgaggctggttggtgtgtaatccctgttcctagttatagtcattaacaagtctaattagttggatgtgtttagttcctaaaaaaaatttaaagtttgggaaaagttggtagtttggaaaaaaagttaggagtttatgtgtgtatggatgttttgaatgtgatgtgatatgatggaaagttggaagttgggggtgtttagttcataccaaaattggaagtttggttaaattagaacgatgtgacgaaaaagttagaagtttgtgtgtgtaggaaagttttgatgtgatgaaaaagttagaagtttgaagaattactttggaataaacacggcgttattagtgaagaaatttcctagatagcaaggatgcaagctgcctcactgattctactacccaaattgataaaacataatttattccgagtatacaaaacaatatattcacagatacttatgaacattttaatatagccacaaatcaaaatagaaaaagttcttttgatcatatgagcatttcattttcattggaaaatagtttagttgatatacctttacttgttttaattatattatattttttacactagcatcacctcaatttacatcctggagttgccttgccactgcttctctgctggctggctggctgctgctgctcccttcttttttggacagagtactctgcatttccatcatttgattttagtcaaatgaagtcaaattgatttgaacgatttgtcattacagttcaaaccacatcatgattcacgagagagactctactgggaaggaagaagaagctggagtaccatttcaactttggaacttggaagaggaatgattgcgtatctttgagcgaagcagaagtgcgtcatcaattcatcgcgatttcattctcaactctgaactgcaggccgtgattgacccgcagagcagagcagatatacagtacacagtacatacagccactatactccacgagggctataaatacagtagacggccgtctacgcgaacaccactgctctgcacagctcaagaacaatctcctcttcttcctctgccaaacctgctatcccagtactatcttccttcttccttctctctagctagctcagcagcatcttcagatcaaaggtgagggactacttggtgtttcttatctgtctcgagttgaaactgctccattttccatggatcatcttctcatcagcaacttgcacatttcttggttgcatgatcctgcgtcatttgtaactgttagtacgacgatgcaagaatgcatggcttagttagctaccgtttgagtcatgtcttagcatgcagcaaatgctagtaattagttgactaggaattaattgattgggcatttttgagtgcaggagatcgagatcgactggcatggagagggtgaacctgaagctgtacctggagaacgtgtacataatggaggagaacgagcggctgcggaggaaggcgcaggcactcaaccaggagaacaaggccctcctcgccaagctcaacaccaaccacgccgccgcctcctcgacgtcgacgacgacccagcaccggccacccaccgccgcctccgcggccggcgccggcgcgtcgtccaccctcaagcccggcaagcagcagccaaagtgatgcattgcatgcatgctgcatgcattagtgcaaggagttcatgcttaattaattaatgattagtttctgtaattactctaagttagtagcagcaagttggtgaagtagcttaaccagatgacgcataggagtagagtatttagcttgcaccgtgttttggcttgattagcagcagtacaccttttgtttttagtacaacttggtacggactgatcactgatcagacgctcatgaccagtgtggagtgcggacagctggcggcattttgggtcagacttaattagcagtgtgatgtaggagtagtaacactcaatcaaagcttaatttgtgctcctagctactaacagcatatattaattcgtaccagtaccgttttccataagttgtcctggataatactcccaccgtctatttttagtgtagctgtgggtttcattttccttatcaatttgatcgttcgtctaatttaaagatttatgaatttctttttttaaaaaaagtcatgcataaaatgctattcatattttatcatcttataataaaaaaatattaattataaaaaaaaatcaaataagacgttggatataaaaatccataagtcaaaatgggatgaagtatgtgtgataaaagtttgttcataccaatgatgtttccaaatcagagtaaacgactataccgatttcccgtgattgaggatggacttatgagctctcggacggctggtccatccccgtcccgtcgaccagatcacataatcgattacgaatgtgccgtggacaaaatttaaaattaaaaagtgttttggagtcaattttatgctttttttttcagcgcgtatttttcagtcttaaatttttaacgttgaaaccataagtaaataggtaaataacacatctaatataaaaagctttattcgcaaataatttttctttttttctacggctgataattcttgctcaaatcgattagagcctttataacctagagccaaccatgcattctactcctataaaaaaaaatatgccgcagcttacgagaaaataatcggaatgattttaagtcaacggcgtcgaaacatttcgaaacggagggagtacaatctagctagctctatataaagggcctgttcactttgacctgatttcttatatagttaccaaaatttggtagcaaactaaatatagccactttttttttggcaactttaccaaaatttggtaaggttgaaaatggcagcacagtgaacaggccctacatatctcacaaaagtttttaaataagaagaacggtcaaatatgtgctaaaaagtcaacggtgtcaaacatttcgaaacggagggagtatatatatatatatatatatatatatatatatatatatatatatatatatatatatatatatatatatatatatatatacatacatacatacacacacacagaatcctgttcaatatacaaataatttctatttcttgagcgaacccaccatttctatattggtcaatgatgtttctacaaaacattttattgtataatctgtaaaattaaaggtgtttttgattattattctgtgataaacaattgggcattggagattattggttttgttatttggaatttatttatgaagtggttttggagatgattggatttacaggtgaatcgtaggttcgttattttatgtgaccggtcagaccgggctgtgtatgccggtcagaccggcggtgatcgagcggtcagaccggccagcccgcgatctaaccggccgacgctgtgtcggtttcggtttcgggttgtttatttggatatctgtgattaattcatgattatggcttctagatggatactatacatatataatactgttgtttgctactaatgagtcaagttggagatagcttggtctcggaatatggtttctttgtttatttcatgtgtaggtgactcgatgcctcgggagagtatttgcggtgatggaccgggagtcggcttggggataagacgacgtctgtggtggtcagagatcatgcgagatacttaggctagagttgatgcacgtggttggtggagattccatatggcatacgatggaggtattgtgtgcgtatgggatgcggagtcgaatttggaaggagtccaaatttggtacgattggttatgtaaagtttgtgtcttgtactagagggttttctaaggtgtttaggactcctagtatgagtttggttcgtggttgtaggctgcctacctcatgtataaatagagggggagcgtgaggcttcccggtatcgcttttgagagcaattgagtttagttttgagttagggtttcgagtttagtcgaaatttttgtaaggagtgctgttggtgcactttgtaaatacagagataatcaataaagtcgtcatccactttaagagttcttcgatttgtgtttcaccgagtttcggcagtccaaccggtgatataccggcggtcagaccgacagcaagcggcggtcagaccggaggcatacgggcggtcagaccggcggcccgcgataggcgcggcaggtgacatcggcggtcagaccgggtgatctataccggtcagaccggcgacatccacacggtcaaaccgttagatcaatctcggtcagaccgacttttgtcgatttcgagggtaacttttatttccgctaaaagttttcggttttttgggtataccaaccattcaccccccctttggttggcttagttcttgtttttcgatcctacaagtggtatcagagccttgttttcttctttggatttttatcgatctagagtttttgccatggctactcccgctaggttttcaactaagcctcatgttttcgatggaacggatttttctcattggtgtagtaggatgcaatcttatattatggctgaagattatgatatttagagaaaagtttctcatccttatgtgattcctgaagctattaatactgcggctgaaaaaactgcttttgaacaaaattgcaaagcacgcaacattcttttgagtgctatttctcgttctgattatgatcgtgttgcgcactttcgaactgctcataaaatttggaatgctttgagtaactttcatcaaggaacaaataacattaaagaacttcgtcgtgatattttcaaaaaggagtacattaaatttgagatgaaacctggagaagctttggatgatatctctctaggtttaataaaattttgagtgatcttagatctattgattcttcttatgatactaattatccacaatctgagatttcttgtcactttttgaatggtcttgacatgtctatttgggagatgaaagttacgtctattcaggagtctatgactactttgactttggattcactttacacaaaattgaaaacacatgagatgaatgttctttctcgataagttgattctaagtcaagtgctttgatttcttcgtattcttcttctttggatattgatgcttcttcatctaagccttcttttcttgctgtttttaatgccacatccgatgatcaactcgaacagatcgaggaggaggatttggctttggttgctaacagagttgcttgagctatgaataatgccaggaacaggaaaagaggtggtccaaatcgttgctttgaatgtggttcaattgatcatcttcgttcgcattgtcctaagcttgggagaggcaaaagataagacaaagatggtgagaagaccaacaacaacaagccgaagggttcatcccaagggaggatgctggagaatcttaggaaggcttttcaacaagtttgtgccgcctttgagccactaagtgatgtagatggtggaagtggagatgatgataagggaaagaacatctccgatgtttgcttcatggcacgtggtgaatctgacacagagtatgaagataatgaggtaagtgcttttgaagaagctattaatattttgagtgaaaaaaaagaagtgtgagaagatgtatagaaaacaggaatttatcattgaatctcttaaatctgaaattgctagattaaaatctcttattcctaatgatgattattgctcaaattgtgaggttttaatgaatgagatttcaaaaattagagatgttaatgctgcacatgatttgaaaaatagatcttctcttgcttgcagttttgctttgcacacacgcactttggatgagttgtttttaactaaaaagttgttgcaaaaatatcaaattgcttttcatgttagtttgatgtttaacatgatttctgctaaaaagttaaaacaacctcatgatgttttggattgctcaacatgtaatttgaataagttgaaattgaaagatgttttaggtcgtgttgagttcatggaagatgttgtgaaaaacaatgaagtgctttcttgccctaaatgtcgtaaaagcaaatgtgttatggtagattgtgaaaattgtgctaatttggaaaaggaggtttcttatttgaaaaattccttgttaagattttctgatggtaaaaagaacttcaacatgattttggatcaatcaaaggttagcacacataaccgtggtttaggttttaatccttatgctcataattctagacatcctcctattgtgttaggtgttgatgctagaagtggtgagatttttgttaaacctgatactaataaaattgtgtttaaatctgctggtatcatgtctactatgggtgcatcttcttcaaaatccaatgttgtgcatgccaaatctcctgttgttgcttgtgttgctaaatcttctaatgctaccaatgtgtctaatcatcatgaaaaatatacttgttctttttgtgggaaagatggacatattgttggtttttgtttcatattagctcataaacagaaaaaggagagagagattgcttttgcaaaatcaaggtggcaaaaatcggattttccttcgaggaaaccagtcagaccgcagtgggtcccgcagtcagaccagcgaccggtcagaccggctactgagcgtcggtcagaccaggcaccagtcagaccggcggtacagtggccggtctgaccgggagtcggtcaaaccggcctcagaggaatttttctgaaaattctaaaattgattttgcatgtggttatatgcctattggatcttctgatcgtgtgtctcagtactggattcctaaatttttattatcatctaaccccagtactgaggcttcgacttctgcttatgtgtaggctttggtggcaaggaaggagaacgtgtggatagtggattccggttgttcgcggcacatgaccggtgataaaaattggttctcctcactcaagaaggcatccaagactgaatcgattatctttggtgatgcttctacaagtgtcgttctcgctacaggtttggttaaggtaaataaaaaatttgaattgaagaatgtagctttggttgaggacttaaagtacaatttgctttcggtttcacaaattgttgatgaaaattttgaggttcactttaagaaaactggaagtaaagtttttgattcttgtggtgattctgtgttgaatatttctcgctatggaagagtgtttaaagctgattttgaaaatcctgtttcacctgtgataacatgtttggttgctaagtttgataaatatgtgatgttttggcatcgtagacatggacatgttggttttgatcatctcactaggttaagtggtttggatcttgttcctggttgcctaaacttaagaaagatcttgatttggtttgtaaaccgtgtcgtcatgctaagatggttgcttcttcacatactcctattgtttctgtgatgatggatgcaccgggacaactattacatatggacattgttggtccagctagagtgcaatccgttggaggaaagtggtatatgttgattattattgatgatttttctcgatattcttggattttctttatggcaactaaggacgaagcttttcaacactttcgtggtttgtttcttcgattggatcttgaatttcctggttctttgaaaagaattcgaagtgataatggtggtgagtttaaaaatgcttcttttgaacaattttgcaacgaaagaggtcttgaacatgaattttcttctcctcgtgttcctcaacagaacggtgttgttgaaaggaaaaatcgtgttttggttgagatggctagaacgatgttggatgaatataaaactcctagaaaattttgggctgaggcgattaacactgcttgttatatttcaaatcgagttttcttgagatcaaaacttggaaaaacttcttatgaacttcgatttggacatcaacccaaagtttcacatttgcgtgttttttggttgcaagtgctttgtcttgaaatctggaaatttggataagtttgaggcacattctaccgatggattgtttcttggttaccccgcacatactcgtggctatcatgtacttattttggagactaacaaaattgttgagacttgcaaagtttcttttgatgaggctagtccaggtactagacccgatattgcaggtacactgtcacaggttcagggggaggatgattgtatttttgaagacgagagcaacgacaacgacaacgacaaggtcggctcggccggttagaccgggcgccaggccggtcagaccgccggcacacctccggttagaccggcataggaggtgcggtcagaccggccagggtcgtcggctgagggttctgttgatgctgtttgagatggtcctctagagattacaacttcgaccagtactgatacagaacatggatcaacttcagaagtcactgctcctttgcacatttaaagacgacatccgccggaacaaatcattggtaa

SEQ ID NO: 5664 - DNA, 73804 bp, Oryza sativa
ctgcgcccccattacaattaaatctttacaataagatgtcacacgattgtagtatgtagtatgttggtaaaataaatatattttaaatgttgaaatttgatgtttaatgtatgagaagcgaatgcttcaactggaattctactctatcgcacattttaagttttgattaaaaacaaatatatttttgcttgttataattatttgtgctgtttgtgagccaatatccatgcaaaatagaccattttaattcacataataatcttataaaagtctatttcataaaaaaataagttttatattgttatgggcctatttggtttgcattgggtgaccttaacttggctcgtacgggtcatcctatttgggattagcatggccataggacgtagatggctgaatggtgctgtctggttacatgtattagtttaactaagataggttgggataatgtttggttggttatatgagatgcaacacttgggagatttcgcatgagtttcgatacctattctatcctctatgtgaagtgtaaggttacatctttcatctcaaaatttatcaaatctaataaacatatcaattgattttagttacattttaaatgtttttaactataaactatacaattaatatgcgtggaaaagatgctaaatgatttatcacacacatttacaatgatatgttatagtttttatataatggcaattatggcagtaaagaaaaaaaaagtcactccgcctctcgttgttcccttgcccctccgttgccgacctcttccctgctcttctcccactctgccgctcgcctcctgctctcctgctcctttcccactccgcagctcgccgttccctgggttagggtttgcactttcgattttggtcaaactttcggtagcaccaaaatttacgaatttcggtacttctggatcgaaattatttgaaactttaacaaactttaactgagtttaaataaattttgattgaatataaaaaaaagagaattttcaaaaattttggatgagagaatgatttgacggtgggtcctagatttcaaactgaaataatataatcacttccccgggtccctaccagggtgtaccttaccgccggtaaccgcgcggttaccgcgggggtacggtaatataaataccgcggtaacctccttaaattcaaataaattttaaaaataatttgaatttttgataaattttgtacggtttttcacggttaccgcggttacatgtattagtttaactacagtaaccgtgcttaccgttgggacgtgataaacccggccccgacggtttgaaaaacctggtccctatcctcttctccatccgtgcagctccccgacaccttgaccccccagctgctagagctcctctatggatctatccccactgtttgtgactggattcatcatcggttgggccgttcgtttgtcacatgggcttcgtagttgggtaagccccgagcaaacctactcggcccgattcacccccgacggcccaccaaactagccgaaccactcgcctagtctcgtgccccggtgttcctcgcccacactcccaacgcataaccaaccctagctctcgcaaagcaccgccaccctcgccgcccccaaccgcttgccggcggagttcgccgccgcgccgcccctcggcggtgctccctaccccgcccgcctgaccgcccgcctgtccgtcgcccctccccgcctcgccatcgccggcgccccacccaccgctactcgcgcgaacgcaccgtctcgactagccgacgccgccttgggatcgcccccgcccacctccagatacgcggcccggccgcggagccgtgcttacgtccgctaccacccggcgccgatctccacgacgccccgctcacgaggtagggttttggagtgggaacgacgacgatcgcgttccccctcgcacgccgcctgatttgagctgccccacgcgttcgttcggtcctttctcaggtactcagatcaaaccctaacccgatgcttcgcttgtccgagaggatctgtgcaagtgtgtaatcctggattgatgtgatgatagattaatggtttccctctgcatgtgtttgttgtgtgtatgattgtaacagatctgttgtgttgcccatatcattgttgatacatctcgtgccgagtccatttcaagttcacttcttgtatgtgttgggtataatgctttggtttgtcatgtggcagtctatgcagtgttattagtgcatcactccgtatgtatggacttcaatggatatagtcagccatgaaagattcccttaatatgttgtttccgctcatctttgtaatgtttttggctaaccttgcaatttggcggaatatagttagcaaggtcttttcagatttaataatatagtctggtactggttctatttactctgtacgtcgttccagctcatattattaacgtagtcgaatatattctgtctccatttcccgccaaaattctagttggaacggtttaattccagctttgataataatgtctgttactactgctacgtcgattccgtcaacttgtcgtttctaccttgattacgtggcataattttatctgaaatgattggcttggaaacttcgcatctaataacatctcttattgacacgtgtgacatgttggttcccattgtatataccatttctgctcagctcagcaacgatgttggccaattttgttaatatgattacctgccatatttgtttggctgtgtctgattgatgcacatgttgtatatggacctgctttaacgtaatagtgcattatggtttagtattactattaaaagggatgttcattagcagtttttatcctctttggtggacgtaatacctgctgcacttgaccaaaaaatatgttgctgacatgtgaactctacttatcacactttatgtggctgttaatcaggcaatggatagtgcttttgtctcttgtcgggttaagattcctaatatttgcttctgtaacttttctgactgaataaatttgtttgattgttcctgcccatgttatatgatttattgattgattggtacaaattttgtgattattctcaaaaaccaattcttgcattgtcactgcatatttgtttcttttcttcattttatacgctatatcatgcatgttagagtgaatgccatgcatgataatttctggttttattgcaaatactatgaaaattgaaaagctcacacctgcttccttttatcacctattggatttgcaggcatcaaaaccctgatttgataacattaagtggaattttgacgatgggtttcgataatgagtgtgttctgaatattcaaactcttcctggtgaatatttctgtcctgtttgtcggacgctcatatgtcccaacgaagctctgcaaactcagtgcacacatctctactgcaaaccctgcttggcttacatagtggcaacaacacaagcctgcccttatgatggctatttggttacagaagctgattccaaggtactgctatcttcttaagggaatgctttgtgcatattcagttcatcaagtatatttggtggtagtgatccctttatttacaacctgatttgcaatatgcagcctctgatggaatcaaataaaccccttgctgagacaattggtaaagttacagtccactgtcagtatcacaagagtggttgtcaatggcatggtaatctgtctgactgcatcacacatggtactacttgtgcctatgggaactctcctgtagtttgtaaccgttgcagtactcagattgtacaccgtcaagtgcaagaacatgctcaactctgtccagtatgtccatctccatcattccttattactccctcgatatgtattagcatcatttccctattcactaatgttttttccctttgcatgttattgcagggtttgcaacctcaggcgcaagcacaacacactgacagtagtatgatgcagtcatcagcaacaggaacccaggcagccgtgcaaggtccttctgcagtggcctcagcagtccctatgacgcctgttacagcagctcctacaacagtaccatccacaactacagccagagctggaacagattctgctatcgcagttgcttcagctggttcaaccactgtaagcaccgtggctgtggctccttcacttccggtggcacctactgctgctagtcaaggtcaagcacttgctcctcaaactccaacagctgagcaataccagcagcagctccagtaccagcagtactaccagcaacattaccctggatataacccctacatgcagcagtatcaacagtatggtcagtaccaacagtacacacaacctcagacgcaaattgcaccccagaatgtggctcaagctcctgcgcaatctgctccatatgctcagcctcaagttctacagcccaatcagccccaacacatggtgccattccaacctcagaatcagccccaccttacacaactccaagcaccagcagctcagtcacagtctcagcagcatccaccattgcagttgaagctcaaactcaaattgtacaagcacaaccacaaagccaagtatttttccaacagcttcaaccccatgcacaacctacaacccatacaccagtccttacacaacttggtagccaaccatttgcaatgcttcttactcaagccccaccatttgaagttcagccccatgttcaacctcatattccacagcaccatcaggttatggctcagcaacaacagccccaactgcagcatttacctcagcagcaacatccaaatgcacagcagcaatcttatccacaaatgcaggcatatcatcagcctcttccaatgtctcatgcacaacctcagaatccttcagttcatgcagtaacaggtcatcaatcattttcacagcctcagccagcacatcagatgcaacaaggtgctccactgcaacgttccctacatgtatctcagcagcaaatgcctagtgctcagcatcatgcacttgcacatactccacagggccaacaaccaactatgatggctcaagggattcagcagacaccacaacatcagcatgttgggcatcatgccctgcggccagaaatatatgctagcattcctccacaggcagcaccacaaggattccctctaaacgcacctgctccctcacaaacaggtcaatcataccaacaaggaatgccctcatcacaacaactgatgcatgcacctcccaatcccaaggccaacaatttatgcaacagcaccctactcatacttctgctggtcggtctatgaattatgttgcaccacaagagcagttccaaaatcaatctggtggtccagttaaaggtttacaggcaggtgtgatgaatcaacaaccaccaatgcgtatggcctctgataatgtaggagcaacatctgaattgcatggtgctggacaatcttttgggcagggctcttcgtctttaaaaaaacctacttcggaatctgagaaatcagaaaatgcaactaatggtactggtaatacagaagtaagtgggaaaaatggaagtgctgaatcagctcttgtaaatcctatttcattggatgggtcagatggttcagacaaggggaaggggaaaggaaaagttgacttttcagcttgggaaagtaattcacatgatccagatgctcggggaggcaaagggactaggtctggtatatcaaatgatcttgtgaaaggtggatcattacagcaggcaccacaacatccttatggacctgattcaatgcttcctcaacatatgcgtcagcctgggcatatgccgtatatgcaggggctgccaaatcaaatgaggccacctaaacattcctttcctgaaaatagtcggcctccaatgcaacaaccatttgaaatggcacctagggtgcctggtccaaaccaaaatcagatgcaaatttcacagtccatcagacctgatggtgctatagttcggccaccgatgggggcaccaatgcctgggctgcatgattcaacagttcctccttttgctcctgaatatgttggtcagcctcatcctcttggtaattctctgtaacaaatctaatatgtatgtatgtgtttgcaagcatatgaccaaacttccatttattcaggaactaaaaagaacaatagtgttggcaatggaccacatggaggctcaagggctttatttgaaggtggattcaattcttcacagaaacattccaagtcatgtgcagcaaatcctggcagaaacaacgttagccacaaagattttgaagataatatgaagcagtttccagtgcctactcaccttgacggtgaaggtcatcaaaggggtcctagaccttttgaaggaggttaggtagacctgatggttttgctgatatattacctggaaggcctccattgacaaatcatcctggtccatttcctataggcttcggagaagattacccaaggaaacccaattcgactgttagttatcctgactttatttcgcctggtgcagaatttggtcatcgtggtattgatggaatacctactcttagaaatgcaggtaaggatcagaatcaccttcatccttttcatcatatttcataaatggcgaaaagtttagtacaccttgatccttttcatcatatttcagtgactaatggattaaaatgaaatttaggtccatttcttcaagggatgacaggcgggcctggaggtttgcataaagatcagctaggctctagtaactttcctgggagtggacaccatgattttgacaactcagagttccctcgtactcgattccatcctggtgatgcttttgtgccaagaaatctgcacggtggtggttggggtggtggccaattgcatggcattgagccttctgactatggctacagaggtcacatgcatgcagatgatccaaatattccaattgattattctcggcatggttttccaaaagaatctgcccactttggttcggtgggttattggtgtttctttctataatatgctttatctcttcccatatgatattgctgttacctgatgttctgtttacccgctgaactcttgtttggtggtcttctctatagggtggacacttgagagatggagatgtcagttggtgccgtatatgcaatattagctgtggtacagtagagaacctgaatatacatgtagagaccagggaacaccatcaacatgcaatggacattgttctgaaaatgaagcaagatgttgcaaaggggagaaagaagtgagtatactagttttaattctaacatacttggttaagcattgcccatctgtggttttaaactctccacttcagttccttcaggaattctggtggtcccaagtcattcaagaaaaaagtacctgggaagggtagctttcgtggaaataggcgttagaactcctgttatcttgttccttggagacaggtgtcggaaggtatgctttggtgctttattatttaccataagtgcaaccatttcttcctaggcttcagttggttacctaattttcttttgccaggttgctggtaatgcttctggaactatctgagaccattgaaattgggtcttgtccatacattttggttaaggtagtgctgcatgtttggaatagaattaccatgttctcctgtccatacatgtttggaactatctgtacttatgttgccgttttaccatgttgacgttttaccatgttgtcatgtggactttacctgcttttgtggagttcgttgctcctatattggatgctcaactcacaactctgaggatgcttatcttggacctgcaatactttaattttgtacacctggatatctgataatgcacaatgcatgactcccatgtttatccgctaggctcagatggattatgggttctgttatactgtataacggccctacagggtcaaaagagataagtttcaccaaaaggatccatagctatttttctcatgcgaatagaaagaaactatacaactagctatgaaaccctgcaatcacaattttttttctatgcaagagactagtggaagtctctcttgggggccacttgcagtgcctgaaatggttaacattgaatcccaggacatacatttgcttttttactctcacaatgttttctgtgaaagaatatttaattaaaccctatgatcctagcccttcatattttgaatgtgtgatgattggcatttcctgcaatccatagttgtgatcaggtataagaaattggtggcaacataaactgttgttaactaactgcctcttccatacgttcatttggtttcagagattaatttcattctacttcgtgaacatttttgttcccaatttatgaataataatttttagtgccaattgggttaaactgagctcattcaaaatttaagattaaatgaccagtactggagacaacctactattttaattttctcatgacctgtttttcattctggagtttatagatatttaaggttctgctgccttgacagcttgaaaggaattacttgtaggagaatatgcgaacttacatttttttttaaccatagcatgtcacataatgttgagttgtcttgtacttaatggtttgactaaataatactgcaatgattgcctatgagggcatcccaactctaaaatgtccaaagggaggtagaaggcagaaaaacaagctatcatttggtaggaacatggatcctagatattagcatgccaacatgtagtaagagtggcatgttagtgtagtgcaattgaaaggggcaaaatttgccctaggacattcccatgggacactccgaaacatgcctttccgtaggaaacttcggttttgtggcaatttgttaaatcatgctattccttttcttttttttcttgttttttttttatctttgagtgaaaatattaaagttcactaaggacactttgaacccatccccaaattgcacgcttgacccggctaaattttcatcccaaattgtggaaatgaaaacatttcaggggattaggcgccgtttggttcaggtattgtacagattattgtcgtggattgtcgatttgattatagggataaattaaatattttaagaaataaatttaataaatagcttaaacaagtggtctaagcaatgcagtagtaggaatttttttagaaaacgtatttttggaaatgtgggcgaaataatccatttcaataatctggtgaataagctgaaaagaaaagagcctaattgaatgaaaaattttagaagtactaaaaaatttctgacgaaaaaaactgaacaaaatttggccgaatttaaacatgttgtgctgattccaaaacaaattgtgtaaatcaaaaacatttcagaggcctgtataatggatcttcccccgcaaaagttttagcaaaatttggctgaattcatacttatttcgtaattaagaaatgtgtgttttttttaggaagcatatcctacctggtggccaaaagaccaaaaatttcggaaatgtcagtttaaattatagaacccgaacttataacttggcatgggggtagaacgccatttccaaaattttgtcatcagttaagccagaaatcttgaaataatgccatcagtgttttagcaaagacacattttttgagtgccttaaattccaccaaactatgatgtcatatagaaaattttgccgaaagtaattacactaacaaactctgtgcaccgctggaatgaaagcacattctaagaaaaggagcaaataataaggtgtaaattggttctgagatggaccattgtgcatgagctatcgatgccaattaaggacttgtaattttttttcattagttcttgcagacagtggttcttggtttgattatcataggtattgccgtattggtgtggcattcaaacccaatgaagaacatttacattctgttgatataatattttcagttttaattttaaatttaacacagttcgatatgacttaatccgattatgtttgatgtgatgatttgtttccttggcaatagccttctcttgtgtttttccccaaagtgatcattaaatcatttgtttcttttgttgttttatttgctaaagcagaaattgacaagtttaggaaaaatccctgagggggctcaactgtcgttcttgcatgctttcctgaaggcggtaaggatagatgcacacttagctttttctatgttgtgatttaacttagccacagatctttggccaaaatatataagctgattatgctaaccctttgtcagtatgttgaactagacctgtagagactaatttcatatgtcctagactgtttccatattggatcttttatgattgatatgacatttagtttctttgtaaataaaaactggttggactagctgatcacatatagaaattgatttagtacaatgttacaaggcctatagatgtcaaggacattttctgacatttcaactgtatggtaacctggagaatcaccattctcttctaatgcaacatgggatcataattagtatccaccatttagttaggggaaccttgaaaatatcctaatgatgcaaaaggtgtagctaacaataccctcaccatggaatatgtcgtggctttgggctggaaaatggttccacgacaattatgactagcatctaaggaagcatgggaaatatactaactcactgaagtaggagtagttgtgaagttaagtgctaggcacaaaaggccaaatttgaataattaagttgcttggtgttgggattgaacctatgtagaatatcttttgaccttcatgtgaattcaactttatcttatttattgggctcaatgaccacacgtttatctgcattgacatgtttgctagtatttttgggatttaagttccttcctgcctagggattaagatgcagctgagatatatttgctcagtagatacgcacatcatgtgtctccattttttgctgtctctacaatatgccaagattctaggcttcaagccactttagttataagttttctaggcttccctgtccctctccgtgcatgcaacactagctgagaaagtggtgattttgattgatacagtggtggttttcaagcaaaatgaactattattagataagttaactgagctctaatttactgtctcttcataacatgaataataggggttttcactagagaggcccaaaaataaacttggctagaagcttctttactatgtaatctgtatcacctccacatgtaatattatttttgcacgtgatgaagctaaaccgcatattcttttcattctgatgggatatgtggttagttgcagcggcacctaaaacatggtctcgcaaagcccttgtggtttaacagtttcatcagttaaatctgtccttagattcgcatgatataaatgaagagtgaaaccatcactgctcactagtctgtcctatcattttttgctgcttttctactgttaaggctcagtttgaatcaaattattgagcggattgttgctgtagattatctgcttgattaaagagataaattaaatattttgataaataaaattaacaaatagcttaaaacaagtgatttaagcaatactgtagaataatgttttttagaaaatatattttatcaaaacttggagcaaataatcagtattgataatatgtaaataatctaaaaagaactaagttagccatgatgttctcaccgtagcaggcagtcatactagcatttattttgctgtgaaggtggccattattactgtcttcttctggcattaccagctgtaattcatgatttgtctttaattcgcactttatatgtttcctttttttttcctatcccatgttttgtgttactgctttggaaagtcttgtagcagctaatgaggcattcatgatggatatgctggaagctaaacaagtagctcaagctccgaccgcatttcaagagctcgagtggcacaggaatgtagacaaaccgtcatactccagcttgctgaatttaattatttcattgtaaaacagtgtagtttcttgcacagtaatgtatcaagcagttgatgactcgatgtatcaacataaatgtaatcatttgttaattttttcctacttaacaaatatcagttggacctgtacattatgctagtataaagaaaaaaaaagaatattatttgtctggtctggtgttgcatttattgccttgacttgatataaagttgtgaactccagcaggccaagcttgtactcttgtactacgtatttccacgtaagacaaaagttctctgttcagtttgtgatattttttggatgtcaccttatgtatagagcaactttgggggaactttggcatggtgctactactgatcgacctatgcttatatcattgtgttgttagcttggttctcgggtgaagaaatagcccaaactaatgtgtactctctaatcacttttcttatttaatttattctgcctgtctgccaaaagaaaaaggtagtaatttctattttccagctaagttttctagtgtgtgtgattatttattttttgttgttgaaagtttaagttaagttctctttcgttggtgatcctgttttctaggaacagagagaccaaatgtcaagccgtcgaggtgcagatggcggcggtcgcagccgtctgccggtgccggagcgggcctcatgggcgacgacgtggctggctgtggctctgttcttggtaattaactatcctcttctctctctcttttttgttcactttgatgttctattggtatctttgggagttcttttttctctcacattcttgatcttttatgttcttacgtcttttatcgatcgactcacgcgtggatcgctgggagtgaatgcatgcatgtgtccgtgcgcgacggacggagtaatgtccagcgcagcgcagcgtgtgatacgccctccgtgcgttgctactattgtaactatccatcactgagctctcgattcttgtcagaagcgctcgaattccttggtctcacgattatagatggccgtaaggctccggcccacggcatgaccatttggcccggcccaagcacaacatggcacgattggtgttgggcccgtgccgacccgactcgatagttgggctgtgcctaggccgatgtcttgcacggtgagccgactcggcatggcacgatcaaagaaaaatagttgagagatccaaaatagacttaattgagccatataaggcacaacccaatgaggagggacgcaaaatagacttattctagccatatatgacagggcctaaagagacgagagaggcagaatatacttattccatgtaaaatcacaatgggctgtcgtgccttcaaaccagcacggcacaaccgcctgggccgttggtgctgcccgtgggcaggcccaacccgatgtgtaggttaggccgtgttggcccgactaacctcggcacgggcctggttatgcctaggtagggcccgaccgggaggcctatttggccatctatagtcatgataaggaaatataacccatgtattacaactcctacttgaagaatgtgtatgggcacagtactaacaacagtgatattgcatttcatttcaaaaaaaaaacaacgatacatgatagtaacagaagtagaagcactgaacagacttctccacatccatttattcatgaatactatactttggctaaattttgtaggagcaacaacaattgcgtctgcttcatggtaatcgatcagtttgtgttctccttgcccatgtagcgacaaggacatatactttgtcgtacagcttgtctggtagttgaaagaaagcaattctccatcttcgcttgaacaacagaacaccaaatgccatccaggtaccagttatgaagccacacccaagtccaagataaaagaaatctatcccatgaccttcttttgttcctccctggtgacgaccttgctttgatgcattatccctcgagcaattgttttggagaggatgcccacaaagtccaatgttgccaatgtacataaatggatttgctgcatacaagctattaagctgtgttcccgatggaattcctcccgtaagattgttgtacgacaagtccaagtaacttaagaacgttagatttgacagagtggctggtatttcccctgagatcttgtttaaccaagctcgttaactgccctatccattttggtagcgtcccagttaactggtttactccgaggtctagttccttcagttgattgggcgagcaattagacgacagattcttaaacatctcagttatgtctccgtataagagagcccagcgaatcttcaggacattcaaactgcatagattgctaaggtccgtggccatgacgcccatgttcttgtcaccatctccattagacgaaagatcaaggaattgtagggatgtcatcatcagtttgtgcggaatttgcccatacaatctatttgaactgaggtcaaggtattgtaggcttgttatgttccaaaaccagctggccgacattggatggtcgaaggagttactggaggcatccagcacctcaaggtttgtgaggttcactggtagcagcagctggtttgcggtagcaagagagcagccagaaagattaaggaccttcagagaagggatcatgttcgaacatgacacgaggccaatccatcactgtcgtaaggttcatgttgttgagactaagatgttgatcaaggtgttccagatgttgtagagcaagtacagaagggcttatctggccaaccaaagctgtgctgctgctgctgccaagtcgaagctcgtgcacgcgtcctgtctggttgctgcaccggacgccacgagtcgaggaggcctgcaggatcgtgcggcaagcagctcgcactcgcactcgcactgttgccaccagcagcggctcgcaacacggacatggcagctgggtgatgcatgctcgaggatgtgcctagctcagttcttccactgcccgtcgcctgttattattatagcgttactacgtgatgtcccacgattagtgcgggatacatggtagatacgatgaaatgatttagattaaaatattatcaaaatgatgataatttagcatgtgtatgtttagttttagaatgaaataaattgtagatataattactactttcttcgtaaataaaaacctaactagatatgacatattttagtacaacaaatttagactgatatatgaccaggttcgtaggactagaatgtgtcacatcaagtactagattaattttttatgggatggagggagtatatgcttgcatgttgatgagcttcgtgtgtttaatttgttgatgtggcatacttgcatgtaagatttaagagtgctattcaatactatgcttatatgttgagctttagatatttagtgggtaatagttttatagaaagaatggattagacaactagtactcttgacagcagcatcacttaattaggctgagttcgcttgcgctagatgggaaccaatctcctacgcacggaaaatggagtggtctattagcacatgattaattaagtataagatattttttttaaaaaataggtcaatatgattttttaagcaactttcgtatagaaactttttgcaaaaaaatatatcgtttagtgctttgaaaagtgtacgcatggaagacgagggaggagagatgggaatttgctgtgccgaacacagcctagtgtgtctcagcgtcaacgggtcgagtcgtcgctcaagcgttcggcgttgaagccgtcagcgcctcagcagtcagtcgtgagcgcgttcaacgattatttcctgtcacgatgtccatgtactgtactggtgccctgatgcctgggcaacttggagtacgtcctgtgcatggaaccggccggatccactaacgtgaactgctcccttacgtgaaattttttacgcaaaaaacacgcgcttcgcgattgcgggggttggacccgtgacccaggcctcacgcgttcctcccttcaccacactcatataaggccagtcacaatgggggtttcactagtgtgtcatgcacatttaataggggtaagactgaataaaaaatgattatttgcatgaaatggggatgagagagaaggaaagagtttcatcctggtgaaactcgtcagcgtcgtttccaagtcctcggtaacagagtgaaacccccgttgaggccgattcgtttcattcaccggatctcttgcgtccgcctccgccgtgcgacctccgcattctcccgcgccgcgccggattttgggtacaaatgatcccagcaacttgtatcaattaaatgctttgcttagtcttggaaacgtcaaagtgaaacccctccactgtggggattgtttcataaaagatttcatttgagagaagatggtataatattttgggtagccgtgcaatgacactagccattgtgactggcctaagactctcgtatttatttacaatattcgtcctcctcattttatcttcatccggtattcaaatgggtatttgagacccaaaatgaattcaaatgaaaaagttattaaccataaagttttatagctttttgagatctacaacattagttttggtcaaatctccatccgaggtcctttgaagaatttgaatttcaaatgtaagaaatttaagcataatttttggagcctaaataatttgaaatgaaaaattagtcaactacaaatttgtagatctttaaaaagaagatctacaaaagataaaagcagctggtgcacccttgagcagcatgatttttgcattctaatacttactccctccgtcccataatataagggattttgagtttttgcttgtaacatttgaccactcgtcttattcaaaattttttaaaattattatttattttatttgtgacttaatttattatctacagtattttaagcacaactttttatttttaatatttgcaaaaaaaaattgaataagacgagtggttaaacgttgtaagcaaaaacttaaaatctcttatatcgtgggacagatggagtataatatatgaaagtattgaacatcccacgttcaacaattccattgtcgtctagtccggttaggatacctggctttcacccaggcgacccgggttcaaatcccggcaatggaactttttctgatttcgttttcttttttcgttgtttgcagcaagataaacacatgtttgcgtcttggggtgttagtgctatagcattgctgcaattcctcatgatcttttctctaatcctaggctgctgatcacgattggaattgttcagttagcttctcttctctttctgggaagcagcagtgctattcgattcagattattttgtgatccaaatttggtccttcaagatggaacggtgtactgtgatgcaaatgctcgttgctcgaacttcactgctatctaggtgtcctatataaaatctggatgctcctaaaccatttgcatttgaaagaatgaacgtaaaacactgtatcatatcatcactcgtactgttagctcctttctcacttcaaaacaaccaaatcctcgaacttcaaaccaatcggagaattgaaacttccaagcgtctagactatgtcaaaaacaatcggagaacacacggaatgcttactcttttgaggttttaataacaccagatgaggaacgcggcagagttccacattcctggtaacttaggcttagaaacaaagaaataaaccatgcgaggtgcatttggggttgctatttggcgcgcgcgcgcacgcgttttcgttttcttttgccatctttttcgcgttttcttttttttttctgccatcttttttgttttttcctttttttttcacgtcccctcccctagcatgttttacctttttttcgcttttttttttctgatttctttaatagttaacacacatgttttcaaaatatattgagttaaaagttttcaaattttaacttaaaagttttccaatctgaagaaagtttcaaatctagagttgtaaattttcaaattttgagttgaaagttttaaaatctgaattgaaatttttcaaatctgagttgaaaatttcaaatctcgagttgaaagttttcaaattttaaattgaaagttttaaaatttgagttgagagatttcaaagattgagttcaaagttttaaattttgactgttcaaatttcaaattttaaagtttaaatcttgagtcgaaagttttcaaatttaatatgaaagttcaaatttcaagttgagtttagagtttcaaattttgagttgaaagttataaattttatgtattgcttttaatttttcaatagaaagttttaaattttaaactttcacgtatagatttcttttcaatctgttagttaaaaaaacaaccgggaaaaaggaaaatcttatctaattactatcattatctaaaactaatacggttagttatactaacttctcccgaaaaaatgtgcgccgccaatccacgctcgccaactagcttttccataaattcttacatgtatgaaaaaaaccaccacaacattgatgggttcacatcgtctgccgttcaggctgacggcaaacattgccgttgccttcatccctgccacacatccttctatcaacagttgcatgcagtggtcccaccattgtgattaattagggactactaattagcagaatcacttatttctcttcaaaaaaaaaaatcagcaaatagaatctcggcggtaaagcgcgcgagaacaaaagtagagcagagggaagctcctgctttttggcgccaagaatatggatcgacaccaaatgtctattcatccagaaacagaagaaccaaaacaacaaaatcctgtattgatggagcagccaaacgatcctacaggctacaggaagtaggaaaagcatgaacaaggaaatccttcatctatgaagcagccaaatgattctgccgtcgcatcgaacgagtaagcgatacaggcaaatttctctttgtttgatctctcctacagtgtcttctacttttatcttatcaagcctaaaatttcgtttgtttttaatctacacctatacacttctccgtggcgttgttcaaatttgatctattttactaacttcttctataacgtgatttatcaaagttcttgttgatattattcagttaaacgaatacaacaaacatctttttttcagagctgcacctagttgggttcctcagattggcatggcattcagtgatacagaggaggcatggaatttttgggtcacgtatggaggtcggatgggctttgatgttagaaagaagtatcacaataaaaatcaagtaacacagaaaactacatcagctagatttgtttgctccaaacaaggttttcgaggcaaggataaaagagataatttgactaagcatcctcgagctgagacgagaattggatgcaacgtccgcatggggcttacactcaatcgagtaaacgaaaagtatgagatatctgatctggaagtcatgcacaatcacatactgcaaacgccagaaacttctcacttaatgccatctcagcgcaaaataactgaagtgcaagcctttgaaattgaaatggcagatgacactagtattcagcccagaatcgctcatgagttggctgcccgacatgttggtgggtcatctaatcttggctacacttgtcttgatcagcaaaattatttgcgaactaaacgtcaaaaggagttgaaatatggtgaggctgggagcttgttgaattattttaagaataaggccatagataatccttcatttcattatgctgtgaaattggatagtgaggaacaaataacaaatatcttttgggcagagatgattatagattatgctcactttggtgatgttgttaccttcgatacaacctttgggacaaataaagaaagctggccatttggtgtatttgttggatttaaccactttagagaaactgtagtttttggtgctgctctcatgtatgatgagacttgtgactcattctgttggctttttgacgcctttttgtcatgccacaatcacaagcatccacaaactatttataccgatcaggatgttgctatgggaaaggctatcacagaggtatttacagaaactcggcatggcttatgcacttttcacataatgcaaaatgcaaacaaacatataaatcgtcagaagactagtgatggctctaatgtccttgctgattttagtgcttgcatgtgtgaacatgaggatgtggaaaaatttgaggaagtctttgctgatatgaggacaaaagttcgcaaagggacatggttggatagtgtttataagttgaaagagaagtgggctgaatgctttatgaagaatgcatacacattaggaatgcgaagcactcaattgagcgagggactgaacagtgatttgaaggagtatttaaattgtgaattaaacattgtacgctttttccaccactttgacagagttgtacaagggaagcgagataaagagatcaaatcagagtatgaatccaggaaaaaattgccacgcatcttaatgagaattcctatgctattgcaaacaagtaagctctacaccccgcagattttttaggcctttcagaaagaatatgaaagatcgatgacagcttatacaaaagtattggatgagggcagggcatatattgttgggataagatctctagatgatgattgtacaattgaagaagagtatatggttgttggaaatcatcaagagagtatggtgtcatgtgattgtcgacagtttgagagggtaggaatactttgcagccatgcattgaagattcttgatgtgatgaatattaagcaattaccagatcattatgttctcaagagatggacacgagaggcgcgtcatggggttgtccatgatatatctggaagacatgtcctagaaaatcctaaactagacgcttcacgttgatataagtttctttcacacaaatttatcagtttggcgtctcaggctgcagattttgaagagtgctttgcgtttgttgataatgctcttgaaacccttggacagcaagtggaacaaatggtagaagtgaatacaaatattcagtcgaatttagagacagagtttgagatacctgaaaatgtctcccaagctattggcctaaagaaaaaagagacccggtgtagcacatcgaagcgaaagaagaattgggttgacaagctacataaaaaaagaaagaaaagcctaaggtatgtatgtatgctaaaaagaaaaaataaatgaaattaaacgttcattagttattctgttgtaaatcacaatttaggtaaccacggtccactgacaggctaagaatgggaatgaagtagcacatcctgagccattagaagaggacatattggagaatagtacaaaagaatctcaccaggattttgaatttttgggtagctatacccagctactggcggtatgctaaccctgacttttgttttttaagatttgataaattccaattttttaacttatatcagtttataaatttgcagggtgattcagatggatatgagttatattctgaaggatttcatcagtagcttcatttcactgctagtttttgaatgaaaaatactctatatgggacatagtagtagtgcggcaatgctgtttttgtcaaatgaatacttaaatattttataagacatgtactattgttcaagtatttggatagcttcttagtacagaagcttgttttgctgtagtattttgctctgttgtactatgctctgcttctgttctgtcagtcgatccatattcttggcgccaaaaagcaagagcttccctctgctctgcttttgttctcgcgcactttaccgccgagattctatttgctgatttttttttggaagagaaataagtgattcttcttattagtagtccctaattaatcacaatggtgggaccactgcatgcaactgttgatagaaggatgtgtggcatggatgaaggcaacggcaatgtttgccgtcagcctgaacggcagacgatgtgaaccctattctgacctggtgttctgtagggctctaatcgcaataattttttgggctaaatatcttgaaatttatttattttccagctagagccccgagtggattgtttcagtgaggaaacataaatgtttgaaccactttaatttggactataaactataatattcagcaataatttatggtccaaagccatataaaaatagggttaatcacacttaattattttgcccacaaaagcaacacggcaaagttgtttttactcccctgccacaaaatgaatcaacttctggccggctacaaacctggacgacaggagatgatcacgaagggagtataacctacatggcggaattactagtataattgcatagataaactactgcatagctaaaatagctaatttgttaactaatcaaatatgtcaatgggcactgggacgatggcgggtgacaacaccataacaaagcttttggaaatgtgccaagtacttagagcatggtccatggaggttggaggccacatgatcgtagtggtctcatgtgggctatatgggctgaaaccaaatataggccacaccttccacaatggaggtcacactaggggtgaaaatggtaatggtaatttctagccgattgacgttcgtttctgactttctaccggccgagccatatgaaaatagtaatagaccaaaacgaaaatgaaaatggtgaaaaatatggaaacgaaaacggaaatggttttgctgttataccgattgtttatgtatttaccgtattcttgtagaaattacagtttcttataatatggtaattaccgtatttctaaatatgctgatatttttagggcatgtctctacttgacccacaatttagagattgattgactcttccattaaatccctaacttgagtgcatggctaaaatggagttaacttataatttatatagtataattgtataagcttgaatttatttatacatataacatacttatgtaaagttaaatatacgtttttatagtttaatgttttcgtatttgttaccggtttccgatctgtaccgacatgtttccgtccatattgttccatttccggttttccgatatcgttttcgtttccgactttaccgttttcgattttgtttccaagaaaaatatggttatggaaatggttgagattgtttttcgatcgtttccgaccgtttttattgtaagccacccccaactgtttttgtattttgattcctgggtacttgtatgtcaacccttgaaatatttattattatcaaatccgatgaaacttttatgttttgggcccctatggccacccaaaaaaaaatattcatgtactttacctcctaatgacccacttgtcaaccactccactaatatttttccatccaccccatcccccatttctctcacgaattcgcctctctcccacactaaacgcgatgcggcatctcttccccatctgagcaccatctcatttttttcttcccctatccgagagttcccagcctctcccctctccccacctatgcttctcccatcttccttttcccggccatcgcgctcgcaagccttcccaccctatcgaccagattgaggtggcgggcctcctttcctccccttttcgtcgggagaccgtgccaaggcggcaggaggacgagctcccaatgacggcgcgaccaacaagctccttgcagcaggcatagatcaggtggcgagctccgggcggatttgcttacagtggcgccctcactctcctctcctgctctggcgtggtcgtcgaggtcaacatcggttgatggtggtggtagctaacgatgacgaggcacactctctctcccactttctctttggatggctgctaactagaccacaattttcctccttttctcctcaaaccactatggctcctgcaggtaactctgacacaaatgtagcccctcccaaacctccaccatggcattcgagccaagttataggctagaaccacaggcttgagactacgcgttgggcatggccttataacaaggctagtttgtttgagcatttagctcatgaagtcatgataggtgttagtttaacgtactagggtcaacaagttcaggttggtggggtcaccaccaacgatatgctgaggaacacatcggtttagtcggacatcgtaatcttacctggtgtcgttggtgtcattaacttcggtgaaacaatagtagatccaccggtggagtacccatagagatattaatacttttgtatagtactagttgagtctgattaggtctgcatgatcctggtggagttggtgtcatattccttatcaattcaggataatatcctcatttgggtaatcctcttattgcgtttagtcccacatcggtgattaatgatgggggagtacgacttaaaaggtgagggcagtcctcacccatcaaactagtcttttgggttgtgtagacgtaggacctaaagttgtggctccggttgggcttgtggtagagtagggccaatgtgacctgggtagccatgattggtgggccgggctgcgcagtaacaagtggtattagagcctagactagtcttttgggttgtgtagaccaaggatctaaagttgaggctccgattgggcatatggtggagcaggcccaatgagacctctcttaaagattgggcatgtgttggagcaggcccaatgtgagactacaatgtagcgttgacacgcagagagatgatggcggagaagccatggactcgtagcggctagaaaatatattgattgggaaggagcgcccataatcaaagccccggagatgtaggcttcgtttgaacttcgttaacaaatattgtgtgttcatgtgccgtcatctggcatgtcttaggtgatcaatgactgaagtgatcgagagagttagctgtcgtttcgctatatcaactaacttttgtaacaccttctagtagaactatatgtattctatatgagtatttggcattttccaccattgtgtgggtatgccatattttatatactgacagtggcccccgagtgctgatcaaacgaggagcaatcacactatgtgttgggacctctgctgggaatagttccgaccaggtagagattggtagtggttggctggcttgcctatcatgatttggttggttcagggtgagattgatagtggttggccgggttgcctatcagccgggttggcatctaacccatcgtatccttaaaaagttattttcacgcgtgcgttgtttgtagtttgaataggattggaaaatacgaaccgttcactggacaatttcagtggacacatggtggagaaatcaggtatagtggactctggaaaacaatcatatcacttgaaaacaaccaaatccgtacatttctatacaatcaaattaaggaaaccttgaagagtcttagaaacaggggacacaattaaaactagctagctagctaatattgttttaatagcatatgcatgtgtgtataagttcttacatgcgtggaaaaaaccattgtaccattgatgaaaatctgtgttgccctagggtacttaagctaattttgctggtcctgaagtcatacacaccatacatgggaatcccttccttttgctgatacacatagctgttggtaattctggtatggatatcaccccactgcctggtcaaatcacctcccaaaaagaagatgcaatttcctccgaatctcgggtcgccgtgatcaaaagagaggatcgccttggagcaagcttctgaggaagacgacctgaccatccaagcttttcacctctaaccactggccaccctccaaatccgcctcaaacaccttgaacttgatttcataatcgtccacatttgctgaagtgcccaacatgggagaaatagtacacctgaacatcaacagagtgccactgcatgaaataacaaggtacttgcatgaaataacacggtactggtgtactatgtcatcgatgctatattgccattgaagatgcgacaatggaggctctgctgcggcgcccctaatcacaagctcagcacgagacaatgtgttgttatctctgatctcatggacaagaagatccccgttgctagtaagggcgtagagcttgccgcggtacaaggcgatgtcctcgtacattctcttgtgatcaccatcatcatcatcatatggaagaactgaccatgatgtgtcaatgcccggcctgaaagagacgatgttgttatcgataaggcgggaggcggcgacgatgaggtccggcgagcacacgatgatcttgtgcaaggtgaacctctcgggccacgtgctgtaacggttgtcaacgacgaaggcgttgatgggccgatcaaagcggcaggggatgtcgatggtcgcgttggagaaggagttcttgaggaagtgacgattatcgcatgccatgatgcaaggcttgaacacgtccatgtgcatcagccacccgtcgttgtgggaagagatgcaccagagcgcgtcgttagacatggggatccggcacgccacgccgtcgtcggcaaggctatggtgggtgcgcgggtgcgtcagggtgagcagcaatgttttaaatagcgggctaaggcatttagcggttagcttctcaaatagttatagcggcagttatagcgggctaaatagaactatagcggctaaattgtacatgagagcaaatagctagaacccttctcaaacagttatagcgggagatagcggcagtttagcgggagatttaaaaacctggtgagcagacatggcagcgctggcggcagcagctggcgctgctggagcgcgccgaggcgccactggctgcagacggcggcgaagctgaggcggtcgtggtggaacggcagcgaggagacgatctggccggcgaggtccgccgggaggtccgaccagcctggcggtggctccagctgcagcggcggcggcgaactgctgcttccgctgaaacagagccccatggtggcacgagaggaagacgcggctaattaacacaagggaaaggagatgaaaaattgaaacctagctttgggcttaatttatcttgatagctagaaaaggtgatcttaattaaagatgaaagacaaatctgtttcgaactcggttgatgaactcggtcaaaagagaataagaaaaactatggatggacccaacttgtcagccagtataggatggacagtgctgacgcgtcagcgaccgtgtggtgtaccatgtcggattttggaatattaattgtcagtggtgcatttaggagtataaagttgtatctttttaagtttattgacccagatgaaatctatgtactttaaggatggcctatgtaatttactttaaaaaatattattagatgtttgagtctaaaacattttcatttaaaaaaaacaaatgtgcatcaccactacaactagtaagcttagatatatgagattttttactgtccagcaggtttgagcggtaccaaatgctagccgtcagatggaccagatccaacggttgaaattgatcggtaccaccaggtaccgctttagtcacttaggtggtaccgcaccggtggaagggtaaggtggtcttttcgcatagaaaattttgggaagtcgattagagcagcgtctttcctcccccagatggctagatgcgtgctgttgtcgccaccgctgtgtgaccttggtcgccgtcgccgccgtggtgtcatccccatctgcagatgagacagaccaagactagaacacctggggtcgtcgtcaatggagcagcccagcactcactctctgggtgatatgccccaaagcgggaggtggagggccgtgcccatgttggcgatggcgaggtcaagctccgtcgaggtggtttccagcttgcaccgcggaggactcctcggcgacggccgccgtctcgtgccatcttccgaagcacagggattgcgcagagatttgcaaatggcaacataatcttcaggaataccatcttagtactgtacctttgtatatgtatttgtatatctgttaatctactaccattagtaagagactctgaatcaatcctcactgtgcattcatcaaattgtcactgtgtgttctccgtccaggcggggtctggcttgtcccactaccacggccggacgacggagcggaagagcgcccctgcatgtctagaagtagttgttgccatacgcgacacagccggcgtgctgcagcgcgtcgacaccggcgggaagcctgcgttggtacttgtgcaaccacgcaggtggaactgatggctcagcactacgcacgccgtgaacaggccggcgaaacaggtgtgccgcgacagcatcgacgggagggaatgaatcggcggcggccgcccgtggaatattttgcggtgggcaggagaagcgttggggggattgtggcgcctgcgagaggatgggtggcatggagtccaggatgattcccatcgtgcccttggaaattggacggttagattcaatctggtaccaccaggtactagtaccttgaggtacaatttgctggaccagagcaaatctctagatgtatatattggctcctttcacttcaagtcaaccaaatccttacacaatcttgtaaacaatcaaagagcctctcccagcgccagcagagtcttatggaagacaaaccaagccagctaatttttactaatatatagcatgtgagtataaatccttacatgcctggaaaaaaccagcatacctttgaatgcttatattcccttcctaggtaaatcaaactagtcgcgttggtgctcaagtcatacactccatacataggaatgccttcgttttccttatacataccgctagtaatactggcctgttgtatgtgatgtcaccgccaggtgatatcctctcccaaaaagaagatgcaattccctgcgaatctcgggtcgccattacccggcgagcgaggaatggccttggagcaagctttgctgaggaagatgatctggccatccaagctgttcacctccaaccactgaccaccctccaaaaatcagcttcaaacaccttgaatttgattgtagttccacccatggaagaactaccgtcaggcgaatatttagttgtgcacctaatcatcagcagcttgccactgcatgaaataacaaggtagcgactctcatcggagctgaaattttgtatccgttccagaagcgtcaatggatggtgatgcactgccctgatcgcatgctcagcacgagatagtactgcatttgcactgacagtgtcaatgtcgtcgtcgttgatgatcccatggacaagaagctcctccttgctagtgagagcgtagagcttgcctcgatacaacgatatgtcctcgtattttctcctcatccacggataatcatcatcgtcgtcatcatcatcatcaccaccggtcgtcgacataacttcatcaccggaaataaccgaccatgaatgatcaattcccggccggaaagcggcgatgcaggtagagtggacgacggcggcgacgacgaggcccggcgagcacacgatgatcttaggcaacgtgtactcggcggggttaatgctatgactgccgtcgttgtcgcccaagaagtagtcgaggctcctgatgcgctgatcgaagcagcgaggtatgtcaatggcggcgcgggagagaggattcctgatcctgtctcggcggccgaagcattggtactccaggagccagccatcatcgtaggaggagaagtaggggatcgcgcggctcgaattcgcgccggggacggggcggagctcgccgtcggggaggctctggtagacgcaggggctacgcaggatgagcagccacggcggcggcggcggcagcgggtgttgccggagcgcgccgaggcgccactggccggcgaggtccgtcgggaggtccgaccagcatggcggtggcggtggccgaggatgcggcggcgacggaaggatggcgacgtccgtcggaaggtccgacgagcctggcggtggtggctgcggccgaggatgcggcggcgatggcggcggactgctacgtgtgtcgatgccgaaacagagacccatggctccacgactgtgggcggcaaacacaaactaaactgattgcaaatttgcccctaataataaagtgtaaagatgaaaaacaaatctgtatcgaacaatcgatgaatccagtttcaaaatcggatattgttaggatgggatgcatggattgccaggagagaacactatctgtctgtataacgtgttacgatccaactcgagtcttaatacggttctatctttggaattctgctaaactaaaactattaaccatgattttggaaaaattttaaatcaactcgactcttataatatagtattatctatgggtatcagaattttggaaatttcgaacctaaattgtaaaccatgattctcactcatcaatcaacacatgtacagtaggatcatctgatggaattactgcagcaagtaatactggaagcactgacaaattgcctgcagttcaattattaccttgacattctagctagatgatgatctcctccatgattaattagttgtaattaccttggaaagaaccacgtcgcactggatcggcgactgatgtgcggtccacccggtgaaattgtcttgcttctcagatcataaacgccacaggttgaatctgctggccattcgtgccgacgctctgcaccatagtcggcgaagtatattttacctgcttccacataacctccatagctcgacgcacgaactgccatggagcagcttgtactaacgaagatcgcctcatcacccaagctctcgatatgaacatcagtccatttgattgcttcgacatgacgaggtagtgtaatctcttgcatctcacggcggcgtaggtgccatccaataagaagctctcgaacaagccgacctgaatgatctgtgtcgcgagatcggaaaccatgggttgtttggtctttctgtgggtggtgatttcatgggcgaagaggtcgcctctcccggcgacggtgtagaccttgccgtcgtggaaggccatgtcgtggtagcccttgccttcccacgggccggccgaccacgacggcgaggttcccggccggcagcacgccaccacgtcgtcggcgttgtcgtgactgtagctgatcctcgcgacgacgaggccgccgccgccgcagacgatcaccttgcggatgtagaagtaggcggtgggggatcccggcgggtgttggcggcggaggcgggccgggtcgccgcagtggcagtggcccgggaggcgcacgacctcgccggtgagagggttcttgaggtagtggcggcggcgagggccgtgccccggccgcctgaagaggagccagccggcggcggtggagccggcgcagatcgtgtgccggttgaggcggctgaagcggcgtcgctcgccgccggggaagctctggagggtaccgtcgtggaagttgagccacgggagagccgggggcagcggaggcggcgccgtcgtcgccgcgtggcaccattggcggcagacggagccgaagcggacgcggtcggcgtgggagggcagacggaggaggaccacgccggctaggtccgtcgggaggtcgaaccagagcggctgccggcttgccggcggccgttggcgtggctttgcttagtccaacgcccatgacgcactagctacctgcccgtatgtatgtaggacgtcacgtccgcacatatatttgggagtttgagacagggtgcggtacgtgtgaataacggttcaaaatttcggactgacatttcgaatctatgttaagatttcggctgtttttttaattttttttcaagcttttatgaatttggcaaaaaaaagttcaaatttgatcaatttttgttaaaaaatttaaattatttcagaccgaacttgtcgaaattttgaaagtttggatcatatcggtacccgatagaaatagtgtaaatgattatttcgtacgaaaatttctatatatataagttgctttaaaatattaaataatttattttttaatttaaaataattaaaacttaattaatcatgcattagacataaacggttttttccttaacaaaactcccgtcgattcaggtttgaaatttcgggcactgttcacttgcatgaaactatgtagtccaggcaaactatgtagtccaaaatatatatatttatttattaacttgcgaattcagtaaagtttattctaatacggtgtaaatctgctcaattttaatttttaattacgaattttacgaattaaacactaattaacttaataccgagaattttatactcaagttagaacaacagggaacatggtgttgcacttgcacttacttcctgttctaccccttaagagcaagtttagtatagcccactactagctctaatttatatatagccaatctaatagccaattcatacaatagttgtttactatactattaatatatggtcccacctgtcatacacacattgcgtcttggagtctgcgttgcagctggctacagatctgtagcccgctgctcttctctctcatattttatctcaataaaatatatttacagcgggctaatagcctgctactgtatctgctctaatggcaaccacagtgtttatttagcaacttggtattaagtagtaagatggattccggtgtgaaacaataatagttattagcatgtttcacaatgtttaatacctgaagtgataagtaaagtggggtccacatggaatgcttccctccatcacatataaaactcaaccctacctacgaatctaaacatacacatatccaggtttatagctagtatttctctttttttttacagagtagtatgtgagaagattattatacatacacgagtaaataatatattttaataacttattgttagtagtaagcatactatccggttataactactaccacataccacaattgtatatactctctccgtcccataaaaaacaaatctatgatcggatgtgagtatgtacgtatcatagtatagtactatgatgtgtcacatctgttttttatggaacggagggagtagcttattacccgctttttctttgcattgtggttgctctaacgaatttagcaacaagtgtaagggtttaactgcaaaaatgtaaaaccaaccccctccccttcccttcctataaccaccccaccgcccccgcctcacctcgccggaatcgcggcctcgttcactctcgcctccacccgcgccgccccccaccctccgatgccggagcgccgccacatcgccggagatccgccgtcctggtgatccccggagcacacccgcccacccaccatggaccgcctcctgctctttcgcccccggaaaccggcctcctcctcctccgtcgccgcggtggcggacggcgacctcctcgagcgcgacgtcctctggcccgcctcctctgccccaggcctcctcgccgcgctccccgacgacgaggggagcaagaagaagaagcgcgcgggccccgccgccgtacggtccgcctcccgacctgtcccggagaccgccccgttgaccccgacggcgggcgcggcgaggtcggcgcccgtgaggataccctcggaggccgcggcggcggcggggaggagggggaggtgggcggcggcgcagtcatccgtcggcggcgaggacggggacgccgccatggtcgtcccgccgcacgaggtcgtcgcgcggcgcgccgcggcgcacagctcggtgctggagggcgccgggaggacgctcaagggccgcgacctccgccgcgtccgcaacgccgtcctgcgccgcaccggattcctcgactgagagggcggaggccagtcgtctcgtcgctctcgggataaaaccaaaaaagttttgaccctttcttcctttgattttgttcccctcagttgtgtgtttccggctatctttgatttcttccccttcgttagaatgggatggaaagaattgaggcgagtttgcgaggtgtacaacccggcgcaataacaaagttattccatcagttatagatggaaattttggtccttacatctgttcaattcagtatttgcttgatttctgttcaattcagtatttgcttgatttatgtttgcttacttttgagtaggtgaaaatttagttatcggtagcttggtgccatggatggaaaatttagttgttggtgagttcagctcacatgctcaaatacttatgtttagctactaataatcacccaaaacggaggctcgtaaggcgcaaattgaagttcttagcaccagagatggcaattgtttggaaaactttggaactgctgaatttggggtaattataagtaggatactgagaatttagttgcctccatgtttgttcataggcattgtgttgttaatcagacgtgccatgttaagtgttacttcctccgtttcatattataagactttctagcattgctcacattcatatatatgttaatgaatctagacatatatgtgtgcctagattcattaacatctatatgaatgtgggcaatgctagaaagtcttataacttgaaatggaggtagtatgttctagctaatggtgtggaatttcatctcgatactgcaatctactatatagttttggctgcattgcagttcggtgtggtggaaccattcagatttgagtgtttgaagtatctatgtgattatctcatatttcctggttctgtccaagagagtataagaatggtaaaagtttttaagaagagatgccaggcgccagctgccatattgtttctggttttcgttttagctgaaactgaggataagttactaattctgaacattgccaatagagaaacctaacagtggtgtttaagatgaacattgtgtttgcttttgttatttttattggcaaatgattgtatcaatgtatagattgtaggcaagttgctcgtaggtcaaacagatctagttgatgtaggaactaggaagaaatgtttatctaggtagttggtaccaagaaaaacacattcatcttaaaagcatagatgttgattccttggaagtcctttacaccattttttggtggtccttcaaattcactacacatctcaatagttatgctttgctgtagatctggaaccactgcacggcgttctagtattttcatggaatcatctgctcttatgtcttgtccaggaccagatataaaggagctgtttgcctattttgaattgcacccactctcatttctttctgtgcagctgattgccttgtcacccctctgttcaggtataaggaccaccaccattccaccgcggtgtagctaatctgctaatgatacctcaagtacacaagttccttggattatccccatcaagaaacagctaatatgtctttgccatcttaacttgtgggataaagttgtttggttcagtcacttcaaaatatgatgccatacaattcagaaagctaatcaaagaaagagtgaataaatatggtccatatagaaactctgaagttaattgaagaaaacagttgatgaatacggccatccacctagctgagaccaaattatatacaaggacattattaatttcaaatttctgaattaatatgataaaaaaatactaaactaagactcccaagatgaataaaacttatatttatcaattcttaatttcagaattatcaaatcatgaacaaactaaaattgaaagtccaagctgagtaaaaattgtacttactaatttgactttctaaaccattaaatcaagcaaattactcagtaactgtcgatatatatttgtaataaagttttatacaagtatttggtatgcaaatgtaatataaatagcccgtgggaatacacatgttaacgatgacctgccagtctgtcactaatgtggcacattatgcatagttttatgtttatggaggcagtagtacaatcatcaaataattgaatcttgaatgcttgatttgtgttgtttcatcactactaagagattgcaagaacatgactagtcgagtagccatttgaacaagagaacatgactgagagattgtgataattgacaccatgaccatcttttgtgaattggcacattttgtctagtgctctagtgatctgtcagattaagagcaatgaagttctcttgttcaaatggctgttctacatatactgtcgtcatggatgcgccccaatgctgcatttatcttttgtatggtttttcttttgtcttttaatgaagtacaatcaacttcagatttacacatccactctcaagttccgtactacatgaagaattttgttcagaagggcaactgaccattaatatggattttggagctttattttacttcaatgtaggttccatccttaagttgtttatagaattgatactgaccttttttgtgttgtctggatgctaaaagtaacactatctttacattaaatcgtttgatatccctttcaggatcaggtccactttcttgcttttatttgattccttcaaattattgggatgtcaatttatttgtcctgagggctgtacattatgagattcaactgctctgaacatgccatatttctttcattatgtactcctgctgaccataaattatttagtgagcatgtgtgatgtctagctcatacttgattgtacccaactcatgttttcagtataaaataaatagcatatgctgccaaatggtgtattcattgaccatctctagatgaccagctgcttactttatttcattgttttggcttcaacatgtattgatccgattgcaataagtgatatagtctgcaatgggcatgcaatatgttgcttcataaccatactgatgtcctattgtagttctggtgagacaaatatacgacgtgtgtacaaattatactcatggtaacccagtctcagcgaagttttgtttatcatcaatgatgtatgtatgtatatatagccacatgatgttcagaagaactactacttgttaatgtaatcacattgatgatgatcagacaatgataatggtagttatgcagcatggatctaaatatagtctggagtgaaagcatcctgaaagaaaatattctgagcacctatctgagatcactgtgctcttgttggccagataagatatactttctgtggtcatgtgatctatgtgtttgtccatacaactgttctgtttctttgtgacattgctggtgcctggtggcatggctttttgctgtggtccagtctccaggctataatagtatgttctgttatgatccagttcacaactttatgatgatgctgcacccctgcaaggaaaacagttttgttgcagtttgccaatgaatatgctgtggtgattcctcctcaactacttcactgggagatgtaacaataaaccctagtactcctgagatgccaagcatccaatgctcacaaggcaataatgcatgcagtacaagagcaagtgaatttacaccagagctgatgcatttcatgtttgaatgccatccatagatcctataaaattgttgtttgaatggagctgaggtccaaagtatgaggttttcttggcaattgctaggtcttctggaaaccagtcatcttttgctttaatcctgggaatttactgaaatttggcttggctactgttacgagtgccttgaaaaaagaagagagaatcccagatggcttgattagattttcaacgtttgaattcacacttcacaaaccctttcctcctcggaagcctgaaaatatgttgaattctagtacacattccactgctaatagtacttgtatgcacggtgcttatgtgatgcgtggtggctgtatgtgtttactgatctgaaaacgtcctgaattcgctgcgtggactatctcaaactttgaagtcagtccttggttgagcaacccacacgtgtacaacaattggacctgactctgaatttctgaaaactttgaatttcaacagccatttccaaggtactagtagcactaggagtacctttttgtggctgcagcctgcatggatcgtaggtgtagaccagaacagcatcaatcacgtagaaaaagcatcattaactatggttaattcggtagcctaaattgcacaccggttttacatggctacagttggtgccctgcttttcttcctgtctagaaatgagatcagatcagacttgttgttagtcagaaagtgtgatctgtcaaaatggcctaaccatctatcagcatggagtctgctccagctcctttgttgaactatatgtgcattagccatagtggagatggaatcatggaattggagtgaacttgtatggactcatgaatcaaacaaaacttggaccatggttgaatggtcagttagaagctgcttgctagaatacagagccatgccatacaactaaatagaagtttcttgctaggctctcttctgtcagatccccaaattcaacagaatgtagaattccagtctccgaaattcccatccacattccaaaaaccggatgaagaaaaaggtaattaaagaagctggattcattggaccggtatgtttggcatccttcaacaattgtgctgatcaccaaattaactaaccatacgttgaaatggtattcagtcgaaggcgacagagcatagcatcacggcgacgtgtgcttggagcagagacgcgttgcatgaatcatcgcagagcgaagacaatgttacttctgttaaaaaactgtgccacctcgctcgcagctctggactgaaggtgtacgcgttcttgacacagacccagtcgcaagcagtagctacgtagacaggaaagactgttctagatttggactgaattgcttgcacttaattgtagtgatatagggtgtgtttagttcctgaaaaaagttgaaagtttgaaaaagttggaagtttgaaaaaaaagttggaagtttatgtgtgtagaaaagtttttgatgtgatataatgtgatggaaagttgggaatatggggaaactaaacacggccataattgatttaacagatttggacttaattgcttgcacttaattgtagtgataaatgatttaacaaaaagataaatacatcgtcagtccttaaatttggaccgcgacatcacgacaaattggttatctaaattaaatttagtttaatgtatcacccaagatctaaaaacccatttaacaaatctccgacgctggtgtagttatctagagtgacaaatgtttttcatttagccccgttgttttagatttatccttttattttgaacgactcgcactagatagtgcaaagttctattaatagagtaggaaaaagatttgtcctcaacccaacttctctctatactctatcgatcttctcctctttcagaacaaggagagaaagcggcagcaacatgaagtgcggtgagcatagggtggtgcaaaatgcgggaagggagggaggaggcaaagttcggtgagggtagtgtagcgtctttttgtcatcaccaccaaggatattcgctaagcgcctcattaccttcaagtcacatgaggtccatcactcatcctcatagtgaccatagcaactcaccgaacttgcgggatcatcctctccctatcgcatcgtctgtctctgctctgagacctctgcctatcgataattgccccccccccccccccccgtgaccgccatctcttcgcctttggggaatgacggggaataggggtggtagtcggatcgggggtgtactgtagggagagggctaaacgtaaaatgtttgccaccatggatagcctggtcgttgcacaaaactagcccaattatacatgtgaatacattaaatcaagattacatattatagttctagatgagcaatttacaatattatggatctaagtgatacccaatctaaatttaaagaccgaccatgtattttatatatgtttagagagcctgctcaaatgaatataatctgtacatccttttatatctgcaaaccaaggaaaacaatgtcctcaaggacgagaggacgtgttgggttgacttgacctagtcattcagccttccactaaaacgatatatatagtcgatctacgttgggatagtctacttatttatacggaatgggttaaatataaatatcatatattagaaacctaataaatattttctccgattcaaaatataatgcatccttattatcgatatacagtggatccatcctgggatgatctactttttcatatggaatgagttaaatatcatatactataaacctaataaatgttttctctatttcaaaatttaaggcatcctttcaaattatcaaaatcaatatttgaaaattttaaataatgactggactaaaagtatgagtatctaaggccatgcatgtagctagaaatcacgtttctctatttaaaaatattttcatataatattaatttcgtaattgttgataatatattatgaaagacactaaagataaagtaaagataaagtataatgtttgagaatgtgtaaaaggctaatacgtcttttagcatgcaggaagtagtacactgtacactgtacagaaacagctggtctcacgtagaaggtctttagagaaatcatatcgttaaaaacgtgatgcaaacaatccacggcaataatccaaacgatcagctccattgaacaggtcattaaagaatctctcattcaattctcttggcagtactcggtgcttggtgcttactgctaatatatataattagcaattgctctggtgcagtgtatgaattgaaaagagtgaaaacttcatcatcttttccattgcatggtcatggcaactgccgagcaattctttgtgacagcatgtagcttatataggtgatctcagctgaaggactgcaaacttacaataatgctagctgaaaaacactcgcagttaccatcagggaatgccaatcatatgcctttaactccttattaactattctctccgtttcatactacaagatatttgattttttttcaagtttataataaaatttagcaacatttatataatatatcaaattagttttcctaaatctaatattgaatatattttagtagtatatttttgtgtaatgaaaaaatgttactctgtcttagatttgattaagtttaaagaagtttgagtagaagaaaagttaaatagtgaaacgaagcgagtgatattgagcttatttgattaatttagataagtgtacacatacccggtcattacagccctagtgtgtgtgtttgaggagaagggaattgaggagattgggaagatacgcaaaacgagatgagccattagctcataattaattgagtattaactattttaaattttaaaaatggattaatatgattttttaaagcaactttcctatagaaattttttacaaaaaacacatcgtttagtagtttgaaaagcgtgcgcgtggaaaacgagactcaaatctcccctagctccccagaacgaacagagccttaaagcaacacggaagtaattaactcctccgatccataggcttgtcatatactcgtgtcagttcagttcagttcataggagtagaccttgacctggacttcgatcaattccttgactacttcagtcaacgcgagtagtttgttgctttatcaattcatcatcgtctttttgcgatcctttttttcagaacttctttttacgatctagtcagcttattaattgactggttaattactttaagcatcgccatcaacgataccttcatcgatatcattatcttactacattcatgtctacagtcaaaagacgtttacacacgtactatgctttagggggtaaaaatagaatgggtatttcctaaccgcctacttgacccgaggcttgcgggagtaatatatgggaggaaaaaaaaagagatcccaatactatccgaatttattaggaaaaaatgggttaggatatgggaagacatgtattcacccgtatgtcccatgttacaaaatatgtacgaaaacttattataaatccacctaaaaatatgataaaagattggctaatcactattttacgtgctcacatgtactattgtgtatttttttttgatgtatctcttttagtactttaattatcttattatatttaatatctatgaattagagagataaattaatatcggttatcaaatctgatttgaatgaaataatatgggataagtgatatttatatggcactatctgtatccggttccgaatttaaaagaaaatacatataaaattatcataatccgaccgtaaccgcccattttcacctctactatagcgccccgcatgtacatacaaattgacggcacaaattaaaccgatcaaattaattaacttgtacaacgacacgaatgtgctagcttttgcaatcgtgttaattctagctttcgtgctaatatagggctattttggtttgatcctaccaaattgttgccgttttaatagtattttggctagttttttatttgtaccaaaacatgctagtaacacatataacactactatagaaatgatcttcacatgtgaccaaaacttgttttcgcagaccaaaacttgttttcgcaggtgaccacccacctggagccaagtgtttgcgaaaattgacatttttctatgcggacgcaacaaccgcatacgaaaatgcatattcacatatggcgtcctaagaaggccgcatgcatgtaaagatccgatttttacatgcgaataagtaaggacgcctcactacaacgattttctaaaaatttaaaaaaaataaatccaaaacccttgatcgggcaccgccttggcagcctgtgagtccatcgccgtcgggtgccgccactaccaaggcccctccgctagctccgtgaaggacagagccatcgtcgtcattgtcgatgcagtccgccgcccaccgtcgtcgagaccctaccgcaaacaaggccgacagcgacagatccatgagggagagggccgccgctgtagaaaccgcatgggggggtaggaagtgagtagtggagagagaaatttgatattttaaggcgtggtgaactggttgcaggtccacttgcgaaaataggtttatttttgcatgtggttatttaagagcccccaacaaaaattgatttttacacatgggcttcttaagtggccttatgcgataatacgcctattattatagatgtgtttcttaaggagccgtatgcgataatgcgttttcacatgcgaccctgaactaccccccccgagcaatttttgcataagcgaccaattacggcctgcaatgcacaagggccctcatctagaaaaatcgttactactaaaattttggtattgcctatatgttagcatggtagcataccaaagtccataactctctagctaattaatctacttcactaactttgactatcaataactttaaaaatatttagtttaaaggaactataacaagatatatatatttgtctttcaaagcactataataaaagtaaacattcatttatttattatatatattataatagaaaaataaggtcaaagatatatttggtaggccatgttattgtctaaaatgtcaattaaaatgaaactggagggagtactagtactgtaaccaccctccctctccctctgtgcgcaagtccacacgtcaaccatggccgtacgtattgtccatgcatatgtaaacttctccgaaaccaattcattcatttcacgcgaactcgagccccacacatatatatacacatcccaagatcacaaatcgagtgtaattaaatttgtgatttgtgaaccttcttcaattctacctagctagcaatctattgagaggtgaattgaagtgcatgcatacaagaatatatagatggtgatgagcggcggcggcggcggcgcgaggattgtcagtgatccggcggcgacgccggggttccgattctacccgacggaggaggagctgatcggcttctacctccgccaccgcctcgccggcacgagggccgacgacgtcgcccgcgtcatccccgtcgtcgacgtctacggctaccatccttcccagctcgccgccatggccggggtggcgaccgcgggggacagggagcagtggttcttcttctgcccgagggcggagcgggagctccacggcggcaggccggcgcggaccacgccgtcgggctactggaaggccacgggctcgccgtccttcgtcttctcctcctccgccgccgccgccgccagggtcatcggcgtcaagcgcaccatggtcttctaccagggccgcgccccctccggcaccaagaccaggtggaagatgaacgagtacaaggccgtcgccgccgccgccgccgacgacgaccacaacgccgctggcgtggccgtgcagctgccaccaatggcgccgccgccgtcgtcctccgcgtgcgtgcggctgaggaacgagctgagcgtgtgccgggtgtacgtcagcaccggcacgtccgatccttcgaccgccgccccctcgacgcgcccccggtgatcagccaccatcaacctcagctccagcaacaacaacgtcagctgccatcgtcggcagcggcggcggcgacgaacggcaacctcatcgccctcgccggcgggtacgagtgctcacacgacagctccggtggctcgtcggaagatgccgccatcgactggagctcgctgattaccgccgccaccgattccgctaccgccgccgttgatttcagcttcaacgacgacatcgatttcagccctgccgctgttggcccatgggcgccacagctttgattgattgattatttgtgcacactgcataataactgaattactagtaattagtagtagtaagtttgatcagtgcttgctaattgccatagtgttctatgttcaggtcaactcgattgatttattacctcccaaactctcaattctgcttgtctttaatttttcttgaataaattctgaactatggcctgttcttttcttacgaagatttcttacgaagatgaagattctacctcgctttccgttagcacgtttttcaaactgttaaacaatgtatttttgtgtaaaaactttttatatgaaagttatttcaaaatatcaaatatatccattttttaagttcgtaataattaaaactcaattaattatacgctaatagttttcttattttgtgtgcccgtatttaaaccgaatatttatgtgtgttagcaatagcatgatgaatggcaaacagaaggctttattaaaaagtcataaggaaaaaccaggaaagaaaagaaaaatagagtgcaaatataaataataaaagttccaacagaaaaaacacaagcatacaaaaatttaagaaaggttagaaaaaaaatgaaattctaaagtggagaaatataatgcatcggatgagaaaaactcgaaaaggaaaaatcagaaaaactataagagaaggaatctaggatattggtgacaatcgtacgttacaaaagacaggtaataaacaaaaaaaatatggggtaaacatttttatctatattcctagaggtttaattaaaaaaacaaagttatgcaatgagtaaaaggcccagcattaactatgaaattatgcttcaaaatccaaattatttttggttgtaactgatgagctaataagcagtcaacagacgatgaaagacttatggtgaaccacttatttcgtgctgaagtacagtgatagccaccttaaatgtaaactccaaaatagatatcatcacataccacatcataaagaaaggtcatgataactgcttgggatggtagctttgaagttgagccaatttatatgagcatacgtaagtcgccttctattttaatggttacaatctactcaacacttgtattgcgtaactaaaaacatatgtactgcataactaagatgatgcctcttttttctctttatcctcaatttttctctttaggtaaactaggaagaaagcccgcgcagatgcgatgcgtatcttgttaattgttttataaaaaataataaaaaaaattatatatcatcatttctacttaaatgatacttcctctatctacttttgatagtcatatttccaaatctgaaaaaattatttttgataggcatatttcaatccaataacctagtatcatattaatgactttctcggatttaatgcgtgactctccattcttctacacatgattggatacatgggcattgagaaatataaatattaatgagtcgcttgtttacgaggaatgactagtaacatgtttaaatggatgataagtagaatcacttatccttggtctatgtgccaaaatgaaatatgattatcaaaagtagatggagagagtattaaatgataagaatgtttctcatatttaaataaaaacattttgatcgagtgacatataaattattttatcgtcaccatgacttattatgttttaaaagttgagcatctattaataaataaaactgcatatgtaccaattaaataggcctaatacatcattaatacactaaaatatcctctacttaaatttcataactcacttatttctaaatccatatataaatattgtgaaaataccactacttctatctattaatgggatacctaagttaaacatgaatgctactctactgggtagagccgatcatagctgccaagattttctttctccgttgccttcaaatataggtcccacatcgatatagttgtactcctcaagaccagcttggagcacaattttaattcctaattcattaagtattgcatcgataagtacgaagttgagcactattagcgatggtggatcacactggggctagattaacttagccatatgttgcatgctatatatacttaccgcaccgtagcaaactctgttatcgatgcttggtgccctttaggaaaggacaaatggaagatggagttgatcaagatagtttttctattgtttttagtagatttgtggtatagtgtagacacactttttttatgatgttaatcattactacctaaatttttatgatataaatagaatactctgttataaaaatgagcaaagttaatcattcggtgatacttaaagaatgtacatgtttttccaaacatatttacaataactaatccgttggagtacacttatagtcacgtcagtggagtttatgacatatatccatcaattatacctgacatattgaaatttcatacgtataagaaaatataatatgagtagtttattatgcatgttactttattgctcatttgtttaagaaaatatttggcaaagaaaatatatatgaccataaatctcatgatggattatagcaagtccattggctggaaatgttgttgataacttttttttcatatctatataccatgtatactgcccacttctgaaaaactttgagaatgttaatctcaaacaaattacaattaaatctcggatgtacttgaaaaacacaactaaattgtgttgttatgtagatttaaattagtattttatatttgtaaactgatatttcacaccctaaaatatgatgtgatttttttgaaaaattgccgtacaactaactattatatgtcggccccatatgtcgtgatatatttaggacaacaatataacttttatagtttatttaaaaaatacagcggaatcataaattggatatataatttttttaaaaaataatagatggtttaataacattgatcggatattttatatttttattatccattttaatttaactacatatttatatttgtgaataatatttttatttttatactgtaaaaaataaaatagatgaccgtcgattttcttgcagcagaaggtaatctttgttttcaatcgtacgtgcgtactcaacttttgttttcagtcactagaaaaaatgcccgtgcgttgcaacggggtaaaaacgttatctttatcctatacattttactcccttggttttggaccgaatgcttccttggttttggatccaacgctcattccttcctttccagcttcagtcctagccctgtccgctacctccctctactcggcctacctctcttcggctcagcccaccagtgaacctgtaggcctagctcgaacaatcccgtgcctgtaccataacggagccgatcctcccattaaatccggtccaatctttctcgatctccaaaatttaatccggtcgagcttgcatagtccagtgtccgtacgatgatggagccgatcctttccatcaaatccggtcgaatctttcttgatctccaaattgttgagggattttgatctactcgatcccaatcttcctttttaatcaaaatccccaaaattgtcaagggaaaatgacaaatccggtcgaatctttcttgatctccaaaattgttgagggattttgatccactcgatctccctcttcctttttaatcaaaatccccaaaattgttaagggaaaatgatgagagagtagtcgggaatcttcttgatctccaaaatttaatccagtcgagctttcttgatctccaaaattgttgagggatttgatccactcgatctccctcttcctttttaatcaaaatccccaaaattgttaaggaaaaatgatgagagagtagtcgggaatcttcttgatctccaaaatttaatccgttcgagctcgcatagtctcgtgtctgtatgatgatggagccgatcctctccatcaaatctggttgaatcttttttatctccaaaatttagagggattttgatcccctcgatcttctttttctatttttttatcgaaatccctaaaattgttgagagaaaaataataagagagtagtggggaatcagtttttgcaatcaattggagaagaaaatacacatgggaaagcaaatcaacgtgaccgcggtgcagggttcggcacacgagaaaaactaccgcggcgcaaggttcggcacacgagaaaaactgcaaaaaaaaaagcgacaaaagaaagaaaaacggcgaaaagaaaataaaacggaaaaaaacgaaaaagaagggaaacggaaaaaaaaggaggaaacggaaacggaaaaaaaaggaacggacagcgaaaagaaaataaaacggaaaaaataaaaaaaagaagaagaagaaagaaacagacgaaatttaaccggaaaccttatgaattttttaattaggtatatatatagatatagatatgtatgtacatacctacggagaacagcagtcgtgtttacatgagggggaagttattattttttaataataaatctaatctaatggtgtaaaataacgggtccacaaatttaagtgaaaatcaacggtgagattagaatgggtccaccaatttaagtgaaaatcaacggtgagattagatagtcccatgtggtggcttaagagcgtatataggagtgccacatgacgtctttagaatatttgtagaaaggttaatttgtagaaaggttaatggacttttattatataataggtagactgtgccctcgctcggaacgatgccaccaatttccttagcaccgtgagacgttcctaccaaagtccaaaacaacaagctaggtacatcaagcgtgcaagtggcaccatcccctcctatcttctttcatccaatagctactaacatcttaggcaatgtttggctaatgggaaatggaaatgatttcccacccaccaaaaaaaacatctttaaatcctaaccattcattctccctctttcatttaatcctaacccttcattcatttcccaatcccaattccactctctatttcccattatccaaatacactcttagttgaagaccgacaatagcatagttggctcactcctagtaatgagaacaaccaactgcgacagtggcggagtcagggatgtcacgaagcccaaacgagtagtggcgttttctggtaatcgactaatattttcgaatatcataagatatctacagtggagacgtcagcgatggagcccgtgcagccacccgacctgcccggaatctagctcggtctttaatcgcaagtactattgtgtaaagatcagagttgcgaggcaccatcatgtttctacttagtattggatagtaagtagaagctattttcacctttgttgtaggcacggttttcataattaactgtgcgtatcaaatccatatttaacagtttctttggaaaggtactttaaaaggggtacgtgtgccgttaagccttcaaccattagatcaaacatgttttggcgtgagttagggtctgggcggcacccaggcgactgggttgcggcagccttctcctcccatgaaaggaggatctggatggaggttctctccgatctgctcagaaagtctgcggaggtcacgtctgcgatctgtaattgggttggtgatcaggttaatcgtgctggttctggttggatctggccgaatgcttttcgacatcgggcaggatggaggcctatcatgggacaatggaatcctaatccgaggaggagggcggatatgaagtttggtagaattacgcctgttgtcaaattctggtacggcaagttctacaggggtcacaccaaagatatcattgatgtggatctgttttggcgatcaaccgtgaaagaaaaggactcggagctgctggggtataaattcaggtacaaggaagggataaaatcaaaaatatctctcgggtcacagatatctagtgcaggtttcaatctagggttcggtcatctagcccttgtgcttaaggtcatggcggctgccgagggtgggggtgatcaagggactatcaatgcgatagttgcccacccgaagccttccggtgcgtcgtcgttgcccccagggagcaggttggaatctgaactccaagctgtactagttctgaatcaaagcgtggatgggatacatgatcaggcaacaggttcaagagtgctgccatcgtctggaaatcatgatggtgggttggcaagtaataacctgagcagtcaaggccctacagttttcactgaaggagaggttgtcgatgaggaggaggatgcagttgaaattgaaatcgaagagaacgaagttcagaaggccggtcaatggacgatcctagcgaggttctactcgctcaagtttcctaatcagtcggctctgtttgaggatatgagaagagcatggcgtttgcgggcggagatgagttacaagtccctaaaggataacctcttcattgtgtcttttaatgcagaaggggattataatttcgtgctgcaaggagatccatggttgcacagaggagatgctttattggtggcggagtttaatggcttgttaaacccttccatggtgaacttggatacagtccctatttgggtcaggatctatgaccttcccctagttatgatgaacagagcaagaggtgaactctatggcagtaagatgggcaaagttcgcgaagtggatgtccaggaggatggatgcaataagcatgatttcttccgtatacgggtggatctcccagtcaatcgccccctaagaagaatgctagctattaagataaaggtgcaaggcaaagaggagactcgcagatttcaccttcgatatgaaagagtcccacacttttgtttcttctgtgggtttatcggacactcagataaagaatgcgaaaagagactgacaaatgagaatgagcctttagtattttctgctgaactccgttgttcgcccttaaaaccctttgagagaaaagtgggtaaagtaaaagcagttcattctcaaggtgttcagagaaaattgtctttcaggggcccaggaagtgtgagttcttcgtcagcgggtattagacaggatgctaagagatatgaagatcaacccacaagggtggatgcttttgatggttttgatattagagaaggaaaaggtgaagactcaatagatagtcaacttgctgaccagacaaatatgctgcacgtctcggaggtgtcaagccttggacagaagaagggcaaggatttggttagtaaggaaaccagctcaataccttcaatggagatgatcccagcaattagagacctgaatgtacagcaagtttcctttggagatggctctactgaagaatttggaagcccaacaaagaggaaagctttgccgacaacaaagagctcaggcattgtccagcaggctgttttggagtatggccagagaggagcagaggaaacggcaagctcaacacgggcaatgaagaggctcaagaagggagtggaggcaaacactggcgtggaagacatggaagcaaccagcctaggggctgctggtaaactggcgggacctatgagagggtctcgccaggagaaatgagttgcctgcctggaactgccgtgggatggggaaccctgcgtcagttcgagatctgtgtgccttatcaaaggaggcgagttcccgactggtttttctatgtgaaactagacaaagtgtggagaagatgagtcgcttaagagggagactgggtcttaggggttttactggtgttagcagtgaaggtatgagtggtggtcttgccttgtattgggatgagtctgtttcagtcgatgtcaaagatattaataaaagatatattgatgcgtatgtgcaattgtccccagaggaaccacagtggcatgttacttttgtgtatggtgaaccccgtgttgagaatagacatcgaatgtggtcgttgctgagaacaatccaccaatcttcgtccttgccctgggccgtcattggtgattttaatgaaactatgtggcagtttgaacacttctcaagaaccccacggggtgaaccccaaatgcaggatttccgtgatgtcctgcaagattgtgaattacatgatctgggatttaaaggtgtaccacacacttatgataataagagggagggatggaggaatgttaaagttaggcttgatcgagtagtggcagatgataaatggagagatatatactctaccgctcaggttgtgcatcttgtctccccatgttctgatcactgcccaattttgctgaacctggtagtgaaagatccccaccaacttcgtcagaaatgcctccattatgagattgtgtgggagagggaaccggaagctacccaggtaattgaggaagcctgggtagttgcgggagaaaaggctgatctcggagacatcaacaaagccctggcaaaggtcatgacagcgctgcgatcttggagcagagccaaagtgaaaaatgtaggaagagaactggagaaggctcggaaaaaattggcggaacttatagaatcaaacgccgacagaacggtaattcgcaatgcgacagaccatatgaacgagctgttgtacagagaggaaatgctgtggctgcagcggtccagagttaattggctaaaggatgaggatcgaaatacgaaattttttcatagccgggcagtatggagagcaaagaagaataaaatctccaaactacgggatgcaaatgaaactgttcacagttcgacaatgaagttggagagcatggcaactgaatattttcaggatgtgtacactgctgatccaaatcttaatcctgaaaccgttactcgtcttatccaggaaaaggttacggatatcatgaatgagaagctttgtgaggattttacggaggatgaaatttctcaggcaattttccaaattgggcccctgaaatcacctggtccagatggctttccagccaggttctatcagcgcaactggggcacaattaaagctgatataatcggtgcagttcgccgtttcttccaaactggactgatgcctgaaggggtcaatgatacggccattgttcttatccctaagaaggaacaaccagtagatttgcgagactttcggccgataagcttatgtaatgttgtctacaaagtggtatccaaatgcctggttaacagattgagaccgatcctagatgatcttgtttctgtggaacaaagtgcctttgtgcagggaagaatgataactgacaacgctctcttagcctttgaatgtttccatgctatgcaaaagaacaagaaggcaaaccacgcagcttgtgcatataaactagatctatcaaaagcctacgacagggtggattggcgtttcttggagatggcaatgaataagttgggttttgctcgccgatgggttaactggattatgaagtgtgttacctcggtgagatacatggtaaaattcaatggaaccctacttcaatcattcgctccaactagaggtttaaggcaaggagatcctctcttgcccttcctatttttgttcgtggcagatggactgtcattgctgctgaaggaaaaggtggcccagaattctttgaccccttttaaagtctgcagagctgcccctggaatttcccacttactctttgctgatgataccctcttattctttaaagcacaccaaagagaggcggaagtggtaaaagaagtgctctcatcctatgccatgggcactggacaattaattaacccagccaaatgttctatcctcatgggaggagcctcgaccccggctgtcagtgaggctatatcagaaattttacaagtggaaagagacaggtttgaagatagatatctgggatttcctaccccggagggacggatgcacaaaggacgttttcagagtctgcaagctaagatttggaaaagagtgatccaatggggtgagaaccatctctccacgggtggaaaagaagtgttgatcaaggctgtgattcaagccatcccagtatatgtgatggggatttttaaattacctgaatctgttattgatgatctaacgaaactaacaaagaacttttggtgggattccatgaacggccagagaaaaacgcattggaaagcctgggattcgttaacgaaaccaaaaagcttgggtggccttggtttcagagactatcggcttttcaaccaggcacttctggcccggcaagcatggaggttgataacatacccagatagcctgtgtgctagagttcttaaagcaaaatatttcccccatggttccctgattgacacttcctttgggagtaactcgtccccagcatggagaagcattgagtatggcctagatttgttaaaaaagggcattatttggagagtgggtaatggaaattcaattcggatctggcgggattcatggctgccaagagatcactcaagaagaccaatcactgggaaagcaaactgcagactaaagtgggtgtctgacctaattacagaagatggatcctgggatgtgccgaaaatccatcagtatttccataatttggatgcagaggttatactgaacatctgcatttcttcaagatcggaggaagacttcattgcctggcaccctgataagaacggtatgttctcagttcgaagcgcttacagattggcagctcagttagtgaatatagaagaaagttctagctctgggacaaataatattaacaaagcatgggagatgatttggaaatgcaaggttcctcaaaaggtcaaaatctttgcttggagggtggcctccaactgcctggcgaccatggtaaataaaaagaagagaaaattggaacaatctgatatgtgccaaatctgcgacagggaaaatgaagatgatgctcatgctctctgcaggtgcattcaagctagccagctttggtcatgtatgcataaatcgggaagtgtttcagtagatataaaggcctctgttttaggaaggttttggctgtttgattgccttgaaaaaattccagaatatgaacaggccatgttcttgatgactctgtggcgcaactggtacgtgaggaatgagctaatacatggcaagtcagccccgccgacggagacgtcacagagatttatacagagctatgtcgatttactgttccagatccgacaagctcctcaggctgacctagtaaaaggaaagcatgtggtgaggactgtacctctgaaaggagggcctaaatatcgagtgcttaacaatcaccaaccatgctgggagagaccaaaagatggctggatgaaattaaatgtggatggatcctttgacgctagctccggtaaggggggtcttggaatgatcctcaggaatagcgctggtgatatcatcttcacttcttgcaaaccccttgaaagatgcaacaacccgctagaatcagagctgcgtgcctgtgttgaagggcttaagctggcgatccattggactttgcttccgattcaggtggaaacagattgtgcctcagtggtccagcttctgcagggtatcggtagagatttttctgttctagccaacatcattcatgaagcgaggcatctgctggtgggtgaaagggtgatttctattaagaaaatatgtcgtagccagaattgcattagccatcatcttgcaaatacggctagagctgattttcttgctggattttggttgggagagagttgtaatcttatctcacatttattaagcgagaactttatgagtgagtaatatatttctttccccccgcaaaaaaaaaaaaggggtacgtgttgatgtgcatgtgtgtgtctggactctctctataacttgtacaaacttgaactatactgtttgcccgttatattattttgtcggccgattgtacaggccggtttttatatggcccaagtccaaagcctgccttttggctgcgtgaccacactcatgtgatgatgtgataagtctgctagcactagcagacgccttcacggaccaacacaaaagttacgacccaaaaacaaactctccgaccgaacgcaacagcgcactgcatgccaaccgaccgaccgaccgagcccgggccgcggggtgggccaggtggccatccttccagacgcttccgccccccatcccacccactgacgcgtgggccccacacccacgtgggggccgccgaggagggccatcggtcgccgctttgaccggggaggacaccgtcacccactgacgccgtggggcccacacgtcagtagccccgtactagtacgttttttgcatgctttgtccgggatgcgcggcgcgaggcgtggctccacgtgtcctcctcctcctcccccacagcctacgtgtgcctgctccggtgatgtcctgtgtcgcgggtacgtggcggccggcgaccgggcgcgccctcgatatatcaggccgcgccccccctcgccgccgcactcgcctgcccccacggcgagcagccagatgccaagatcctccccgcggctactcctcccatgtcggacgaccacagcggcggcggaggcgagcagcggcaatgccggcgagggttcgcggtggacgtggtggagctcggtgcggccctggctctggccgacatggccggcgccgccgtcaaaccggccatgcagctgcagctgcagccgaccgccgctcaggaggaggacgaggagatggcgaccacgaggctgagccttcagctcggcaacaacgtcggcagcatcatccagtcctcctcctgctccagcagcggttccagcgccggcctccccgcgccaccgccgccgccgccgccggccaccgcctacggcaccaagcccctccacatgctcaccgaggtaactgaaactgaagccaatgacatcgctcgcctatcaaactgaaactgaaactgaaactgaagctggtgaaatcgcctagctgcaaatctatcctgctttaattaatttctcctacaaatttgcaggaggagaaggaggcgaagcggctgcggcgagtgctcgccaaccgggaatccgcacgccaaaccatactccgccgtcaggtgatccgatctgctcataaatagttggaaattgcacaaactgtactccaaattgctgcgactgttgggtgtcaatataatcagtgtttctcctggactatcaatttcaggctattagagatgaactggcaagaaaggtcgcagatctgtcaacacagaatgagagcatgaagaaggtgagcgaattagacctgacaagatcaacagttgtatcttttatgtagcttaagctggcaattaacagtaatgatgttgtgtttgggggtgcaggagagggagacagtgatgcaggagtacctctcactgaaggagacaaacaagcagctcaaagaacaggcacagcatcatctttcgctttccttgttctaattaatctcttagtagtataatcttcttctttttttgttctcttttactacaaaattattattactcctaccattctgaggccaaagagagcccaagagaatctactctactctactctaccatgttccaaatccaaacctccagttactttaatccctaatcccttttctcttttacttgtactacaaattaagctaagtaccattctgagttaaggccaaattaaagagaatctactagcatgttcctccatttgccacatgactgcactttactgctgctactggtcctagtagtggtcaaatcaatttggccattgctgtacggctgtagctagctgctggcgaattgggaactgaaaatgtttttattggatgctctggcacttgtgtagtgctgtgtatgtgccacactgacatctgtaatggatataaccattttttcttcctgtgttttgtggtacactgctccactatctggcaccttgtgcatgtccagattcttttagttgtcgatgcgatgatgcaaaaagctcgcttgaaattatttgtttaatcattgtcatgtgggatccaatggtccatccttgttccgcatgggtgttctagccagttcagtttcatttatgcgtggggaaaaaaagaaaataaaaaattctatgtgtgctgggtaatgaagcatgtatgtggcaagcagcaatagaatacatacctactctactcttatgtgatgtttgtgttagaataggggttgaatatacgagttgggattgaagttggaataggtataatatccctctaaaatagagacggggcaccacaatcacggcgactacaatgagtgttggaataggtataatatatagttagagagttgaatcctgtgataggcttgctctttcttaaatggagaggaaaatagagacggggcaccacaatcacggtgactacaatgagtgttggaataggtataatatattgttggaataggtataatatatagttagagagttgaatccgcttgctctctcttaaatggagagggggcaccataatcatggggactagtgtagacccctcttcttaaatagagggggcaccataatcatgctaactagtgtagacacgcagaggcgactataatgtagtgtagacataagaaaaatgatggcagtgaagtcatggatcgtagtggttaggacttatcttgattgggaaggagcgttcataatcggagctagaaagattatgtttacttcgctaataaatatcgtgtgattctacgtcgtcatctagtgtgtatgtagtgacactctaatgcttgaagggatcgaggaggttagtcgttgaggaggttagtcgtcgttcttttatatcgacgaacgtttataacattcgtctgtgtaaactattttgaaggtctaagaacgccaattagtcgagatcagccttttgatgataatggttggttaaaacgcaacattcccgagttcttcgcggatttgaattcatccctgcggatgcgttgcaaaatttgggaaattcatgcgttagcagtataaacaaacactgctgtaatgagacaagaaccaaacctgcaaggctgcaacaacgccaacagcaactgtgccttccagctttgtcagccactctccgccggagctgagatcatcgaggtgcagctcaagctgggccaccatgtaggggaaaaagcggtattgaaattttaccgacatagcgatacatgttcacgtaaaattaatataataataataagagaaattttatggggtttgcatttcaaaggtatagattccacggttctcagtcatatgtactatgctaaaggtatttaagtattgatataggtactatgctaaaggagaaccataggtactatgctaaaggtatttaagtattgatataggtacttaaggtatttaagtattgatatagatacttaggtattaagagtaaaacatataattttgctagtagagtgaaaagggtagaatttgtcccccaaattataataggtaccgtgtagataggaccgtacgcattaacataacatggtatcagcgttatgtgtttttatttatgccatttttctcttttgcgtggtttcttgtagatttacgttgtgttcgagttaagtcgtttatcggcactaagatcaatcaaatattgtctcatgttcaaacgctcgaccatgccaaaaccttcttcgaccgtgtctctcgtggctgcacctcttcaaactctagaagaacaatgtaggagatattgtttgtcccttatgaagggaatctgtgaactacataaataactaatcaactgtgtaaataaacaaaggataacttacgaatacgcttgtctagccgtcgatcggccgatcctgtctcctcttcaaccctcaaccatattgacgcttctccctctgtctcccttcggtgaacaggtttaaaccttagaacacgcacgaagcaaaagggaaagaagaaagaagacgcgagtgttacgttctaatcagtcactaaatcaacgaagtaatctaatttacttttttttcctacaatgataccgagatctacgatgatataccgatcaatggtttcgaagtaatctaatttactttttttttctacaatgataccgagatctacgatgatatactgatcaatggttggaggtattcaattcactaaaaaatactcatgttttactagttaattactcaattgtcattagttaattactcaattgtcatcatgttacaataattttattttctaccttatccttctcttgatcaacaatacatattattccacctccaagtacctctaaatacctcacaaacaccgtgaaagatctcaataagaatatatatctttatcgatcgttgctggttgtaaaatttagttttttttctaatttctatcagcgtttttataaaattagtaaaaaggaatttattaaaatttaatttttttaaatttctatgagcgtttttatataaaattaataaaaattgatactgttttcaacttccgaccgtcttcgtctccgtggccagtgagcacggccatggccgccgcggcattggcattagtacgttgctagcacatgaggcaaccgcaagccatcagtattaagttgcatatatcgaccagtttaacttaaaagcaaagcttaaactgatgagaaaaggtggataatccactttatattccaataggtatacactgtccagcgataacgtcgccgtcaattaaattgtgccaccggttacaaacatgaaaagcttctcgtagaccttgttaaatcccaagagaaatattaaaactgtgccaccggttacaaacatgacaaacttctcgtagaccttgttccgtaaatcccaagagagagattaaagggcattgaggaaaataattctacattaccataaaaataaaattaattttctctgtttcattcaatctaagggggagagattaacggactgtcctcagcaagaagttaccgacaacagtaaaggccaagccagagcaggaggaaggagacgatgagaaagctgggccgtgtacttaattgggcctcaaccaggccaggcccattttaaccgcgtctctcgtgggcccacattaactgccctgacaacacagcccacacgtggccgtgggccccgacagcccagtccgacgtgtcaccggatagtttccagaaacgtcttcctcctcctcctctctctctcctccccactccgcgcaggcagctgctttgctctgtgctcccttctcgggcctcggtttgctcagatccaccgcgtcgcgccgtcgatccgacgccgatgcggccgccggcgccggcgacgacggcaggcgcgggggggaaggtgacgccgaacctggcgatggacgcggaggggacgcggctgctcaacctcaccgtgctgcagcgcctcgaccccgccgtcgaggacatcctcatcaccgccgcccacgtcacgctctacgacttcaacatcgagctcaaccagtgggtgggtgaagccatgcgccgatctgctcgcctccctccgctggtgtccccgtccatatgatccgatctgacgccgtgtttttttttctctcttccttgtctcccttttgggtctatgtgtgcagagccggaaggacgtcgagggatcgctgttcgtggtgaagaggtgaggtgggggtgctttgggcttcgggaatggtggtttagggtttggatcggggtttttgcgtgtgtgctgattgagatctaacactttctggaacgcgttggatcgcgtgtaggaacaagcagccgaggttccagttcatcgtcatgaacaggcgtaacaccggtatgtagttgatgagtttttttttcctgttgcccgtatttcgtagcacgcttgttgtttagaactttggatattggactgattgagctgatctgtagtaccactatgacctgtgatctctgatctgtagttctgacacatatccagatattagcaggctagttcttcttaggattttaatttactataggcttttggaaagaataatctgaaattctgcacccaaatggcatatatacgtaaatcagctatgatcaaggtatatctacatctatgagtagcagagcattttatgattttgtagaaggtgtttttttttataaccacagtatttaacacagttacgcagatatcagctcaatacatcatagtctagacaatgaactgcaacattcaatattaattaatttgatttgtatgctttttaatgaatttgatttgtatgctggattcctcatgaaaagatctgtttctgttgttgtagcctgtaacagataatccaagatctgggctgtgtatatccccttgcagatatagaggccggatttctatccattttctaaaaaaacagataatctaagatctgtttttcttgtcgtaactcgtaacagataatctcgtggaggatctattgagtgactttgaatttgaacttcagcctccgtatttgttataccgaaatgctgcacaagaagtaaacggtatttggttttataaccaacaagactgtgatgctgttgcaggtgtttttggaaggtaaggccttttctctaatatctcacctgcgtgacatgtttcaatctgactgggtcatttagattgggcaaacaagaaatggacagggacagatgagaaccatctaagaatcgtgctccttgctatctccatttatgccatgaactaatttcgctagttactcttttgtgtaaaagacatttgtttttttacttttgttgtttagtatattcaccaaatcgtaaattagtagttgcaaatgtgatcctttttctgattctaaattatattatgtctaagtacatacactttgactgaaactgtggttgaattgatctgtttgggttcaggatattgaatgcttacgccaaagtgcctccaaagcccaaagtaccttccacaaaaaggttcccatcttttgagttgaactacacttgcattctaagctttacatttagctatatattggaattatactgatttctgttggtgtactgcagtgagtttgaggaattggaagctgttcctacatccgctgctatagatggcccccttgaaccttcttcgtcgtccactgttctagtttctaatgcccctgatgaatcattgactgattatttcagtgtatgttctctcctttaaactccctgctattgcattctaccttttattttttttcatgttcatcaaataatatacaatagcttgcctcagatcctagtaaatctttatttgcatcttgattgctacatttgtactagtatattgcttcttaccagtcacacatgtatatatgtttgtactgtcagtcttgtcacaatattgagttctgttctgaacaaatctgcagggcgctgttaatgttgggaatgtatcaattacaccaatggttggaagaactcatcagcctatcgagtctgttgcatcctcacacgtaccattgatcatcccatctgctgctcctacacatcaaatgggtgttccttcaggggctgcgtcagctccaccactgcccgtcattgacactaacgttcattctagccactcaacaaatcttgtaactccagccttttttgcacctccctcatcgtcttctgcatcattggtggcaccagcttcatcctttatgcccacagcatcaccttttcatccaacttctgccgatgctcaccgtccagcatatggacatggtacaccccttcttcaaccccttccgccgccaacaccacctgcatcacttacccctgtacacaacgatgagcctgttatttcgagggataaagttaaagatgctctcctgaggcttgttcaggtatgtttcacattgacaaacacatggttgaataacctttttctttatatatttttaactcttttatctcatgcccaacagaacgacgaattcatcaatttgctctatcaggagttacagaatgcacatgcgtagactgcttactcagcctttatggagtgtctggccttgacgagagttcacctgttctttcgtagttttgtgtgctttagttctcaaaactttatgtacagctttggcttctttttatatcggatgtccgcgaagagattgtgcagctttgtcttgatgcattattgatgtagagtttttatagcaatggctggtagtatttcttccaaatggttgtacttgtatagtatttttgtttcctgttggaaactcgaaatcggaagctggactatgtgtggcaacgttaaaatactgtccattttgtgtgatatactgcacagttgccatttagatatttgatatcacacatttttttagatcaaacttatttttacacattgatcagttctaaagatcaaatatatgtggccagagcgagtatgagtagctattgcctattggtggatatacgtaccgtggcaaacccgtggcactttgctccctcgtcgaatcatcgtcatccatcgattgttccagctgttactcttatgccattgctctacttctattctgcacaagcttgtttcatcagaaagctatttcttctgtttcacaatttaagtcattttaatatttttcatatttatattgatgttaataaatcaaaatagatatatatgtctagatttattaacatcaatataaacataaaaaatgctagaatgacttacattgttaaacggagggagtagctacaagaacgtagtagtatgcacatgctcgtttgttatcccccatcctgttggctgcgaggcaggtcacacccgctcgtagtaaaatttaattgcttcattcgttttatattataagactttttagcatggctcatatttatatatatgttaataaatctagacatatatgtatgtctagatgaatgtgaacaatgttaggaagttttataacttgaaacggaggtggtacatatttaaacatttatgttcttgattttgttttgcaactcaaaacaatttgaattccaatatgtacacactacgttgtcaccgaaacctacgccacgtcagagtgcgccgcgcgccggaggggacgccggccggccgcagcgcacggcacggtcaccggagcgtcagcgtcgagaggaccccgacgaacgccgccgcggcgacgccggagcagaagaagtcgacggcgccgtctcgcctcgccttcttcaccttcctcgccgccctccccctcgcgaacgcctcgtaccgccgccacgccgccgcctccgcaccgcggccgtgcctcgcgccctccatgaccgccgccaccgcggccagcacgcaccgcccgctgacgccgccgccatcgccgtcctccgcgcgcaggctcacctcccgaacgtgcccgtgccggtcgtcgcatgtcacccccgcgtcgagcgcaacgacgccaccgccgagcaccccggtgaaccgcgccacggtctccccggcgagccactcccggtccacggacaccgaacgccggctcgaggcgttgacggcgcggccggtggcggggtcgatgagtatccagcttagcgtcagctcggccggcgtgatcggcgccggcgccgagaagccctcctggacgagcgcgtcgacgcggaacggcgagcccaagaaccactccgacgaggcgtccgtctccacgacgcgcgacatgaggcagacttcgccgtggtgcaggtcgacggcggagacgagccgggccgggaggagggaggccgacgacggcaccaagccgcgggcctccgccgggagcgggaacgcgtcggcgaagagcgcccggtaccctcctccgccggtgacgccgccgcattcgtctaggccgtcgacgtcacgcagcgacggccacgtcgcgaggcagaggccgcgccacgtctccgcgtcggcggcgagctcgcggaaggcggagcacgcgcagccgagcgcggccagggaggcgccgtcgtcgagccggcgtagcacgagggagagcacgtcgcccggaatgtcctcgatggccgtcgtcgtcgtcgcgcccgccacggcgccgtcgagcgacaccgccgccgcggaacaaacgctcgccatggtcatcaggtcaagaagatgcatgccactgtcgtggatgtgcttggttggaagcaaccatgtctcgtctataaatacatggagctcgatcgaggtgggtgaagggagcgcgtgcggggatgagatcgatcgatcactccagatggaaggaaagcgaaggtcaactcgtgtctcgtccatggagaagaagaagaaggagacgacggacacggcgcggcggcggcggcagtaggggttttgcgttggcgggaagcgaaggagagaattattgcatggtaacacaccgttcgtttcaaaataaattcatttttcaccgatccgcacatactccctccaaatttataataattgattttttaaacaaggttgagatcaaacggtcataactttaaccaccaataacttcaaaaaaatttagtttaaacgaactataacaatatataaacatttgtctttaaaagtattataataaaagtaaccatacatttatttattgtatatattataatagaaaaataaggataaagatataatttgtagaccgtgttattgtccaaaacgtcagttaaaataaaactggagggagtagttggttatgtgtcgtgaaaaccagccattctagtttatgttttataatcggcatgtgtgctcatatttggtggtaagtgatgtacttctcaatagcgaaaagtctacgataatttcatcaatctcaaaatatacttgcccatttttcaaatatactcataattatagagtgtgcgtgggtttttatataggtaagtgtatgtgtgttgttagcgtatgtatttgagtctgtttagttggggaaatgaaaatttttgggtgtcacatcggacgtttgaccggatgtcggaaggggttttcggacacgaatgagaaaactaattttataactcgcttggaaaccgcgagacgaatcttttgagcccaattaatccgtcattagcatatgtgggttactgtaacacttatggctaatcatggactaattaggtttaaaagattcgtctcgcgattttttccttaactgtgcaattagtttttatttttatctatatttaatgatccatgtatgtattaaaagattcgatgtgacgttttttaaaaaaaaattatgaactaaacggggtcttatattaaaaaacaaaaaggagcaaatggaaaagatcctcaattgaaaggactcgtgggcgtggcacatcctagatgtttcagtcgtgccgtgtatcattcctgaaaaccgagaatgctttgatttagacaaatcatgtagtagtagatagagatgattagatggtggatgccgatcgatattttcatggtcccggccgtctccattaattaatggcggccagtagtttgggctaagaacttgggtttctgttggcagatgaacgtacgtaggtaccgcgtgcgaacacagttcgccgccgcgcacacggtttgcttctgctggagggcttgtttgatttcgagaaaaccccaaaaaaaaagatatctaagaattaattaattcatatgaggtgttatttgtagtacagaaaatcaattttttctctctttttttaagttgcggagaaaaaacatatggaatttttcattcactcaaatatattgaaaaattgctataaattaaaatgtgcatgtatttccgtttctctaaattttctattcttatggttaaaaattcctttaaatcgaactagaaaggtaatgtgagtgaaattttattatgaatatttatgtgcagggttttttattgaaatatttttattatattctaaactaaaattaaacttattttgtattctttgaacgctggtattttcttataattactctttcaacatataaattataaaataaaattatttgagatcatgtggttttgaattgctaagaacatattgtgtcgaaactatggaggtggccccttatctcgaaaaaaaggaggttgttgctatcagaaaatttagggaattttaacttgctagattgataccttacaacccaaaacaaatcaaataatatatttttttgtttgattgtattttaaaattttatatttttcattctaatagtcctcataaatatatttgaatttttatattaagtatgtgttttaaatccaacaacaaagtatcaaggtcaatttgtataggtaagtagccctcatatgtatgttaagagaaattaattcaattggtagaaagttgttagatgcctaacgtgatataagtaatagatggagatccatttgtgtttttcccatatagataattttaatattaattgtctaggagataaaaaaaacagatagaaaagaatggcgcacgtgtacttacgggcagggagggagggaggtttgggatgttttttctaaatgattaatacaacaacctaaattaatatgtcagatgtttatgtcgaaaccgatggttggatgctttgttttcttatcagaatttttaggattttctttgatttaagagaacaacgtaacatcttaagagcgtttacaagatgtgtaatggacttttaataccacatgctgtaaaggaggagggagagggtttggggtgttcttttttttttaaaaaaaatagatctaatgacctaaaataatgtttcattcgattgaaaataatgtgtccatcgatttatgtctaatcctatggttggatgttgtttcccaaaatttctaagaattttctataatttaagaatttcatataccagcttagagtttttcttattagaaaaactaacaaatcgatagtctaatgctttgttatttttaatattttctagtattttatttaatttaatagcatcgtatagcatcttaaaagtgtttgtagcatgtttagaatgacagatcaggagctgctagacctagtgggtggagatatgtggtattttaatgcaaaaataatattaattttaatttctcatgaagaaagcttgttggtatgtacttgacagggaggttgtggatgtgtgtgttttaaaagaaaaaaacgatctaaccttcgaaaatgaaataatagattcaccaatttaattgaaaatcgatgtgcgaattagagtatcacttgacaatttaggagcgtttgtaaggtgtaacttgccggcttagaaatatttataggctgtttcatggacttttagtatataatagtattttttctaaaatttctaagattttctttaatttaagaatgtcatatagtagcttagaggtgtttataaaatgttgaatggattttaccaccgcacggattttttattaaaaaatatataacaacctaaatgcatcaatttaagtagaaactggtggtcgatgctttgtatttttttctagtactttctccaatttaatagcaccacgtagtgatttagaagtgttcatatgatttttaaagtgacgaagggagagatgctagacctagtagttggtctatttgtgattttctttttgaattgtaaaagtaatttttattttagtcttcttaaaatagaaaataaggaaggaaaagatggatttacatatagtaagtacgttcgtcagtataatctaaaactattacgtacttttgtacgttggtttggatgttggctccggatgtttttttttataaaatagatctaaccatctaaaacaatgggtccactaatttaagtaaaaatagatggttgggtttctcttatttattaggtgtcatttggcgacttttgagtgtttatagggtgccacttgatggtttggaatcgtttataggaagtttgatggacttttagtttaatactccctccgtattgtgggacggaggagtatatataatatataatagatagataatagataatagaaatagatagacagatagataatacagtagatagttttttttcttgctatgaatagtactaccgaagctttatttccttttcaatctcaagtacgtacttatgtttgtatatgtacttatgtttgtatatgtacttatgtttttttaacagttagtatatatacatctaatttaatggtctataatgacgatccaccaatttaaatgaaaatcaatgctgagattatacagtaccacgtagcggcctaacaacatttgttggagcgccacatggtgatttatgagtgtttgtaagatcacaaattaaatatatcatttattttttttaaaagatgaacaattaaagatgattgatttgatatttgatatttatattgtagatctagttttaacaccgcatgtgtatatttatgaagtaatatatttcatctttatactgtagaccgtcgatttttcaatggccctaagtatttatgtttatgttttattttggctttatctttatagtaagtacgtgcatatttttttttcttccggcaaacattatgtacatgagaaagatattatattatataaaacaacatgtccattaatttaaaaatcaataacacataaataaattaatggatccatcaagtgaaaaccgacattaaaattagttcaactgcatgtatatatttgtgggataatatattttatctttatattgtagatatttgcttgttgacagtactatacatgtatgttttattttggttgtcgtatctcgtatgtacgtccatacgttctgttccttcggcaggcaaacagtacggaggagaaagatattatatatacatagatataatctattagcataaaataatgagtatgtatatatctaatctaacggtataaaataatggttccatcaatttaaatgaaaattaacagtgagattagactatgccacatgacgatctaggattgtagaattgccacgttacagtttgggagcgtttgtagaaagtttaatggacttttagtatataatagataagcttgtcagcactgcgcctctgctctgtacatacgcagcagaaatattagcgtgtggtatttccgttcccgtgaataactcacacgtgtggtgtgttttatatctccttaattcaactccaccacgtgctaatcacgtccgtgctgtttaataagtacggctagctagctgcctgcttgctaggccatgccggcaagcaatgacaattttgggttaacgatctataacctaactaatatggtcagttccagaccgttcaaaaaaaaaaggtcagttccaagcttatcaaattcatttccattacttcttaaaaaaatcatttccgttagtattggcctgaatggccagtgctactgctattttaacatctaaaacaatatgcagctagcgatgtgtactgttcgatcttgtccaaataccaatcaattcggatctttccggttaatttcctactgatattttatcgaatctgtataccactcgttcatccattgaatttgtcttactcgattattaagttatgctcagctataaactcatttatctatgttatattttttgcattcttttaatataacaatgacatgtgagattttggtgaaatattgtacagtgatatacattctgtttttaagggcatatttgatagggatccagcttcaactcaatatctccatcccgcttggaattagaacctagccaagcagtacattctgtttttaagggcatatttggtagggatctagcttcaactcaatatctccatcccgcttgaaattagaacctggccaagcagtttcaacttcacctcaaaagagagtggattgggctaaattgatttttgaaaaatgaattagagagttaacggctttgttcttctagagttattttgaaagtttgagctagctctactaaacaatccctaaagctttggatggtacaccgatatcgttcggtaccaaaacattctactacatgtttccagagaccgtcagattggaattgacaagcttgtccgtccgcaagaagagaaacatgctaagccaggttgaaataaatgaaatggcacatgatgcatgacctgatgcttcacttgcttgtagggtttaattgaatattacatggcataaagctaaccaatagcttgaaaaaaaaatccaagcaatactatttctaaatcatatttttagatcaaatatttggaaaaaaaggttttgaagaaatcatattttctaatgtatgtcacgaataatctactcgataatccatataatctggttttagctaattcaaacaggactttgtgatgctttccctgtgtaagatcgatcgagatgtttatcgatctgtgatgctcttcccttcattgatttgttcaacaaaaaaaaaagatttagtggactaattacaggattgcacctttcattcacagataggactacctccatcccaaagaaacctaaaatgagatctaatacattctaatactacaaatttgaaggttgaaacagagaaaataatactaaacaacctaaattcctagaatgccttcttttttttttggacggagtattattcattcaagacgatccgttcctgggccgttgcctcgtacgtggcggcgacgttgggcctgggctgtctgatgaatgcggagtaggcaacggggccggcctatcaccaaggaccgaacttttttcgtttttagattttttttaatatttacagaaataatctatggaccaaaaaaattgcagaaatagcccctgccgccctaatggtgggcggcaagctgacgtggcagacggtgggtcgaccgcgccgtctgccgccgtcggccaaaattgcgattaggcccttgccgcccgtacagagggcggcaaggggctaattgcaattttggccgcccataaagagcttgcggccgtacttttttcatctggg

SEQ ID NO: 5665 - DNA, 65502 bp, Oryza sativa
ataggttcctccaatccgtaaatgctgatatttttcatcttccagaataatatttcattattcaattaccgtatcctgatgcacatttcacttgttcacccagctccagaactttggcagcagtcagttaactccagtcgttattgaacttcctttgtctgtactagttttctgaaaattggccgtttcatgttgcactcaaatccaaaagtatgtttttttggttgacgatctgcactagctatggtcaagttttatgactttatctctttattcgagtgtttgattgacaaaatgtgtgaaatgttacagatctaagatctaactagacatccagtgaccgtatttcctgcatttcttgctttgcagaaggtgaacaaacagatttgctgctcaaattcagagcacttggcagttcgcacaagtgaaagaggttgttgctggttcaggtaatcaggtcccagttttgggccgtatatgagcccctgacaagttgtcgacatcgatgagagatctttccatttcagttcttcaagcactctacccgcttgggaaacatcagtctggttcagtttgctgtcaaaactacccatatcaaaatttagtaatgccaaactttgatattattaaatttcagttttgtatgtatttggtttgtgccctcaccaaattttcaagtgtttttatgagaggaaacttctgaaaattctgaagctgggtagagtggcattagtatgaatatgtttagccagcatttggtaatatcgaaatttagaatggatgaaagcggtaacaactaacaaaccgaacaagcccatggtcccaactcccaaaccttcatgagtgaagaaagggaatagtaatttgtaaaaaatgtattgactgctggtgaggatatcttgttctgaatgcctgacaccaattgcacgcctatgcttacctgcactgaaatgcgacatgacaaggcgttcttgatgaagcacaggatgagaaacacaagaatgcaggacagctgatggcatgctgtccagcgcaaactgtcagtacgcacccagataatggtattttcgtaacatcaataaaccagaaaaaaattcaagctatctgcaaaacatagttgaaaataattttaaaaaatggattttcatccttaaagagacattcacttgtttcttgtaattgtatgccacctaaatagtcataaaaaatttaaaacatttaacaacatagattaatatgaaaatatatcactccacaaatatgtaaggtcaaatttagttacaagttgcaataagagaacaataaactattaactaaaatagttaatgtacattcgcagttatatttattataacttataaaagttaaatttaaacttgcatgtttgtggaatgatatatttcatattaatctattttatcaattttttaaaaaatatttaggtgaaatgtaaaaaagagggaatatctactcagagaataaaaacactttcaaaaaaagagtatgaaattatgcgcgtggacaacattatgaaaggaataaagttaagtaggaaacctgaatgcaaacgtggttgcgtggcattggcagcagctcctctcagtccttaccaaccagagcatcatcacctctacatctccattttcacagtactggagatatgttctcaacaacctaaaagtaactttcgctctattgatggaacttaagggggtatttagatctagcggcgtaaagtttggcgtaaagttttgacgtgtcacatcgggtattatatagggtgttgcatagggtattcggacactaataaaaaaaactaattacagaatccgtaggtaaacagcgagacgaatttattaagcctaattaatccgtcattagcaaatatttactgtagtactacactgtcaaatcatgtagtaattaggtttaaaagatttgtcttgcaaattagtcataatctgtgcaattagttattttttttagtctatatttaatactttatgcaggtgttcaaacgttcgatgtgacagggtgcaaaatttcggggtgggatctaaacatagcctaaaaacagaacattcacaacatcaaattacatctgcagagagatcgctcgctacatggattgtcgtgcgaaaagctagaccaaacggagtgtcggtacaccacgacagtgcacgaatggtgggaagcgacaacaaacatggagaatgtgccaaaacgcatgtgctcctaggagatttggaaggaaagaaacgagaaaatctttcaatacaatgagctctcatctatagttttattggcaaaaattaaagagaagtcaaaacataggcgctagtaagagccagtgtctatttgttttgctgtttaaggataacccttttacaactttttcatgtcaacacctgtacagaaatttacttcaattctattcaattgaaattagcaacttgccgattcactaaaaaaaaacatttacaggatataagcaaatatctcaatctagatacaaccatgtagaggcaacagtttatgttgcttacagccacagatcacaggctcaagcaaagaatctcaattaaataaagaagcaaataaagtgaccaaaatgggtccatgcaatgatgggtacagactaccaatggagtaaacaacagccaatattgcatctgctttgcacagccacagggacctggaactctggaagatagctgctgctgctgcttcttctcctccattgccatctatcacctcacctgagctgaaatcaagaactggatctaggagaaggtcatggttccaaggatactcatcgttctcctggttgtgctgcttggattggcattccaggcaattctccggccaccacctcaaaaattgtgtggctcacccggtggacctcctgtgacatctccaagaatcaagctcagagatggaagatatcttgcttacagagaagatggagttcagaaagacaaggccaagttcaagatcatcagtgtccatgcgtttgattccaccaaggacttccccttgcaggtttctaaggtaaatgcaaacatcacgaacagttagatttgagaaaaaaaagtcatctttttttgtccatgttttcttttagatttttcatgcttttctgaattgattgcttagtttgtctgtcgaaattcaggaactggtgcatgaactgggaatctacattgttggtttcgacagagcagggtatggggaaagtgatccgaatcctaagagggatgtgaagagtgaggctttggatattgaggagcttgctgaccagctcgagcttggacacaagttctatgtgttgggagtgtccatgggaggatactcaatttggggatgccttcagtacataccaaacaggtaaagactgaaactgcaataagtaataatgctaaaatggtagtagtgctctcggtcaaaaaccatatgtggcttgacattttctcggttaaacttttgaaactataactatcattaaaaattttgatactactacttaatttagaaatataaaaatgacatgtgtggattaaaatttctttcataaatcttatactactaattactctctccgtcccaaaaaataagtacttttggaccttgacatagtctccaagatgctactttgatcaataatatagatattttaaataaaaagagttgtatattataatattttgtttaataataaatctagtaacatcaattttacattattgaacttttttattattttgctattaatagtcaaattaaaaatatttgatttgtcactatgctaaaaatgtttatattttgggacggagggagtagattttataaactcgtcctaacaaaaaagtgtgatcaacgtcgcaccgtacagacccaaaaaaactgatattcgcaactcttcactatatatactgtgtacctatgtgcaggcttgcaggagctgccatggttgtgccaattatcaactactggtggccttcattcccagctgagctatccaggcaagccttcaagaggctcatcgtgccagagcagaggacactctggattgcacacaacatgccatctttgctctaccagtggatgacccaaaagtggctcccttcttctgcggcagccatgcgccaccctgaaatattcagcaagcatgatttggaggttcttcagaagatgatggcaatgcctctcattgaggtaaaatcagattgtttaacccttatgaaccaccacttatgcgtttttaagaatggttttgaatgaattttgcattattatagtagatttcaaaaaatcgcttgatttacactaatgtggtccagtttgggtacatgaaaaaaaaaatcaagaagagaaaataaactgaaaagtggaacatgttatatgcaaattaacctaaaataatactatcgcaaaccataaataccactatcggtttagatttgtttttttaaagagcaattgtttggaatgttgacatatatatatcactgattgcttcttgatttttcagaataaatctaggcagcaaggcatttatgaatcaacacatcgtgatttgcttgttgcttttggaaagtgggagtttgatccaatgaatattaccaatccatttcctcaaaatgagggttctgtacacatctggcaaggttatgaagacaggttggtgctggttgagctgcaacggtacattgcccagaggcttccttggatccagtatcatgaattccctgaaggaggacacatgttcatgctggtagatggatggactgacaaaatcatcagagcgctcttggttggagaacagctctgaagtctcatcaaatcattctgtgcttgttagcttatcatcgatagccaaaagttaaaatttcaaacttattaattctagagttgattttacattttctatatgatactcgctctgtttcattttcatcttaacttttttcttattcaaacttttttaagtttgatcaaatttataaaaaaaattaacaatatttacaacatcaaattaatttcattaaatgaaacattgaatatattttgataaatatgtttattttgaattaaaattgttgctgcatttttatataaatttggtcaaacttaaaaggtttgagaaaaagagtcaaagcgacttataatatgaaacggagggagtagtgtattttgtagaattggtttttaagtcgtaaataagttttacctataaattatttttactactttatttatttttttttatagatcgtcagccatcgctcaaacgattcgacactcgagggtaaaatttacttaaaaaaatgtacacaaagggtaacattacacgcatttatatagtcaactatattttgcagttttagtaaaacttggagtaatccaaactggagctagtggccaattcagccacggctgaggatactccacatcgatcgcagtgtcattcgtataatcataaactccaacgtcccgacgaagatgtttacggtgaaccaagtacccgtagtcatcgtcgaaatatatgtgatttggcatcaagtgtggataatccttcactggcaagcacatcgagtaactagtgccaataaacaatgcattgttacctatgtcatcgacgtcatcaagatcttgcttcttgtagtcaaccttgtacaccccgatttcagttgttcgtacgtccttatgctcgctaccttcatcttcttccgtgactcgcaagacctgcaggatgtcaccttccgtggtacgtacaatgtagagggtgcccaattcacccatggtcggcttgagaatcagtctatgggtgaaggaggaagaagcactgacgacatcaatggcgtggatggcgccgtgaacggtctgggcgtagaacacgccgtcgtggtagatgcaatcttcgaaccactcacactcattgttccccatcttgatccatgtccacttcttgtcgccggatctcgcgaaggagagctgaagatatgggtgatggatgagcatcaccgtgtagtcgtcgccgcgcgatgggtcggaggagatgacggctttgagatacaagaactccctgaacgtctccggcgggtgcgtcaccgtgtgcatgtcatcgtcgttgctccggtgactgttgccgccgccgtcgtagtagaccaacttgtagttgttgaggttcccggcgtcgtcgtagagtggccttacgtgttcgatggtggcgacgggtgggaggtcgagctgctcgcctgtggccgggttgaggaggtggagctcggagcggtggtcggcggtgacgagccagccgtgggatgacccgacgatgtggcgctccgcgatgggcgggtccgggagggggaccgtgtaggacgtcgtcttgtcggcgaggctgtagagcacggcggcgcgcgggccggcggcggcggtggtgtagaggaggcagggcgtctgcgcgcgggagtagaggccgaggcggcgtatgtcgcgggcggtggcgcgccagagcttgcagacggcggcggagcggaacaggtcggggaactcgagctcgaggaggacgaggccgagcacgtcggccggaagctccgaccagtcggcggccgccggagtgtccatggaaacagatcgattaagcgtcgatgaaggcgtacgtacgtgccgcgtgccgccagatcatccgctaaaataaagcagcgcaactgatcgacgcggatcagatcggagtagaaaccgaacaggtttcagaaatctctatctctatctcttccctatctctactctctatctctatctcctctccactacctaaaaaattagagaaatttccgtgtctgtgtgctaaaaaaaaatgcgaaaaactttttctgtccgattgaaaaagaaagtgcaaaaaaggatttccgttttccgttaaaaaaaggaaagaaagatttctgtaccgaaaaaacaagcgctaaaaaaaggcgaaaaatgtgcgaaaaaaatatttccgtccgatttaaaaaaaatactgtcgtccgtggccaagaaaaagcaagcgcgaattttttctgtccgattaaaaaaaagtgtgaaaaaagggtttccatctcttaaaaaaaggaaaaaaatatttctatccgatatttttagattcttaaaaatagtacgtataaaccgatcctcaagaaaaaggttaatggaaaaaaaaagttctcgtgcaacgtttaaaaaaatgtctgattccataaataccgtcaaagtagatttggaaatttaaaagcgaattcaattttcccctttcgaattactttttttatgcattcaaattatcatatattaaaatccaccttaagatgtcgaagtttatataaaccgcacgagaaaaaaaaagccctataaaaacgctctgaacaaattgttagagtaaaacacctttataaaaaaagataataaaaccatctgacccaatgcgaggaaaaaaccatcttttctgagaaatctgtataattacacgtgaaaaacatcactatttataaaacaacagctttgaaataaccatgtgactcaaagcgagaaaaacaccaccatttattttaaaaaaagctagaaaaacaccaccgtttattaaaaaaaaaaactggttcggcactgtgcaatgcaaaaatgtccgaatttagaaaaaatgcatctgattcgtttcatgattcgtagcatttgtatcgtccatagtctaccatgttctggcatctggaactaagacaagtcttgcttgtgccttttttttttctgagcacaagatcaaattgatggacgtttaggtctgatagaatccatcgattttttccatctccaacacggcttttgtttcctcatctattctcctataaattatcatactactatagctactattctttataacatattatatgaaaataatattaaaaggtaaatatgttataaattgatatttagagaagagtgcacggtggctttttttttagacttgaccatgcgaggcagtgtaggattttgattcatcatattttttattgcaagaataggattgaaagagtattttagattatggccatgtttagttccatgccaaaattgaaagttcaaaaaaattggaacgatatgatggaaaagttgaaaaactgtgtgtaagaaaattcgatgtgacagaaaagttgaaggcttgaataaaaaagttgaaatctaaacaagccctatatgcatgttgtcacatgaataatccaacttttttgggcaaagcaaagcattagtaagattgccatcgtcgaggttgggccatttatggaagatgttctatttttccttatgatatgtcttagctacaacaatcaatacaaacattattattcacatggttatttatgaaaaacatatattatcattggaatttttcacccgttgcaacgcacgggcagttttgccagtactacttaaaaaaaagatatgttttcttcgatcgtcaaaaaaaaatagctagaaaaataaaaaaaaagtccgacccctagatcctattccctctccactcctctcgttttcaatagataccgtgatatcccatatatcttggtgaaaagaattgatgtgccggattgaacatccgtttgcaaaaacgaaatctacaggtcgagagcattccatttttatatgattttaatttttgggtttgtacttttgtatttgattccatataatttttatatttacatttgagtccctataatcttgcaataagatacttgagatcgttttagttaaaaaaataataaaagggtgagaaaagacagaaaggtgcataaaaagaaaaagaaaagccgcataaaaaaaagaaaaacaacaacaacaaacgtagatccgaacggaaaagaaaaatctgattcctataaaaggaaaaaaaagtggtggaaaaaaaagctagatccgattcctttaaaaagggaaaaaaagttttattcctataaaggcgaaaataaataaaaacatctaaaaaattcgtccgattccctaagaaagtggcgaaaaaatgcttcgtaaaaaataaaaagctggttcgtataaaataaaaaatgcacgcgagaaaaaaaaagaaaaaggcgaaacaaagtccgatttctaaccggtatatatctattctctatctctaatctaatctaactatttaaaaatagaaaatgcatgagaaaataaaaatggttcaaaaaacgtgtgagaaaaagtcagaaaaaagcgcaagaaaaaacacgctaataaggttttccatcttcctaaaaaaaattaaaaaatgggtgagaaaacttatttccattgtcggtaaaaatttttttaaaaaaaacatgcgaggaaaaagctgtcagaaaaaccgcgccatttttaaaaaaatggtttgaaaaaaccgtgcaagaaaaaaaaacaccatctattaaaaaacaaatcactctgaaagtactgtccaaaaaacgctaaattgatggacgcttgagtcggataggatccatcgatttttgccatctactacacggcttttatttcgccatatattctcctgtattggaaaaaagtaaaaaagaacattcgaaaaaaagcaaaaaatacgcgcgagaaaataattgtcagaaaaaacaggcaaaaaaacacacgagaaaagaaaagcaaaaaagggagaaaaatatggttttcatcgtcagtgaaaaaagaaaaaaaaacatgctagaaaaaaactgttagaaagaaatgcgccatttctggaaaatgattagagaaaatcgcgcaagaaaaaaaaaccatttataaagaaacaagtcgctcattaaaatacaaacattgtcattgacatgattatgcatgaaaaaagtatattatcattagaatttttttcactcgttgcaacgcacgagcatttttctagtctgtttaaaattaagataattttatcgtccttaagtaagtacctagagataccatatttagtgtaaaatttggtacatttaggtatcaagtaccttaagtatcaaaaaatttattgtaaaacaggaactgtaaatttcctcttaaaactatacttcagatatattctgctgatcagatgtttgtccgtgactgacatgtgaggccccggtcaacgtgtcactacgtgattggcctgcacattgtccagttcttttgtggtcgacgtgactaatataataatatattcggattaattttttaatagcgttagatgtgtttggcagtaatccgctaggggcatgcgaattagctaagggagttgatggagaaaattaacgtgcgaatttaattttttaattctaattatttcttttttgctgggtacattgctagagagaaataagagggtattcatgagagaattcatatcttctaagatatttgatgtgtgacttttgaggtggaaaattatattataagtcatgatgaacggtacggtgaggatgtatttatctttcacttaaaacacagttctcactcaattaccacccctccctagggatagattggtgggagttggatcgattaattccccatcccaatcttttctaagggtctctttgaatcataagaataaaaaaacagaggaatagaaaaaacataggattctgacatgaatgtaagtgtaaaacagaggattgcaaaacacaggaaaaatatagtaataaccgtttgattggaccacaggaaaaacacaggaatttgaggagagataaagactcaaaggatttcttctatgaggttctacctctcgttaaaattcctacaaaacttgtatgggaagagacattccataggaatttcataggattttatagggtttattccttttattcaaagggctttgtaggaaaaattcctataggaataaaatcctatgaatttcctttgaatcaaagggggcctaaattcataaatcctccgattaaagtgagattaaaatgctcagatttcttacactcccattccatctctcaaactcctctcaactataagccgtaacgccacgaaaataattagagaaaagaaaaggagcaaaatgaaaagagcaaagctagctagcagcccagtagctagccggcccagcagcaaaaggcagcccacagcagcatagcagcgcagtgcaagcagcagcagaagagcgagcagagcagcagcagcgctggtactgtagcaaaaataatcccacctcaccaattcaactcgagggagaccttttctccaacgaaagttggataaaattttagatactcgtggaacgcttttcaaactgctaaacggagaatttcgtgtgaaaactttctatataaaagttgttctagaatatcagattaatctattttttaagtttgtaataattaaaaatcaattaatcacacgttattaccacctcgttttacgtgaaacacttaatctttatattcatcttcatcttctggagattcaaacaccacctagataggagaagagcccccggtgagtgtaacagcatctccaacagcctctccaaatcgaactctccaaacacccataagccaactctccgtctgatttagctagtcaaactagatactcactccaacagactctctattaatcctctccaaaataaaatcggactcacatgtcaacatctatcccctcttcttcatctttctctcccccttcttctttctctttccttcttttcccccttccttccttcccgtcgaggcggtcgacgcatggtgcggtggtgcggcgacgcggggaggtgggaggcggcgacggcgacaacggtttaggggcgcagcagcggagctcggggaggggatggcgatggcggcggcggctcgcgacgacgacctcgacgacgaccctgacgacaacctcgacgatgacctcgtgaggagtacagttgctgcgggccaccgttggcgaggcgttttggctggccaaatctagccagccaaccagcgattttggccagctggatggctgccagtctgttggacctcctttttatggttgaatggccaaaatttggcttggagagtctgatggagtggttgttggagatgttctaactccgattctggaattttttattaaagtgaggacgaaaaagtagtgagttgtagtgttaggtgtggtcaaactggatgagatggatccaatactgtttttgggccttgggcgtcacaaaagccgtttaagtttttttttattaggtgtctctccttttatcccgtatatatacttttgtaagctacatggaaaacattttcattgttatttacctatgtttttaactaactccttgtcagggttatggataccacatacctattagtagttgactaaatctcggcaggactcaccacataccatgtcttatgcggaaacaaccttcggatatagtaggagttccacataaggaaggatgaatagagttctacatggaaacgacaaggactactcgggttgtatccatattggttttcctagttctacttggacaaggtgatacttatgggtataaatacaagaccccctaggagaagaggggatacggaacaacagaagccacaacatacaagccaacatatgccaagacaaaacgccggatatcgacttcagagataggcatggctagtcccctacggtacctacggataccgtcaggagagatatagcgatgtctcttatctcgccgaatgcggattcgaagaggaaagctaccctgttgtcgactacgagtcaaaccttcagaccgtcatgtcgataacagttagataggctaccccaaatattgtaatggtgtgattatgatgaataagagcaacgaccggcttcggccaacgggatgtagggttattacctgacaattcagaggcctgaacctgtataaaaatccctgtctccatctcttttacctcaatctcgtatataccctggtaccaacgatccccatactatgcaaataccggaatcgcgacatcaaacgtcaacactcctcaatagtgatcatttccagtcgactctcatggtattttttgtaagtgttattcacataaatatttgtacctacatatctattatattattaaaatagttttgaaagaaggcacttcgtttcttgtggaggctaaaaaatcccacattaatcaaagaaaaagaaaataaaagtccaagtagacgtacaattaaaaaatatctgaaatactaaaaataagcaatattgaaagaagagtccatataagaacccaatacaagataattaaaattcggaattaaaaataaaataaattctgaaattagaaaaaataaaaagagttcatgtaggaatataatttagaaataactgaaatttggaactaaaaataactaatatctgataagagtccttatacaactgaatacgagataattaagttcggaataaaaaaaactaaatttcaaaaatagaaaaatgattataaaagtttaagtaggaatacaatttataaatataaaatattataataaaaatatggaattttcaaaaaaaaaaagataacctagaactcaacgatgacaaataacaataaagagagagaggacaagtaataggccctaaaatagtaaggtggtgaacagttgatgggacatctaaaaattataaacaagaccacaaatagaaccccagcaacaattaagaggtggaataacagacaggacgctaagcagcatagccacgacggttggcgtgacttttacaatgtaaaaaatgaattgcaataacaatcatgttttattttaaaaatcttcaatgataataaatgggcaggtcatataggagtatagtggtggagccgacagcggttggcgaggcttctagaaattaaaaaaataaacccttaaaatttgaaataaaaaaattgacaatgggaaaataattctatgagttcacaaataaaaaaatcggaatgaaaaatatggaattttcaaaaaaatagtccatctgaaactcaacgatgatatataatagtaaagatgagagaaacattaggcctgtaaagcagtaagttggtagcaattcatgcgacatctaaaagctataaacaataccataaatagaatcccaataatgattaagaggaggggcgatagacaagccgttaagcagcacaatcacgacggttggagggacttctagaaactaaaaggtaaatcgcaatgacaatcatgttcgatttttaaaatctcaatgataacaaaaatacatgagcatagtggcgaagtcggcggcacggtggttgggcggatttctagaaagtaaaagatgaacctcaacgatagttatgtccaatttttaaaatcccaacaacaataaatatggaagacaataggtggatcatagagaaatacaatattgatgtttgacaacactcctaaaaattaaaataatggaacctgatgagacaatggactctaaaaacttggactctagaaactaggaggtgcaatttttaaaggtttaaaggaagataaataaaagcagtgatagatcgtacaaataaaagggtgataaaagagtaatgggtaatgactggtgtgacttttaaataaaaactataaaaatttaaggatgataaggttcgatctttgaaggttataagacaacgcaatggcaatttaacaaattttaagtaacgtcaaatataaaaaaaatagataaatttatatggatgctagcctcgcaatttcgcaggtctcccagctagttttcgtaacatgagtaagggttagtcacccgtcccgaagaatggatctgcacaatcgctcaaaaaacagcgggaggccacgccgcaagcccgaacaagagctttacaaaagtcggatagaccaccagtgaggccaagaaagagccgaagggtccgttaagaagtaagaacgttgcttatcaacttcacctgaacaacgacattatatgggatatcaaacacacagcccatagatagaaccgtacctaagcaagatggctagactctagagaaccaaacactagaagacccatatagctaacgttgaactaattatttagcttaacaatccatgttcaccgaatacttcagaaccaaattgtgtagtcgatcgtgtgcccatgcatcgatcgaagcacaaacagatgaatttccatttatattttctagcccggtccacatatgtatattcgatcagcagcaagcccacaaaaacaggtggcctggatgatagcaacgagaacaaacaaatgtgccagcaataatgtgtcttacatttgccctcggtcaagtaattcaccgatccacagctagcggggaaaaagttcttaactcgagtaatagaggagatcagtctatattcgggaaacaggtcgaactcgatccattgttttattgagagttaatatttcccgatctggtgtgcttcttacttttccgacgaaacctgcaattaattaatcaaagtacatcagaaatagccattcactgctgtttaatgcacgtcataattaaaaatcttccaatctagctagctagtgttctagaacacagttcaaattatgaataatggatcatctgaaggctaagggaataagtatatatgtacaaacccttcacaacagttagctgattaatcaattaccagctggtagtagacttgtacgaacttatgaagggccatgctcaggtgggaaagttccaccaccctacatatatggaaacaaagaaaaagaaaacactcatttgagatatctctttgagtttatctccatttccatggcactgtgttgaaatgcaaaataggcgcgaaacatgaatgaactaacacatctataattatcagtgggataatgaaacaatagtacgtactcctatatgggaagcaaaggtgacagaactgagataaattatatgaactaacacacacatgtttaatactagtattacattaattacattattactccttggtgtgatgagagacagtacaatgtggatctagcagatttgtacatagcagatacatttgcatgccacatgtggaaaggtagctaatttgtggagtagtactagtaaattagactgagatgcaaaatcgtaccgcttggaagtgaatgagcgtagtggtgatgcttgccagcggctgctgccgtatcgaacgcaagcaggcaatctttgcacttgacggtggccttagaatgatgtctagacatgtgtctcccgaactgtaacagtttagtggatcagaattcagagattcaaattaaatcatctatcaatcgatcaactgtagtagtagtagtaagttatgcagctgctggaaattaagacaattatattgcacatgtacacatgctctgcatttctgtaccttgtgctttggaatgtagcgtgggtcatcgcactgcgaggcctccatgcagatcaaacacgacaggaaatcatctggacagaatagcatagctatcccgtatcggcggtagaagagcacctcctcgtccgtctcggggtgtaactgcctcacaagcgctaacgcctcgaggaatctaccagtcgcgtcaccgctgatccttcgcctttgttggttttttttcccatttctggtggcgttgcaggctgcatgcagtttcagagagcacggcgtcaatacgattattgcccggtgaaacattacacgatgatgccccatattgccacgcgatcgcaatcgatggtgctcgtctcgagcggttggatcggaggaatgtctcggctggcccgtcgagaagagatcggagaaaggaggtcgagggtttaatttggaagagacctcgtcggtggaagggcttcggtgcggatgctgtggtcggagtcggaggtgtgtcgtcgtcggtgcagtcgaacgcgatgacgaagtacggcggtgggcggtggcgttcggaaactgcagcgacggccggcgtcagcaagtcaatcgcgcgcgatggcgctagggctaggcgctagctagctccgaaccggagagggaagctgggttttggactaattttggtcagaaaacgaacgggatagagagacggcactgccagtactggtttggtttactcccgccggtggacaaatcgccgccggagaagttgacgacggcgaggaatcgatcgaaacggggagaaaacggcaagggaggagatgatgcgggagaaatggttagaaaattgggggagaaaggcggagatcagaatgagttaataccttcccttcgtgtgctcggtgcggtggacggcgcggaggaggtggcgtggggcacggtgcggtcccggagctcgcagccggaggggtcgacgacggcgacggcggcggcttcaaccctcggaaactgcagcgtgagaaattacggcgtcagagagtacaacgatgctacgcgccatggcgctccagtctagaaaattccagaaaactccagaccagttagctagggtttggatcgcgagtggatgagatggggagaacgaggagcgcggatgcaggaacaggatgctaagttgctaaccttaagctgcgtgctcgtcgagatgcggagatggacgaaggcggtggctcgtcgaggtggacgaacgcggcgtggtggtgggtgcactcgccggagcccgcggccggagaggtagaagacgacggcgcgcgcggcggccgcgctctctctctctctccgtcgcagcaaaggagctcgcctcggctccgcgagatcggggggtcctggtctttatagccgagacagaaggcaaaagcttttttttctccctttttttctttgttttttttaaacatttcttatttccttattacttcctctcgaagaatggaagacttcgcacgaaatacaagcccaacacaacacggcccatctcctctgtcgccatcgcactgagataaactctctcttccgtagcccaagcagtggacagttactgagtgagtttagcatttgcttgtcagcaaatggaattactggtacacaatgcccataacaaaagctacacaattactggtacaacaacaattactggcacacaacagctaccaattactggtagtccgtaaactactacagtataccagcatctcaaccagataaacatcgcacagcgacgacgtagtacatatcagatgatgaattatccaaacaatatgagcattgttacatatctgacaagccaatgcatgtgccaggtgcatatgcaaaattgtcacttatacaagcattaatcatttcaacgaatcattgttgacttttaccaatagaaaccctatatactgttgtccaaatctcagtcccagatgttctcaacatgatcaagggattcctattacacctcatcaaaagagaagatcaatggagaactgtttcttcatgaacatgagaccaaggaaaaaaatttacaaaaaatagaaggcaacatagaaggaatgtactatctgtctggaaagaacccaacttctttactcaagagaatgttccccaagctccatcttccttgctgattgaagacgaaaacaaaaatatgctgcctgagcacagctaaataatgaacaattgtacagaaatatgcatatatgagatgttcttacagggatttccactaaaaaagtacacatggcacaaaacaacattctccaagtattgaattgcattttttgactggtcttcatcaaatccttaaacaaggcattatgtgcaatcaataatctggatgaatatcattctgatgcatttcagaatacagccttatagaccctggcaccctgcccagttaccttctttacagttctcatctatcagcaaagtgtgagtgtatttgtttggcaccaatccccttgcatcaaagtgtacagttgagaagaattagtgctcatgcaaaatgataaggattttacatggaaaaaagaggggaaagaacgccaggtctaaaattttatgtgcatggaacattatggcaaggaattaagtcaggtagagaacctggaagcagaggtgttgcgtggcaatggcaacagtccgtctcctcaccgaccagaatttcatcacagcttcatctccatatccaaagtgggtgattctgaatttccatcaacaacaaggacgttcgaagcaacaacttacatctgccgagtagaaacagggatttgactcaacataaaccatgtcgaggtaacagtttatgtagcttacagccggagatcacgggctcaagaaaagatctcgaataaataaagaaggaaagaaagtggcatgaaggggtccatataatgatgggaacagactgccaacagaataaagaacatccaacattgcaggatttcccctccacaggacctgtaagacagcttcttcacaattggcaccccttgcctgaaagcaagccaggatcagggagaaatggttccaaggattggcctgctggttgtgctggttggattggccttccaggcaattctccatccaccacctcaaaaattgtgtggctcaccaggtggacctcctgtgacatctcccaggatcaagctcagtgatagaaggcacgcctacaaagagggtggagttcaaaaagacaaggccaagtagataatcgcagtgcatgcatttgatgaaaccaaggacttacccttgcctgtttctaaggtaaaggcaaacaacaaatacagtaagattggaaattcctctttttgtgtggatcaaatctacatagaattgcaacattgattttttttctttagttcacacttttcttaacacattactttgtctgtcaaaattcaggaacttgtggatgaactgggaatttaccttcttgctttcgacagagcagggtatggggaaaattatccaaatcccaagaggaatgtaaggagtgaggcattggatattgaggagctcactgaccagctcaagcttggacagaagttctgtgttgggaatgtcgatgggaggatacccaatttggggtgccttcagtatataccaaacaggtaaagaccgaaactgcaatactgtaccatcaatggtatatgtgacccttcactctccagaaatgtaaagatacaactactgtgtgcaggcttgcaggagcagcgttagttctgcccattatcaactactggtggccttcttcccccgctgagctatccaggcaagccttcatgggtctcatcatgccagagcagaggacactctggattgcacacaacataaacttccttgctctacctctggatgacccagaagtggctcccttcttctgcggcagccatgcatcatcctgcaatatttagcaagcatgatatggaggtccttcagcacatgatagcgatgcctgtcattgaggtaaatcagagattatttcacccacatgaagtgctatttaatagaacattagaactacagataaacaaatgcatcggccacatccttcaaagcttgcttgatttatactactgtggtcaagagaatgataactttacattaaaaaatagtaagagaaaagctttcaaaattaatatttatatcaaaaccaacctaaagaaaaatgtcccaaaccataaatactacttgttcaggatggcatatcatcgctttctcttcatttttcagaataaatcaacgcagcaaggcaaggatatggaaattgggaggttgatccaatgaatattaccattcaccaatccatttcctcaaaatgagggttatgtacacatctggcaaggatacaaagatagttggtgctggttgagctgcaacggtaatttcaaagaagctttccttggatccattatcatgaagtcccagaaggaggacacatgttcatgctggcagatggatggactgacaaaatactcagggcattcttggttggagaataactctcggagctgtgagcctgtggctctcactgaagatgctatattgctatgtagtccttttttccaagtttatttccgataatatcaaatttggccccattcaatagatgacagaccatactgtcacattaagctatttgttaacagtgaattgggtaatgacaattgaaaacacgaagccttggtgcgtctctagcttcactttggttgtttatgagctgtcacaatgcctgcttcagctttcaagtacagaaggcaggtaaagaaataatgctaagataaatttaagtaggtcaatgggtattttaaaaaagaataatcaaatgcaatacaatcctataaaacagtacctgaatggtactaacatagtaataaaactcatggaaaccacttgtttcttgaaatgagtaagagtttgggcgactgcagaaatatagtacctgttaagattttttttcctctgtctggtaaaatcaagtttcatatattccaaatttgtgacagactgggcattcctgtcattcctgatacacctaacagaattagtccatagtattttcaagtgtagtaataaaatgttttcaataccagtgaccagactaccagacagcatgagccatatgacttaaatcagtccaagaaaatagttcatgatgagagtgaatacatttataagacaacaaaaatgcaatcatcacaaaaagatcagtctagattctaacaaatcaatgaaataatgaagacctcatagacaatagaatccacaaatgtaacacttagttgctttctttatataacacagctaaaagcatattcggaaacggaatgacggtttaactacttcagagtgcacttctggaaagagcgaaaaccaaatcgaagaaaggcaggtgtctacaacctgaccatattgcattaatcaacagagtagaatgtactaggcaatactaaagtaatcacattagtaaacataatactaagcattacttgatctaggttctggcatcatgaatgtcatcaactcactcgcatacaatgttacatctttttcactgctattaggtataccactacccacaaagtacataaatttgcaaaagatcaagaatgaatgtcagaatgaagtcactactttgaaatttgaatgttgcatatggtaataccaacattctgcaacaagttatggtccattttgtcaaaatgatacaacttacaaccttcaaaattaagaaatgaaaccaagataatgtatctgtttacaatatacggttaaaatgtcaagtagacaacagttacacaatcacaaatccttaaaagtactgtaactcaaccagataaacttttggcattggagaatcaaacacctgagtacctgatccacaagaactgattaaaatgcaatagagaatagaattcagagatgcatggattgatcatgttgtatacatgtgttttggatggatctgatcggatacaaaagtacaaatgagaaattcctgagagcaaaataaaatatactccctccattttttaatagatgacgccgttgactttttctcatatgtttgaccattcgtcttattcaaaaattttatgcaaatgtataagatataaatcacacttaaagtactatgagtgataaaacaactcataacaaaataaattataattacgtaaattttttgaataagacgaatggtcaaacatgtgagaaaaaatcaacggtgtcatctattaaaaaacggaggtagtatttatcagtagcacttcagaataaacagaagagaagaaaaatgcatgagcagatgcttcagatatcaggatttcaagtacagcggattaacttccaaaccaaacggcttacctaggtttacagacacaattactattatgacttcttggaatgtttcaagcggcaataattcaatggaatctgaccactagtgaatgaaaaacatactgcagatttgtactacacaaccaacctctagcaagctgtgcaatgatttgagaacacagattaagtggaatagtaaacacttgtgtgtgtcagcaaattaaagggcctctctgctgttgtagtctcataagcagaccatgtcttgctcatctccttatcagtagacatagaattttcacccaagatagtttaacattaaaaatcaataaaatgtatccaaacaatatgagcattgttatatctgagaggccaatgcatatgccagatgcctatggcaaaattgtcagtgttacaaggattattcattattcatttcacaaaatcattgttggcttttaccaataggaaccctatatactattttcgaaatctcggtcccaaatgttcactaccattcaactttttttttttgagatagtaggtatatgggagacatagtcaagagatttctattacacctcatcaaaagagaagaacagtggagaacatctgtatctccatgaagcatgaacatgtgaataaggaaaaaaattgacaaaatttatccaacatagaaggaaatgtttgtatcaactatctatctggaaagcacccaacttcttttctcagagaatgttccccaagctccatcttccttgctctgattgaagacaaaaacaaaaatatgctgactgagcagagctagataatgaacaattgttgcaaagaaatatgcatttatgggatgtccttacagggatttccaccaaacaagttcacacggtacatctttcttaaggacctgtctatgcacccaaaacaacattctccatgtactgaattgcatgttttgactggccttcatcaaatcccttaaacaaggcattatgtgtgcagtgatctggatggataccatgctgatgcatttcagaatacagccttatagcctcttcccagttaccttctttacagttcccatcaatcagcaaagtgtacgtgtatttgtttggcgacaatcctctttccagcatctcatgaaaatgctgataagctaagttagttctccccatcctgcaaagtgcatgtatgagcacattatatgttacttcattaggtcgcactccttcctccagcatcttttgaaaccaaccatatgctgagtaaagatttcctcttctacagtatgcatgaatgaaaacagtataggtcacagccgaaggtggcaacccacttacaagcattccatcaaaaatatcccttgcttctctcagacgccccctttcacaatgtgcgtgaatcaagcatgtgtacgtgatgcagtcaggctgtaaaccgtcactgaccatcttcatccacaacacataggcatctttcaagttaccagatttgcacaatccatcaaggaaaatattgtatgttactgtatcagaagaaattcctcttgaaatcatcacctctgtcagctgaaatgcctcagaagtagaacctagaatcagctctgcagaaatccttgtattataggcaaagcaatctggctgcaaacctttgctcaacatttcatcaaagaactctcttaccatcgcaagattcctcaccttacgagacccattcatgagaatcgtgtatgtagaaacatcaggctgacagccctgctctaccatttcctgcttgaatctcctagcttcctctaaatcacctaatctacaataaccatctaaaagaatgttatatgtcaaaactgatggggctaaccccgcacgcttcaaatcaccaaataaccaaagtgcctccttcaaattccctgccttacaatacccatttattaaagaattgtatgtaatcaaatctggaagtaatcccattgctctcatttccacaaacttcatccgagctgcctccacattaccacttctaaacattccatgaataattgtgttatatgtcaccaccgtgggtacaatgccctcattctccatctccaactgcaatgctccagccttttcaacagaaccccttgcaaaatacccagtaataagtggattaaacgtgaaagctgacgccttcttggacatccgcattctgtcaaccagctgagctgccttctccagctcacctttcctggccaacccattaatcaccacattgtatgtgacatcactcggcaagcatccaccaggccgggcctccatctctctgagcaacttggcagcctgatccaccctaccctccctgaagaaagaatccaacaacgtgttgtatgtgacaatgctcggctcgattccaagctgaagcatctctgcatacaccgagcgcatgtcatcccacctggcttcatcacgcagcgcacggagcacgaggttgcattccttgatgaaagggggaactccgtggtgcgccatctcacggaaagcggcaaggcatagcgtcgaacaggtggagggcgcagggttgcgagctcgggtattgaacttggtggacaggcgcaggaggaggttgaggaggtagtggagggagacggtggtaggaaaggagaggaggagggagacaagggggaggagaaggccgaggtggatggcgcggacggagacggggtgggcggcgtggaggtgcttggcctcggcgagcgggacgaggacggcggcgtacgcggaggcgcagcgcgggaagccgcgcggggtggcctccgcccaccggaacagctggcgcgcgaggcccgggaggccgcggagcgcggcgtggacgtcgccagcggcgagcacctctcggagcgcctcgggtggtgggggatcagacgcgagcagcgacgcgaacgggctctcctctgtccgaggcgggggaatcagcgccgtcgacgacgacgacgacgacgaggagacgaagcggaggccggagatggcggcggcggcggcggatgcggcaggagcttgggatttgcaggggtggatggagaagagcatgggttaatgttcgagtcctccccggcggcgcctcgccatgaatggctgcggcggcgggcggaggcggcgccggcggcggggaggaggaggggagaggagggagttcgatgcggtttgtaagatggtcgcgtggccttctccttcgcacacgacttaacccagaaaattttcttgtaataattcacttctctttgggcttttctgtaaatggcgcaaacgcacgttactctttagctgctccctttgtaatacttggttctttttcactttgtttttacttcaatcatctgtttttttaatggagttttatggctatatttaggatgcaggactttaggaaactttacgaacttgtatttctctttttttagggaaataggacaagtggccaaagttgaagaataaacacttcgtttcaaaatataaagaattttgttagtacaagcttaaaatctcttttatattgcttatatattgggatggttgtagaagtactctagggtcaagtagctagtttttttttttcgtagatacgttagcgttggtagacgaatggataggatagtatcccagtggatgtattgtaagctcaagttgtgtttattgattggaagttgctaagataccttgaactacaataatatgcgggcacattacacgctgaactgtactccaaaatcgatatagacatcaggatttgagccgtagtttccagctttcaatcgcaatctggcatggaccaagactaaaaccacgaacccacaaagccatgtaatgtatgcatatccttgtgatttcgacaggttcaagcgaattataggaaattacagacagcatccatcaggtgatggcctcccagtcccaatgtgattcctctactactgtaggaaccaatggtgatgataacgggccatattgagctgaatctcccggatctggcccgattttaaatgcatcctacgtaaagcataatatacggatgcattttgaggacaaatgtaccacgttttttgttcactacaaccgaaaaatcagcacaatgggcttgcagaaaggaactcaaagcccgggttttcataagaatcagtagctgtcttcatctgtctcgggcctccggagataataacgcaagcaattcacgagcacctatatgatggcatgttaagagatatataagtatgatgttgctgagatgaccaaagattttaacagaaagtagtaatcaaggcattgcaatacctgagataatgagctgttcaattttgcacctctgtaactcacatggaatttgtcctttgcaaccaagccctgaataaaacatcacatatgaagtaaggaagggagttgacagaacaaggggatttcataacaaagaaataggaacatggcatacttcagtatctatctcagctgattccacatcaacgttcacgtcagtgatgatcttcactatttccagaagtagaccaggccgatcagctgtctctatgtacagcatgctgcacatgtttaactaatatcaatgaggaagacggatgatgaacatcatatggagcaaacagagaagtaaggcacatgttatatcagatgtgatattgagaaacaatacatgcattactaataatatgtagacatgtatcaagcatgaactattaaatgatgtgcatagaaattcaatgatttacagactcaaattaccatgaaaaaaattatacctgtataaaactagggagggttggggtcacagtgttatataatgcaaaacttcaaacatcttataatagattcaatgtctttgcacaaatcttggtggactttggattgataggataggcatgaacatacatgtatatgtagttgtgtttctcaagttacttctaccggttgcattcgtaaagtatgctatcaggtccttgttttgtggagaaatcagtaacgataatatgaatcaagagtccttgtgtgcctttttttcctctaacacataggagagctgcgcatcattctattaagaagagagggagtctaggaagactcgtacaagcccttaaggaccagggttaaacacaacaaacaaaaactagaagaaaatgtgtgcctatttttaaggtaactatctagccgtgcacttgtaatgccccataagtgttcaattatacaatctgtggacatgtcacatcccactcctaagcaaggcatactgaaataaggaatcacgctaaaattgtatataatcattatggcttagttggatcaaaccttcttttaggtccatcatcttcaacaattacatgtgttacaacatcaacatcaacctgagagtttaaagaacaaataaatcacgttcatgctaaagttaatggaatacaaaattaacagcataacaaaacactcaggaacctaacttttttactgtgttaaaattgaggaaaacacacaactttaaaattgagaagatgcttgataacagagcatgggtggtgaacaagcagaatgagaacatccaatgaactcaccttcttctcaggagcttttattccaaaaaattcacccatggctaaattctcacttgattcctacatgcatatcaaccagacaaatgagttagtttgatactttgattcataaaaacaagaacggatccaaaattactaacggtagaagttctaaacacaagtaaaaggatgtgacgctcggaacatacaggatgatactgcagaaggttgttaataactgttagccgtatcttttccaatgtgtcagggtcctcaactttgcgccccctagatacagacagaagagggggaaaaagataatattagacatgaaattatccaaatcaccaaaacaatataagaagcatgatagttgctaaatgttttaatctcgtattgtgtttagtgcacatgtaaactattagtatggtactttgataaatatgtggattcaatgagaaaatacaccctctacttcaaatataaactaaacagcatgacaaaatgcagcacacagaaagtggcgtgcacccacgatcgcatgatgtggaactttgtttgtgtgacagctgattcagttgacacacttcctttcgtcacatcaaggcccaggtccttgagtgccttcatctgcaaacagtgaataccaggacaaaataatttactgatacaacaaaaattactaattacgaaatatatcttaaacaagatcagatcaaatagagcacccatagcataggaaaattataccgtgtcaagtagtgcccccagacggtctccaaaactcagctgcactatggttgcatcacggtctgagtcttgatctatcagaacaactggctgtggaattgcatcatcagatgtctgcaatatttttggggggagaaaaggtacatggtagaaaaatatcattagctaaatatgttctaaaatattttaatggtagtaagcaattaaaaatagcatacacgaagcaaaaaaaaagtaatgtcaaaacaaaaaaaataataatcggactaaatggaaacaatataagttctcatgcagatattgaaatgtgaagcaactcttcccgcggaccatgtctacaactgaactgacttcacacatgtcctcagatgaataattgcactgtggacctaatttgcaggctgggttgttactccagatctccactgtttaggaagacaactctatccttcatcacttgatttttttttaagtggaacaacaaagctgaaggacgtgtcgctgtgaaatgtgtgtttccatatggtgacatgaatggaaaatcaatatgtacataccgttgaagaagcacccaagacatcagccgagttgatagattggcaaaaaatcctacagtgatggcattgagaaaaatgatttagaggagggaatgagcttagttcaggacactgatgtactacaaataaccgcagaattaaatagcaacactagaaatagaatcacgttatgcatttcaaagttagcactcagccactcagtagccattggactgacatacatgaacaaaagtaacaaagggaaaataaggattgcacagttgactgcaactaagtactgattctgtccctttactgatgcaccagcattcaacagaaaatccttagatggctcctaattataaagcacacagatttctttaaaacgatcatatagtgtttacagacggacacgttgaatagaaaatatagttttagaaagctttatgccacaattccagtgctaaagcccacagaatccaacacatgtaacaataggccttcacgagttagtaaatgaaaagcccatcgtgtagcaaatcggtcttctcatgttgtttattcatttatgacttgtgagaaatgagaatcaaagtgtaggtagagttgtaacttgtgtcaatatggccttgaaacaaatccgcacaccgtggcacgagctctctatgtaaagtttctttcgagtgaactaaggatttgaagcatgaaagtaatttttttttcttgttcattccattcattttccaactcctattagtactccaatcaactgatagagaccttctccaacattcatgttcacctaaacatgaacctcactaccttagtgaaactgagactaacatggatatttccacaccgggtgaaactgcacctaagtaacgcaagatatacaagtgagataataataaaacgattgcatctcaagatactagaatttaggataatcgttcttgccagctgacaattacaacgttttaggcaaaaaaaaaacgtaaatagtgtaatccgtgtacaaacaaccgcaggacaatatctgtactaggtaaggaatctatcaagatactattagtacaaccgcgatttctccaagccaatccaaaacaatatcaactaattcagtctaccgacacgacactccaatagtccaatcctaccgcacatctcccgacacggcgaaccacccctccctcgtcatcgattcgaatcaaacagccagacgcaacgcggagatgcctagatcgctcacctcggggccgcggtggcggccaggccgacggatcgggggaagtcgtggaggcggaggaaccccggcgacacgcgagccgagtagtacggcgacacggcggcgggcgcgacgaggtggtgggcggcggcggcggcggcgagagccatggctggttggtggtgacactcgctgcgcgcactgcggcgaggcgaggtgaggtgaggcggtttctctctgtgtgtgtcttttctgtcgcttgctctggtcggggcggttgggcgaggaagtggatcttttttgcttatttttatttttttaatctgccacttggctgcattattggattggatgtgccctttttcttttcttttttcatttttttcccctgctgttgtgttgttcgtcagctaggattttttggacagtggttgttgcagttgtcaaaattttcattgaaatagttttattttaattattggttgccttgtctggcatgagagtatgaagtgtctcttttttttctctctctttctaggtgacgccagatgagggtgatgattcattcactcattcgttgattcccaagagttgcaaacgaaattggcatgcttactgccagtaataaagttgaagacgtgtcgatgaaacggaagtggctcgttctctgtttgtttaggaagatgggccgggctgaatcacacgttagttggaggcccgtcggggcatgtagtccatgtactccctcctactcagaactactcagaataagtttatttgctccttccgtttatctcaaaataagtttacttttaaaaaagtattacatcctagcttataaaagaaaagaataaatgcatttcttatgtatttactgaagtttggtaaaaaaactaaatgtatgtaaatatttggtaactttataaaaaaaagtatggtttaaaatgacatcaatccgaacagcccatgaattttaaggaactgtctatgtaacatccagctgaaatttttttgtcttttcagctggatttctagccgtcggatagacctcttgccagcatcccaacctcgccttgcgctccctgcctgcgcggccgcgcctcgagcgcttctcatttttatgtcttgttggattgggtacgggcttcaagcacgtctgtgttttgtctattataaaaggtccaacaaacaaacgggcttgaaaaacactggcccaatcactgtccacgtaacagaacatatcaggctttgcaacgaaagctctgtttaatagctaacattctctgaacatacgtcgggctatgaaaaacatgtaatctactgtgttcaaattttggttctctgaaccaaaacccttgaaaagaaagcaaagcactagagccacctaattactagtgcctaactagattgaccattatctccactggaagatcagccagaaaacatcacaagattgactttatctgttagcttcctagtcatccatagcgcaatattagaccctgcaaaaatttgtacattttacttagttacttcgtaccaagatgcagatatttctattccaatctgtgacagaaggaaaatcttgtacatcttcatgttgaattttgtagtcccaaaattcagaatgagtattagcttagaaaattatggatagaattttaccccaaaatcaaaatgagtactcattttaccccaacatgagtactagattgaatcattcctgcactttaagaaattcaacagtaattataccccaaaaaaaaagcatttgtggcatatactagcaccataaaaggagaacattaattaaggatggagaagtggatagcaggatgtcatcgaacagatgtaaactgtggaaaagaagttctcataacaaatactcatttctcaatatcaaaaccacactgtccaaacagcacagatcaggtaactaaagatgcaaaccgtggggtttaccgtggctgcctcactgataaccgttttgggatgccatgaccgacacactaacaaccgctggagaggtataggccatttcacccagcgccaataggatacacaatacaatggatgccttgctgacctccgaggaagacgttgtagccatctcgccaaccttgtctcgcgaacaaaaacacggcgcatatccttggccacgggctccgtcgtgacccggcggaacggacgccgacatcatcgcggatgctgctgccgcttcgccgcctcctcccccatcgacgacttctctctctcgctgacaacttgtcgggttgctctctctttcatcccgtgcgtggaggagagaccggcgaggtgggcgcgtgtgtggctgaagagaggacacgacgacgcaacggggtcgcatctccctgatttgggctggccttgtgcacgaatcttgaacaaaaaatcaatggccacaaattcagctgacaaagacaaataaatcagcaggcagccagttatcaattcccttctgggagtactaaaaaaattagtgacaaataaaaaaatatatacggtgaatggccaagatgcctttcttcctcctccatcgattcctcccttggcaaatgaatggcacaccactcttcacgcacctctgctcccctctgttggtttccatcagaaagaaggaaacaagtttctctgcgtctccgatctgcagtgcgagccacgaaggttggcgtcgtctcctcctccctctcctcctcgcgcgcggctgccgtcgagaagacgctcggcctcccttgtgcggcctcacctcctcgcgctgaatcccctactccccgtgttaggtccgctcctgcttgcctgatgctgcccgttgctggttcttgatccgtcatgtttgttacatgttccagttttatggatgggtttttttggttggctgattcgttgttggtgccttcaattaatcagtactactacattgtcatgccctggtagtgatgcgaaatggcattttttttctgttttcaattttgcgtaataacatgattgatgctagctagaacattttatctaggggtgaaaacggagcggatattacccgatccactctgtatccgtccgaaataaagatatgataagggtttttagatatccggcggatgcggattttaacatgtggatgcggagccgtatgtgatatcaacaatatccgacagatgtggattatccaatattttaatcggattatttggcggataatccgcatttctcatgccatagcccattttatatgggcagcccatgtagcccatctaccgttaacctaatccaatccccaacatgcctgacggcgcgtcgtcttcctaggtgcgccaccacttctcctcctagcgcgccgctgcagcctgctgcttctagcgccgccgccgcatccaaccaaaagcagcctttctactatttctagcaccgcctctgcccttgccgacgccgtcgcctgccgtcccccattccccgcgtcagcgcctcctccagtggagtccccgtccaccgttggcccgtcgcggagtcgccagcgcccagcgcctccaccgtcaggtactattgttttcttgtgatgatgaataatgactgaatgagaagtgaagtctggatccttgcatgttggcgtgtgcagtgtgttgtatggaactagttcatattagttcgtatttgcaacttactaaattgcaagagtaatggtagtactgtatggaacggaactttgttaatgtactgaagacttatatttttaagcaacgccgcaatgaactgaagacttgtattatgtatttgctggatgtattttggattattcaagctcttaagcacttgacaatctgctgtatgtgttatattatcaattatgcaagctgcactttactagttaagcaaaattatattattgatgtgttttgcctggtttttcctagagagctgagatcataaatcatgttcagatgttttgtcatcgtattgctgccctcttgttgtatggattgaatacaaacttaatatccgacaattttattccattttcgaaccgagtccgcaccaactccgtaccgaatccgacgtccgaaataatctgcatccgcacgtcatccgcacccgcttcgcatccactttaaaaatatggattaggatatggtatagaaactatccgtccgaatccgctccgtttccacccctaattttatatgttcttgtctttttaagcattggcacttgcctcattgcctgcattggtcaagcttacaccacttatgtaactgttaattgatgctcgctgctaaattggttgtgaattttgctttataatccatatcaactgttacgaattttcctaaactatccatgtctgaattagatgtaattcaggagtccgtacatgccaaaagtaccttttgtttttcgcccttatgttgcaagaatctgctgatgcaaatcttgatacagatttgaccttcataatccaaaagaagaggttttagttcaagcgaacgataatggggatatccaaggtgattggcatcgctggaacaactcttctagtcacgtctgttggtctgtggaagatcggcttaagaattgtcgcggttccttttctagcaaccagtactattgcctatatcatcgctgttgcatcccacaattccatcaacataccttggatcttgggaaagaattcaaaggggaggtttccaatttggtcaagtgtactttttggtcctttcttgatacttgcccgggtatatgcaactgtgaagagacatatgaggaagaaggaggctgtgtataacatgatcactgaaggtgtttatctgggaggatggccgtttatgttgaagcatttgcccccaggagacccgtctgttattgattgcacttgcgagttgccaagaagtgattttgtcccaacaaatgagtatctttgtgttcctacttgggatacaagagccccgacgatatcccaaattgaatttgcggcatgctgggcatgtgaaaagagagccaaaggaaaaccagtttatgtacattgtgcatttggttagtaacgacctatctctcttcatatattccaccttttttaaacgttgacacaaggactgtagttctataatctagttttgtacataattgcagctgctaattacttttgaatattgtgtgtgcacgcttatgttttgtgcatgactgcatcaggtcatggaagaagcgcttgtgtcgtgtgtgcagttctagtagcattgggcattgctgaaaactggaaggatgcagaaaacatcatccgagaaaaaagaaagataaaaatgaatgctgttcaccggaaaaccttagacgattggtcaaaatatagagcttctcagaagaaggataaataactgtgagtcgattgttctcagatgtacttctgtcatgttgaaagaatgctcaaaacacattaagagttgtattgtttaacatcttaacattcttaattagtaaaattgctgttttgacaatcaaacgcttatggcaatcgtttgttgaacatgaaatccaaccatcattaacttctttgatatgcttgctagtcatatgccttaaagccttttatgctaccaacttctgtaaaggtgtggtcttagacaactgctattagaaatttagaattttagcatgcttttaaaggttgctacttcatccccctctcctactagttcaactgttgcaacatactgattgcagcagaataaccaaaagtacttcagacccaacaacaatgtgtgcaatgtcagactttagatgagttgctagatctggaaaagacttcatttctaggtagtttggacctctctttttctgggcgtcagattcacttctattctattagatagcttttaaattcaatccaagatgttctggcactggaagtgtagattctgttccaacttttagctactcattaactttagaactgtaaaatcaacccttttatcaatcgaaggcactcttttcgaaatgaagggcttcacgggaaacataatttgccactaaatcacataaataagtagtatttcagcaacaaaatctagctaacccctttttgttgtcactgggcaggacattaaatcatttgacatctcaggcaaattaccatgtgagttctatgcaatctgggttctgagaaatcttcctagttctggagcttgcattgtttcccagctcatatcagtgtttcccacacgtgtcagattacttccaaaatttgttcccagttttgcttacttctgctcctatctgaaggttagtcttcaaagtccttgtaaatcagaaagctgaaaattggctttcagatggttgtgctgctatgcttagctctccacagttgccttcatctgccaccaatatcctacaggcaaataaggctccagctataaatatatgatggatgcgtccagataaatagcactacagctgctgtcctattattcttttagacttttatagaatttagttagttggctgaaagcctgaaatagttgaaacatgcatagaaagggacaaaatccatatctagcccttattttgtacaccttcacatcattgtattttatcataatcttttttaggataagggactaccactagtttattggtgtaatgaccttcaaaattatgataaaataaagtgcatgcagtatgcatgatgtgcaaaaaaaagtttgctagcttttgactacctccagtaggaggctggtccattccatgctgatttaatagggtgcattccttatatttttttgtctagtaaataatggttcagttatatgtacttcgaactttccaatcagagattaaaccttcaacaactacaggtaggaggcttatcataaaataaagaaaggaaaagaattaattgcaggtaggactagagcatggtgcttactctcggggacgagaagcccagagggagctgagggcacggaggcgattatggtactcgccaattgccaagaaacatcgagctgcctgcctaattgtcagaattctgtgcatctgatgaagagtctgttgcctcaagttatcagcctggaaatccaatttgacagttgcagttttagtacatgatgaaaggatctcactcttggcactagaaaattgaaaactagagcagatactggtagtaagtttgttttactatgccatactatagttaatcagataagctccaaagtccaaaataaggataatgtcacatgtttaggtgaccattcttttctttgtatgatgtagagataacatctctacatgttgatgccatagcatattactgtaggaaaatttgttccttttcactctttattaattaacatgttggcatgtcgcattattaaaaggataaaaatgactgtttttttgctcgactgtcaagtgattggattgctcatctagacatccacaaagttgagtcaaacagggagagaaggatcagaactggaaaaagggcaggcaacaaggacttcacctgtatgacaaagccttcaaggttggacagcttgcccagggcaagggccatgtaacccatgaagctcccaaggctggcttcgttgaccacggagccgccattggcgacggtctcagctagtgactgatgcagctgctccaggccctgggagagagcttcctctgcctgctgcgatgattgctgaaggctgcagatgccaaccacttgctgttcagtcagagggtctagctggggtgccactgtctgcatcaacatcaagagtttgtaatgaaattagaaaaaccatacttgtacttagaagatgaggtcagatttagcatggttaaaacttgatttggcaaattgttttgcacattgtgaactgtgaagtgagcttcatgtttgatgtcagattgtcaggtgcattttcttatgaaaactagcctagctttaacttatcatgttcagatgtgaggttatgactacataccatgagcatgtttaagcatgatatagtaaaagttttgctttatcatgaactgtgaagtatgctccatgtctgatgttactccagattttcaggtgcattttgtgacgaaaaaacttagctctttttatgatgaaagctttcttttattgtattgtttagaccacttattttaagctattcgttcaatttatttatcaaaatatttaatttatcctataattaaggagataatctgcagcagtaatcggctaaataatctgtttcaataattaaatagcttcgtgtccagaaaggggtttagaaatgaggaggatcatgtctaacttacttaaacttctaattactgacatgtgagcccgttgagtagaagatccacatgtcagtgactcatgtcagacaaaagtaagttagaggataggatctcgagtatgtatataccttgagcagatcggacggttggaaaccgcccatccagaggaagcagcgctcggcgggggtggcccacgtgccagtgatgaggtggaacacgtcggccttggcggcggctgccctcaggcggaagagctcgtcgtagtgggccagggcgtcgtcgacgatcgccctcaggtcgccgtccggcaggtgcgcgtgtagcccgccgtgcagctccgccatccgccgcccgccgtcctccagccaccgcccgtactcggcgtcgaacatcgccgctcctgccacgaccaaatggacagtaaagtaaaacatatatactgaattattactgatctgatgcaaatcctatatgacaatcaaactgaatttcacatttcagatcagtagataaaagctactaaacatgagagattgatcaagtgaaggcaatgcattacctgcgctggtgtttccacctggtgatcctcccagcaagaggccctgaaccaagaaattcagattttactgcattcatgatcctacctataatgtttagtaattagttcagaatgcagaaaaaaattactacctgggaacgagctctctcgagatcctgctccatctgagccagcctcaacttgctgctctcaagctgctggatgtaagcctgcaaattggtatttttgacagattatgctgtcagaaacttattgggaagaagaaattcagttctgaacaactcattttctttctatgcaggtactgaaattctcatggatctagctaggctcaccttctttcgcagccggctcttgcgtgctgcctctcggttctgggctaaccttctcattatctgattacaccaacactagagagtaagtaattgtctcaaactcatgtttcaaacagtctttaattagcttgcactgaatggttctgtacatacatataattgcatgagcacgcataatcatcatcatcatgctatctaattaagcatcaactgggagtatgagagagctaggagagtaggattaacctttggatcaagtgtctttgtcatcctgtggtcactgtgagtggaacttgctgccatcttctgcatgccatgtggacatgaacaagttattgttaattacaagatgcactttaattactacagttttgtgcagttagaaactatacaagataaatagaaaaatagtgatgatatacatgcttatgtgcctatggtgcaaataaaatatactagtatgatctttggatgcacgttacatcaaccagatataaaaaaacagcaatgtatatgggtggaagccacccactctaacaacagacaaaaatattgttctgcttttttgtttatgttgctgtcacgccctaatatgcaaagttctctttcagttaagcgtgagttagatataaacattgggtaataattgttcatccaatgtgatcttggcagttcatcaattggccagaaggaacctaaagcacccctgatggccaaattgccattgttcaggtatcagttggtgcaatttttttgggaccatactttgtgcaagctagagacaattaacatactataagaatgcatacttgtcgcctaatacagcacataagctagcatgcacaagtctaacatatcctttcctagacttatctgctcctcttcttttttccaaagaatgaaaaagatagaaatttgtagtggcaagtaaggctaaatgtcaaagaaaatgcatgggtaattactaaagtgatcatattctgcatctgattcttcagaaaaacgctggtcccttggatgaagcatcaggggaacaagttggaactttctaatgtagagccaaataatacacctaacttgttgggattggtgatcttgggagcagcaagatcttaaatgaccctgaactcttctagtactactccatgagcatcttgagttgtgggctagctactgacatgacaccagactagggaacaacgcattgcatctgcaccactgcatggctttattttcttctcgcgatgtaggtatatgcatgatcaggaatcaggagatccatgcagaagcaaagacaagatgaacacctccaagaacaagcgtttacaacaccaaaacgcatcaagaaactcaagaccaagaattacaccaaaacgcacatcaagaaactccagtgattgatgagaatgcaaaccttgtgctgcttctgctgctgctgtgggatctgatcaaactggctcgccatgtcggctgctgctgcaccctgatcgccgttgttcttgctgctgctctcggagtccgttgtgtctgccgttacatttgaacatccatcctacagaacacagctgtaactttgcctttgctttgcaaaaatgaaaaatgcagtagggatcatgctcaagtatttaccttcggtgttggaagagagctcctcctcataggccaggatgggaagatgtccagtgtagcaggaggcctagctgttgctgttgctgtagctgcagcagcagcagtggagaaggctgcaagaagatatcataggggaggaggagatcaagaaatgcatccaatcctgcaactgcaacatcagaaagctactaccagctgaagcactgcactgggatcacaaggggcaagtggggcccatgtggcagtgaaaggtggactggaatttattccctttgaggagctaggagtactgcacagactgtgtgctttgctttgctgccatggcagggagctagccagagctggtactatagtactttggagaattgttgcactctagagagagagagagagagagatggtgatgatgatgaggagagtcacaaggcagtcacaccactacacacaaggtgacaagaagcacaactgccactcctgctatctgtagctcttgctttgcattgcatgtggtttggctagctacaaagtttttgctgttctttttttttttccaaatggatttgcatggttgcttttgactacactgccctaacctcttgggaaagttggctcactaggttgtgtgcttttgttcttggtcagagaaagagagagagagatgatgttgtgagtacgtacgagtggtgtgtccatggtgagaggtggtggtggttgcagtttgttgagccctcctcctgagtgtggcaacctgatgaacaagagcttcttctagctctccaaaataggcagcgccacctcctcctcctcctccttgctcgctgtcagtgtcaggccaatgcaaattaagaagggaaattaaaacatgtaacatgagatcaacaacttgttgggaataaatttgttgaccagaatgatctgaagaaatattcatgaagaacagtaatgagaaagcaatatgaaaagaacaagctgagaagagtgctgattcagcaaccgatgcatatagcactcttcccctgaacgtgaaagagaagctcatggttcagaacttcagatcatgtttatgttgcacagtttgcacttcgcaatcaccagagagagagagagagagagagagagagagagagagatattgggagagaaggagacagaaagatgaaaacgagatgttgggagagaaggagagagaggatgatgatgaactgatcttacaagaggtttgcagaagccatggagttgggcaaggtggtgccatggaagccatagccaagaacatgatgaggattctgccctctcctagcctctcccatcctacgagccacaaaaccacagctcgatctcccagtatctccaagaatcagaacgaagcgctagctcaaatttcttcgatctacctccacaaagaacaacaaaaaagaacatcatgatcgctgctactgtacatgctagtatgctacacgccagatgatgtgaagaattcaagatgagagagtcaaagaaagaaacataccaagattgtggtctcttgtgataagcaagagccaagagctactatagcagaaaagtgaccggagtagctttagctagcaagaagtgcaagaagcaaagcttgaccggttcttggctctcagctggagtagctagctgttcttggctcttgctattgctgctcactcctatagctttagctctctcttgaatcttgatatggagtatctgaaagtgtagcagcttcaccttccggtctggggcatgctaatcacacagttgatggaaagatcttgtccttcctttctcctatgctggtttttttcttctttgaagagaggaaaggagagagaggtataggtcttgtctctacttgaaggtgttttgtcatggagtctgccacaggaatccctggctctacactcttatcatcttggaactgacttctctttctctctgtgtgactggtcccagatgcactgcagatgcaagtctaatttcttctggttcatgcatgtgtaaaccttattttgccccagataatgaatgggatgttgaatttgggttcaagttgtattgatcagtaccactattttttttcaattgttaatggctgttgacaaaacttgcaagttactatgcactggtgtaggaagtacatgatcctgtttgcaaagaaaaaatgattgagattaaccatgttgctactggattgttcaatattacaagctatgtatgttattcagacttcaacggtgcatgcatttcatctgattattccatactctcttcgattcaagattgactaatttacaccgacatatagtttattatatgcaaaaccatagctttcggatagcatttagaaatgttaaccattctgaccacacaataatcctacgttgataaacgcttctctcaccagtctcatgatttgtatgtacgatcttatctagttatagctctctagcaacttgattgcaactttgaataatctatttctcatttcaaatcgaagataaaataattgaactatcgaatcattaacatcaatagtaccgtacaagataaaactgaaaagaggaatagaaaaccaaacctttaaagaaatctttaggttctaaaaaaaataagtatagaactctctatattctccattattaatatatatcctgcatttaatttgcttggcaatattctcctctgttaatgcgtcaacatccgtgccttgtcaaaatatcacctagctaaacccatacctgaccaatcatatccatttcacaatacgaagatcggctaacttaatcaatttggaagttgattgtcacgtctaatatatcaatgacgctagtttaattgatttcctaatacgctcacctatatatatactttttaagtttttgttacgatatgtataattaagagcaactccaatagaatggccaagtaactacccaagctaaattttagcaaatatagggggaaaataccattcaacagtctctccatccggatggccaaatcgcacccctcattgaccaaacttggagagtctctctgcctggctattcgtgggctccacactcccctcccaccccatctctctctctgccctggctagagcaagaaggcggcaacgatgccgcttgtgaacggcgatggctaggaaccgcacaacggcgacggcacggaggagagatgcgccggagccagctgcgaccgccgccgtcgtccgcgtcgtcccatgcagcgactgtcgccgtcgtccacgccgtccctagtcgcgaccgccaccgccgtccgcgccatccctagccgcgaccgccgcccccgcgtggatttgaccgggcggcgtggattcgggggctgttgccatggtcgtcgtcgtcacgagccgccgccgctgccaccctttgctcaatcgccgttgcctcggggagtgctaagagaagaggaagagggagaaaaagaggaataaggggagaaagatgagaaagaatgggtatagagaggatggatggagaggctgttggagtaaagaacgaatttgacttgacaaataaaatggagagttgaccaaatagacatttagagagtcgaatttagagaaactattggagatgctctaagctagctttattaatagtacgtttcaataatgattacctctttaattggaccgaggctcctgtgattgatgtaccagctgtgactaccacagctgcatgcttatgcgtgtaagtgatgcactccctccgttccataatataaaggattttggtgggatgagacatatcctattactaatttgggcagagatacaacgaatatgattatagagtgtatttattgcactaggatgtgatgtattctagtaagcgaggttagtttttttgatggaggaattagctatcatgctgcctatgaattttaaattttgattttgagaataattttaggcaacgacagcggcagaggaaaacctaaaacttaaaatcaaatcctataatcgacgcagtgctaagtactccgtacacccttattcaaggttgactgcctactgttatttgactatttgttattaattgttactacaaattttgggtgaaaatatacaagaaagtagatatattttgttttcttgacaatgcatatgtatatattcaaattatacatcaccaactttatcacaatttattatcattactattgcatatttactacaattcacacatatatctagatctatcgtaatactctaccaattattttcatcatatcaaatttcatctaaaattacttctatatattttcgtagcaacacgcgtggtatcttcttgtatttttaatggtgagtaggagctagttgggatgagtgcaatgtccctttcattttgcacttggaggaaaaaatcaattaagtaaattaactacttcatgctccgcctagccgccaatcaaacagatttatttctcctcttcacccactatatttttcctaacaatgattggcacaataaaatgcgccaaaaacacatgacaagatcgagaacctactaatagctaggagtaagataactgaataattcattcttatttttcttttttgatctgctaattgacacacatcttatagctagtcatcaagtggcaacttcgggggcatgcctaataagacaaaaatagaaatagtagttgaactcctatataaactttggtttttatttatgagaaaattgattttggtggttagtgtctagctagcttctatggattgtataattagctgtggtcttatattagactagtggtttaattaattatggcacatgcatttggggctgaaaatttattgaacaggtagagtgcacgcatcatgcatgcatgcgcgtgacaaaatgattatgtcattcattctgctagctaagctagctggaaacctcaaacacatactcggtcagtcccaaatctcaatatacttattgttgtaggttatttaaatatagattaagatttgtttgaaaaagactataccgtttattattaaatgatgtatatatggtcgaaagtgagagggttgttaggggtagaatggcaggaggtgattgatttagtaaattatattttagagtaacaactattttaagataaattttaaatcttgaaagtgcatctaggcaactaattatgttggtgattaataacaatgtgattagagatgactaacaacttatttgagtatgagtgaatgaatgttagcatcggtgaaaaacgatgttaaaggcaaaacctctaggcctcaatgaccttgcaaatctcgaaatacaactattatgtcgcggagatagtattctactaatataagattatatatatgaaatttttttcaagaaatacattgacaaacattcaatttcaagaaatatcatcgataagtacgacttttataaaatgccactgtacaagcgactttgtctcggaaataccatcatcgttagggtttcgttagtagtcctccgttaagtattataggataaacggtgcatttaacaatggggatggacggaaccttaacagcaatgatatttatagaacaaaatcgcttgcactcgtcgatgatggctttgattgtttgttaatggtatttctggatgttctctatatgtatgggctcattgataacggcactatatgagtgacaatgagaaacagcgtgagcgaatctgtatgagatgacgtacgcgatattcatatacaggcattgatacaaacttctacacagtagctagtgttgctgaatatagcttggtcgtgtactccctccgtcccaaattaagtacaataaattttggttagatggaacataactataaatctaaacatattttttcagactcatattactagaatgtgtccaatcaaaatcttatatattttagtacgaagggagtagaccgtatgttgcgtccactgtatgttacatgtcgcccactgaattaaatatgaaactctgaaatattcaaagacgtcatcgggaagtgtgttgtaagtcagaaattattttgagctggggaatattagtttaatttcatttgcctctgatataatttgtaaggtgttttcaattttgttcaacgttatacttctctactttcatattagtgggccgggtgctttagcttaaactgtcacggagatataaaagcctatcttaatttttttttgacgagaaaaaacagcaagagaggctactactgtgattttaataagagaaagggaataattacagagagtatgtacatgagggggaaggaaagaacaacaaaactaaactaatcaagctaaacaagaaactgaatccatgattcccacgaaggtttatcatcctgttttactctatgcaaatgtagagtaaagtcctccttgaaatctgatttccacttgctgaaattgattgaaagattgttgaagataaagtcatttctcctgctctagatattccagcaacaaatagcaatgacctccatgaagaaaggataaggaaagttgttctttgcttctgagatcgtgttcataacatccagatgaaaatttcagttaatgcctaaactagaccagcattgctgagcaaaagggcaggagaaaaaaagatggtgggagtcctctatgaccactgatttcaggtaacacatttgatgcctccttgggtgttgaaatgttttctttgcaagagttccttggtgttcaatctgtccattagaagcaaccaaaggaagactttcagtttcagagtgcatttgcatttccaaatccaaataagaggagccggtgggtgaatgtgagcaaagaacaaatcatagacttttttggaatgatattgatgagaattccactgataagtccagcagtccaagtcattaaagttatccagattttgaaccagatcgtttaagatttgccattgttgaattgcttgtaccaacatgggtgtatgaaaagactgctcaatactattcagatcgaggaaacctttaagtgagatatcttccaattttgcgaatgagaataggatgcttaactcctcttgcaaaatgcttctagtccaattatctttccaaaacaaagctgtttcaccagaaccaacagttacctttgagattgctctgaaaattgggattaatctgaaaatgtccttccaccaaaaagaacccttttctgtgtgtgcatgagggggtaaatttgaatgagagtagtatttgttccaaatgagatttacccaagggagatctttcttattgaaaaatttgtccagatgttttgtgagtagggcaacattttgaagaggaggggaaatgagaaaactaaaaatatatgtaaaacaagataagttattagtgcatgattaattaaatattaattattttaaatttaaaaataattaatatattttttaaataaattttgttttttttaaaatatacacgatttaaccgtttaggaagtgtacacctgaaaaacatcatatatccctattgacactcccacctctcactcgtgacgactctatccaatccttctccgtctcgtcatggccacggtagcgccactcacatcagagccccaagatctcgaccctcatatatgggcccttatatatttaacctattagctagaaacaaaagtttaattaattaaatcccttaaaatatatgttggatctaatatgtatcccttaacagcaaagctatgtataatgactccatcaatcatcaataccggtttagtttgcgggccttctcaaatggtttggatgacagttttgctctgcgtggcgcacgttgatctaatctctatcctacgtctatattatattataaaataaaatagtaggacccatgtctcatcctcgcctcgttctctagctccttacacactttgagaaagcagggtatactggaagcagagagggcaggagggcgacagtagcagcaagccgaatcctggaagagcggcggcggctcctcccctcttctctcctaccgttcggttggggcacgggtgcgctcttctctcccttcctcctctctctctctctctctcttttttctttgagagcacttcagaattttctcaattcgctcctttgttatgtaacgaattttctcaagttcccttggatcagttacaaggacttgaacacccaattgcacttttgtcttctgaaggttgaaaccaagacatgcaattcctcctccctctcttggcttgattgtatacgtgcgttgagctttgctgtgactttgtgatgtcaagtttccaaacgctcattgtaccattgcaattattcaaatgaagaccggttgaagatagggatgaaaatggttggaaaatccctataccattttctttttcatatatatatttctcgtaaacgaaatcagaatggtagatctggaaatggtaacgatatcggtaatattggtatatcagaaacaggactgtcggaacgaaatataccgatattggttggaagtcgaaattcatgtcagaatcagcagagtgtggcatagcacacatttaactatacatgtaaatgacattttaactttattcttttatcatcacacaccacataacaccgttatatgatgattaataatatgataataagtttgatgaacagtataaacaaagtttaacaatacttaacatcgataagttgagaagactaaagttcagcaaaatccacatgccacatcatagggttaattaacaacatttttctctggtcactttcccttttttatgggccgcaagcctactagacttccttcattcatggacttctgatgggttaggcaggctaagccgctagagaacttccagaattttttcggaattttgacgaaaattatcatacaaatacggttaccgacaaaacggtcggaaaaacctccatctcatttccgctaccatttccagaagatattaccgtttccatttccaccactgttggttaccgataccgactgaaaacggtcggtgtaaactagaaacggcagccggaaatttccataccgttttcagggttggatgaagatcgatgatgacggtgctacccgagctcaagcttgtagggggctcgccagcatccctgttgttaccttctttcgcaggcgagtgtccaagcacgatctcgcgcgggacagccgttttaacggttttgcaattgagagttacgaatgagatttgacctgtatttgagataattaaatcggacattttcttatctggcctaattagctgaccctttgtttggaccagagtcattcttaaaagtacacaccttggcctttctctttcgcaaacattcttgaacagttgcgtacgagttgggcttttctttatatagcttaacgtttccggcccatgtatttccttctctcctcctaatcgtttcggacgatgcaagaggtggccacgatggtgtgctcagctgccgtacgtcgtcgtgccaagacgagtcgccggcggcgagctgggcctgctgctgaagctgacgccaaattaattaagctcccaaacggccgcgccggaggactatactcacaccgttaataaatatttgacgccgcttattttttaaaatatatttgatcgttccttttatttgatttattgttaaatataattatatgtatacatatagttttacatatttcacaaaagtttttaaataagatgaacggttaaacatgtgctaaaaaggttaaatatttagaaataaagggagtatatttttcaaaaaaaaaaaaagcttcgtggccggagctctgccggccggatttaaaagagggaaagccggaggattatatatggatcgcattcaggtctataccttcctgctttcttcctccgcgtggcgtcgatttccgccgtgcagatacgaggacgccggcgccgagtacgagttaaggcctgaagcggatggacgagaaagcctataggcctttgcagcccatatatacattcctgcagtaaaaaacaaatctatctctgtaaacatcttgttttgtcgtcagagttgcaacgaacagaattgacaacgggacacacgtacagaaaacgaagcaacactgagtgtgccaattctttaaatattatagcatgactacaagaatccaggatttttcttttgacagacacaaaccactaaggatagcatcaaaaccgttaaggtaacatgttttgccggccaaccgccaagtttatagaccaaggaaaattccattttattggcggctaactgttatggaaagagttttttttttgtctccccaacaagaaaattacgatcatttccaactttcgaaagcgccaagaaataaaaacttgtcagttcggattgacaataatatactttactttagatgttatcgaaccgccaaggaaattatcaagaaaataccttattcatggccgctacaaccaccaaaggaagtatcaaggaaataccttattcatgaccgctacagccgccaaggatataacttggcggttctacgtaaccctcaataaaatagttgtatccttatcaactagttatgatcatcaagataacgaataatattggcggctttgttttggctgccaaaaaatcttggattgttgtatgcgcaggagaaaatcgatcagaacatatataagagggaaactttatatggtgaaatagctaagctataagctcaagaagagatgttttcctccgccaaagtctaaggttttggcctcttccttgatctttgctattagcttgattatcgagagtttcttatgttggaacattcattgatttctctcctatattttccatgtcgtaagtaggatgagagtgcacacccccctttttctgataggcttcgacctgtgagcagtgccacccaccattcatatactatcgaggttgtgctccatatttatgggctgagttgctcctgggatgtccaggtggaaatcatgtccatattctcctcatatatctgcactctggacacaagtaggtggaaggatgcttctaaggtgggtcggcaaagcgagtagtacaagtaggtggaaggatgcttctaaggtgggtcggcaacgcgagtagtaggtattgtttggccaacttctcgaactgttaatctctgtcagacgtccgtactaatgttatgtataattagggcatgtttggtagagctccaactcccaggagagctggagtccagtcaaacagtttcaactccatccaatgggagtgaagctggctggagtgctctcacaaaatgattaactagagaggtggagctgggtttggttgctccataatttcactccagatccagttcttgatgttaaatctaagagttggaacctaccaatcaggcccttagccaagcgaagatcatgtatttctttggagtctaaagcttccaaatgaaatatgatagttctgttaatggagccgaagaactgtgctcagcttctcatgaaattgagtcaaacagtagatacaatgaagagtttttagtcataatctctcatgcatgaacgaaggcatgataaaactatcatcttgcttgatttccaggaccatctttaccccttcttacatgcatatgtttaatcaagaagaaaagacaaagagaatccttgcctcaaaattccttatcaatctagctattatatacccctctatctctctctaatatacatatataagctaggactgctcttgttgtccatgaatacatacataaacttattcaagagatccaaaatggtaaattcatgcatgcatcattctttgttctgcatgcagctagaaaacgctgccttcaggtatgctctgcagggtaggctgccacactgatccgcagctctcctgctggtgcagcagctcatctgcttcagcttgtttttgcatgagagacaccatgtcgttcagggagatggcggcggcgtcgttgtgcagcagcatcttcttcagctcctgctttctgaccaccagcttcaccctcacgacggcgccgccgggtgggtcgtcagccatgtcggccgtcgccggccggagtgcctcgtcgtcgtcgtcggaggagacgccgttgaggggtggcggcggcggcggcagcttcaggatctcgccgtcgacgtccatgctcatgatcttgatctccctgttcctatcttgaatcaccatgcaattccccatgatgatacgacgacgaagacgagttttgcaaggagatttgggatgatgaaattacgaggtagctagcacgaccgaatgatcgatcgatcacaattcacaagttagaaatgtgtgtgtggtgtagtatttcttggcgaaagagtagggggttggaggggaggagttatgtgtggtatttaaaggaattgtattaggaggatagccacaaactttggagcatacttcatctctgtgccattggactagccaagtgagctttgcttacttcatgtcatgcctcaccaaaagcaagatatagccactgagaaagtgagaattagtgaaatcgaccagccatttcttttttttttgtctctatcttgttgtcgtccttgactgttgcatgctgatttgcatcagggcggttccgtgaaattcgaggccggttgcgcacgtcaaacatctcggaataaacttgatgtgcattttcagctagattttactattattgtcttttcagtcttattctagtctactataaccttaattttaagtactatgatgttgttgaattttctatatatgtttaacaatttgtcttactaaaaaatattaaaaaaatataaaagtcatgcttgaagtgtctataataataaaactagccacagtaaaacaaataatatttacatatttgtttgataagagaatgatcaaatatatgtccaaaagacaacgacgttatatgttaaaaatagagggagtatatatttttttataataaacaagataaaaaaggtatagaagttattaaataaccgttgaattaatggagcaaatcgactgtaaactacaccgacacttatatttatgacaacaaatgcttcttcctagtgccaggcatgcatatatatgatctcattcttatccatgcatattacatatatgtaattagatggcaaaatcataattttgtgctgagtagagggttttttttgaagatatataattgaattagcaagcaacatacccaggtaaagggggagagatcacaaaacattagtagtaggatacatgtggagcccaacatttgggcaggcctaatccatatccttgtagtggaggtaagaatcatttgcacctcttgtcaaatctgcaagtgaaaatggatttgtgtactggtcatcatgtggtttaatttgcaagtgaaagtgaaactaatagagaccatgcatccaatgcgtgttactggtcatatatatagacaggccgaaaacgatcgatatgatggatcctcctctccatcaagcactaacaaccaatataaacatttgttgcacgatccgcatcatttcaattcagtaagaacgctatgtaccccggcatctatagttctatttatatatacacgtgatgtgttatatatgcgtgctatttgactacaagaatccagaattttctttgcggtcaaaaacaccaaggcaatatatttttacgactacctgccaaataataaccaccaaatttagagagccaaggaaatccagattaatttcttggttgctaatcgtgagggaaagttctattagcggtctaaccgccaagagaactacggagaatattaaacttttgaaaagccaagaaatgtaaccttaccagtctcgaccgacaagaacacatcttaccttaggtggtgtcgaaccgtcaagaatatatggtcattgagtgaagctggagacgatcgattaatgcatccaaggctatgtatccaactatatatccattatatatatggttattgtaatgggataaggcaagagcaattattgtgttttagaattcacaatgttcgcggttgagttttcttcttctccttttaattgtttgtagctaacacagaccacacattaattcaatactttagtgaattgcacattatatcgcatatgttaggaaacgataagcgaacaaacgataaagaacaatagatcaatcacagaagacacgagatttaacgtgaaaaaccctcccaaaataggagagaaaaaaccacgggcgccagccagcaaaatatcttcactatatctggggtgaggttacatcgccgcatggcggcttacaagagatatatatatatggtggaaccctaaaagggatgatgatccgtacgggagacgggcctccgctccactacggaagctggcctttattaagtgcagatgaatttcgatcacaactcaacagcatcgaccaaatattctccccgaagtttcctcttgcaccacaattaattaactaatggtttcgctttcaatcatttttcattcttttggtttgctttggaccctagctgttgttgttgttgctacttccctagctcgttgtcccctctctcctctgatggtgagttagctccaagatctaatcatcgatcaaggcatcctgcataaggtaatggggacctgaaccctgatccttgatgggtaaaacgtccattaagaacaaaatgagactcactcacggggttcctaatggcaaaatactcccccattagtccaatgcatcctcctttggaggatgccactaccacacgccacctcgttgctcccatcctctacttctactaacatggtgactgcgaaaagggtgcatagggatggatggtgtaggtcaactcacgcccatctctctagcggtgtgctctagcaatattgtagtggttcataggatatgaaagagtcaaagcaacggaaaatacatggggtgcaatgcaagaagatatatgaagaaaggaggcgtgtatgtagtattgtacagaagagagaaggccaccagaggggggggggcagtgccaatgactttccttcattcagaatatatcacatataggagaagagaatgaaaaggctcaaagttaaactaaagggaagaaaagtttgtccaaattggaagaaaaaattaggtcaagtaacctaagataaaacttggtatgcaagaataagtgatgacctatatacatacgtgtaattcacttttaaattttttcaacaaggctgccgatattccttaatagaatacagttttgtatgtgttgcataacagattcattggaccctaggcaaaaggttgaagcacaagaaaacaaaaacttgtccttgttgaatgtcgatatcaattaaagaacacgtcctttcacgcacattctaaaccccactatactttttatgatccttcttcctgtacttttctttgtttatacatttgcttttgtagtgctccccataaaaaacactttaatcaagataaaagctttgttagcattagaaaataaagtgaaatgtggacactaatatggtgatcgagtcaaaattatgtggaagactatttcaatccctttaacgagagtgggttgttaatcacgaagagctctaagtagctaattgaaacatgatatatagacaggaaaatactacgagactgtctgcatggtatagacgtagctagggttttgacttctagattatcctagaattgatatgcaactagaaataacaagctttagaaaaaggaaaaaaaaagagaaaccatcagctttcagaaaacaaaatattatataatagtaatcaatgaaacttaatggaaagacttccctttactcgctcactactatctccgtcttaaaatatagcaatctagtataaaatgagataaattctagtactttaaatctgaacaggcataaacattaatgtaaatgtgagtatacattcatcattgtaagacattcacacataattactctgctatatataaacatctctagctgagccgacacatacgtcttggtatatattcacaaaattattataaacacttctctcgctatcgattggcatgtcatctaatagaaaaaacttaactaaaatagctgtggtatagtaaactaatatatatatgtgcatgtatatagccttagtggctagtgatcgatggtgcagcattagagcaagtataataggaggttgtaagccgactaaatactgaggtggaggagagaagagagaagaaagaggagaagtgggctgtaaacttacagccggcttggacacataagaaccaagaaactctgtgagagagacaagtgatcatgtattaattgtaaagagctactctctccgttccataatataatgcacaactatttttttaggatgttcataaggcatgcatgcatgtatacaatttattaggacttcttctccattaaattattacttttttttaaatcctccaccctcaagatctcaaattctattggatgcatgcattatatttattagggtgattcaaactaggagatgataataattgtttcttggtctttgggttaatggtggttgtgccttatattttggaacggatggagtaactattatatgggtgagctgagagaaggctgcaaataatcttacagctaacaagttagctgtattattagtcttgctcttgaggtagcttagctcactataatatgtgcaataagcactactctgtccgtcccaaaatatagtaaccttgtatactggatgggacacatcatagtacagtaaatctggatagaggtatgtccagattcgttgtattaagatatgtcctatccagtataaggttgctgtattttaggacggagggagtatcttattagctcactcctttgacctatatctagctaagctagctagctatagctactcgcccgttgaacgctttttaaccacgcgtgcatatgcacacgcgctgagatcgcgcgttttgacgattttacacgcggctcgttttggcgacgcgcggcggacggcgagtggccggcaaggctagtggggcggcaccgccgcagagactaagccggcgacgtcgccgtcgacgagacgaccggccgctatagctattagctgccggaagacgactgccgtccgtacgtcgtcgtcgttggtggtggcgtagtacatacgtatatatgcgcatgctagcttgcttcgcttttacttctccggtcgccgcctcgccggccgacgtcgccacgcgtataagaattgagaagttcggataaactgatcatatagtagtatctactcatcagaatattataaggttaattaacaaaagtcgatgcaattataattatgagatattaaaaaagactcgactcattatgagtttctcaatggagagtagaaaaccccctcaagaatttgaactttaggaacagatcgtcttataaaagtccttgtgatctctctcactcatctagctttgttatttggtgtcactaatagtttaattgttgtttgtgtaatcctctccccaattgccgctattctttattcttagttagtttactcgtaatctgagattttcggaatatccgaaaacatttcaaaaatatccaaaaatattaggaaatatctgaaaagttctgtttctgtattttcttcaagaaagttttaaatgcctattcatcccctctagggaacatcaagatatatactatatatagatattattatatcatttttacaaacttatatggttaaacttgaaaataattgacttatattaaaatcaagacatcttgagttctaaaacaaaagaagtactccctccatttcaaaatagttactatttcaggattcaaaatttatcctaaactaatcattattttaaaatactatttttccttgtcaatcaccttccattttacctcaaccatcatctcacttctattcaaataagtgtcgctatagtcttttttttttcttctcaaaccttaatactccggaggcagttgtatgtaagaaaaacgtctcaatctgtgattaattagcagtttcaggggctgaaggggatgtgttggatagacgtggttacctagagatctctgtcgaatctcagaaataaagtgcatcagaaatttttgtgtagtcgctttttatgtcgttttgctcttaacgacactcgtgcacgcatgtagtcccatttttctgatctgtcgtcgtagagtactgttcaccatacgcacggaggaaaaatgaggctcgtcgcgtcgttctgtttggattcttttgagtagccttgatcgagatttttcagtatatgccatccaattcgcaccattttcaggatatgccacttaattcgcatgactttcagaatatgccattggaagcacgaattccttcattccatgccatttttctctattttcccaaatttctcagatttctaatactttccttcatctttctcacctgaccggacggatttacccatgggcccacctgtcaggagagtagagagatagcctcctcctcttagggaacagatcgatctatcgcaacaaaaaaaagggaaacatatcgatccccttcctccttcctcccggccgacagacgcaacgccgctacgagccgccgccccgaccgcgccccgcccccacacctcgctggcagctccgtcccccgctctgcaccgtgcaaccgcgcctcgccggcagcttcacccccgccccgcgccatgccaccacgcccagcaatggaaaccctaaatatctagggtttgaaggaggagatggagaggggggagacagcggctcgagaagagggcgtgccgcaggcgacggcctcattgctacataatgagctttcttcggggtaagatcatgctcccctgctatctattattgcagaatcgaggtgcaagctcaagagcgtgtaggtcagcaacgattaagcgggcaaactaatgatttacttctctcgtttttgttgttactattcgataggattgatcccgatgcggtgtttagggtgtgcgttcagtttggtcaatttacagctaaacttgttgatggaacttgtgttcatgtgccacgaaagtgcttggaatgggttgtggactatcagcaatgcactttggagagcttggagaaggaccttgcagcaagggtaacatggggcaagtgccaacaggttgtgatgagtggatatgacatgaccacgggtgaggaaacaccgtttaaggacaatatggatgtagtgcatgcattgtttgttaggaaaagtgataaaaagttgtttctgtatgctgatgtggaggacaagcatgatcagttggttactaattcatccgtttcagaggtaaatgagttatttatggatgaggttgtgacagctagacatggtgatgaatcaaacaatctgcctgacattgattgggatggattggaaatagctcaaattccacaagagcaagttcatcaccaagtcattgattgggatggattggagatagctccaattctagaagctgatgtaggttcttcagtgcctttgatgggggaagatgacatgtatgcattcgttggacttagagctgaggatgagagagctgaacaagctaggctacaagctgaaaaccaaagggattctgctcctaatccagctgcagatgttgcccaaggggacttaaaccttaacgaggcagagatagatgttaatgatgtggttcctggtgaagctggagttttctatgatagggatgatcctccaatggaagttggaagcttatatataagtatggttgagtttaggtcagctgtgaggcaacatgctataaaggggcaatttgagttagggacagagaagattgacacagagaggtttcggggctattgcacagctgagggatgcccatgggctattgtggcaaggttacagcctgatggaaaatctgtgagggtactaacaactaacttagcatggctatgttacatattcaatattttgtttcttagtgataattataaaataatacattttgatcatgcattgtgttcttttgtgttgtaggttactttgaacagatttccccatcattgtacatcaaccgcgagagttaaaaccaagatgtcatcctacaagtgggtagcagagaaggccattccctttctaaagaaggacccaaatatgggtgcaacaaagctacaagatgagttgcaaaccacacacaaagtcacagtgggatactcaacagtttatgcaggtatgcaaaagtctatagagcaaatatttgggacgtgggaagagagctttgcatttttgtttaactttaaggctgagattgagttgaaaatgccgggaaatgttgtggagatagatgtacaggaagatggtgatgggatttattttcacagattcttttgttcattcaaaccttgcattgatggtttcataatgggttgccgaccttacttgagtatagactccacggcacttaatggaaaatggaatggtcaactagcttctgcaacatctatagatggacacaactggatgtttccagttgcatttggattctttcagagtgagaccactgacaactggacttggtttatgcaacaacttaataaggcagtaggcaatcttccaaccttagctataagctcagatgcttgtaaggggctagagaatgctgtgaagaatgtttttcaaagggcagaacatagagaatgcttttggcacttgatgcagaatttcataaagaagtttcaaggtccagtgttcgggaacatgtaccctgcagctaggtcttatatgccagaaagattttatcattacatgaataaaatttatgaggcaaattcagatgtgaagccatacttagaaacctatcacaaattgctttggatgagaagcaagttctcagaagagataaaatgtgacttcatcaccaacaatttagcagagtcatggaacaaatggattaaagatatgaaacatcttccaattgttgagcttgcagatggtattaggtcaaagacaatgaatctattggctaggaggaggaagataggtgagaaattggatggtgtgatgctatctattgtggtttgtcaactcaatgcaatgactagagaactgggccacttgaaggtagttcaaggtgatagagaccaagctgaggtgactgagatcactgctgaacatcagattattagacatgctgtcaatctagtaaaccatacatgcacctgtagagagtggcaagtttctggtaaaccatgcccacatgctttagctctcataatatcatatagaaaccctaacatggctgattatttagatccttgctattcggtagaaaggtataagcttgcatacgcaggagttattttaccacttccagataagtcccaatggccaaaagtgaatattggttttaagttgttgccacctcttactaagagggaagttgggaggcaaaggaagaaccaaatagtcgggtgccttgataagggcaaggctaggagcaaaggcaagtggcaagttcaatgtaagagatgtcttgccatgggccataggtcgacgtcgccaaaatgtcctttgaatggaacgaagaaaaagtaagtgtataaattgtcatttgttttagttctagcatatttatttgtttcagatctagcaaatttatttgttttacttttgcaggccaagtcgggccaaaaaagggagaccacttagtgaagcaaattgtgcagcaagtactagcatagaaggcacacccaaaagacagaaggtaggcccaaatggttcaactaatactagtccagggcctataacaagaaggtaggcaaaccctttttcttgtttctgcacttgattcaaaaaatgttttactaacacctaattttttttaagtcaatcggcattgacaacaactggtggagaaggaccaatgaggcagatgacaactcctccaaggcccactagagctgcaaagaagatcactccaaagaaagggctaaaaacgagtgctccttgattatatattctcaaatatgggaactattagattatggatgcttttgtatgtgaaccacatgactgtgcaagttgtggcttttattttgtaatctgaacttctatgcctggattatgtattttggatggcattctctgacttgcttacttagaggtgcttgccttggagattgttttacttgctatatatcatgccaaaatatggttacatgctgttcaaattggaaattctgggtatatgctgtcagaattttgggtatatgttgtcaaaattttgagtacgttgctgtcaaaaattacatatacaaatttttggtgtatgctgtcaaaattgcacagattttaggtatgtactgtccaaaattttgttctcacatggctcaggtaaacaactgcaacttgaaaatatgcttcaatctctaattgaaaaaacttctgtaaatcacgattgggaagattgaccattctctacgcatgctgtgaaaattgtctgcacatgctgtccaaattctcagattgcacatacaaagtgatatttcatcgaaattgtaaatgccaattaacaaacatgctacgagttgaaccatcaaaattgtctcagtttgcaactttccatacaaacaatgcgttgatacaactagctgaaccatcctactagcaaacctgcactcctggaaattttctgattacaatcaacttccaaacagtacaaagtataaagtttttggtaaagcaaattgtttgcagcgctggagtcgacggctcaacgcggtctggtcaaagacttcaggagaccgacgggaggtgggggagccgaccggcgcaggcgatcttcgcggtgagggcgtcgctcgaggcggggcgcggtggcgcgacctgaggtgggggacggtgctgccggcgatgcgcggacagagcagcgaggtgcggggacggggcgcatactgggcggcggggggctgagctgcgagcggcgagcggcgagcggcgtcgcctctccgtctctcggtcggccgagaggatgaaggggatcgatctgctttcctgggaggaggaggctatctctttactctcctgacaggtgggcccatgggtaaatccgtccgatcaggtgagaaagatgaaggaaaatattagaaatctgagaaatttaggaaaatagagaaaaatggcatggaatgaaggaattcgtgcttccaatggcatattctgaaagtcacgcgaattgagtggcgtatcctgaaaacggtgtgaattggatggcatatactgaaaaatctcgccttgatccgattctctttcatttttcgcacgtttgccatagagagtttgatgaattatatgaggcccgagagagcatgcacgatcgagacagaaaataataagtggatgaactcagttgggtactatgcacgattgatatatggcctagctaaggatgctttaaaaaaattgaaaatatattatttttaccgatacagtagaaatatactcgttttagaataattggcatcattataccgttgttgcgtctataggaaagcgaaatcgctgacatgctggtggatgcgcgcgagttcctaccaccaacgtgcaaactcgtgatgtcatcggcgcaaaatcatgcaagtacataaatgcaccacgcgaactgacgacatcgtgcgagttcatgagttcagcgtgcaaactcgtgacatcatccttcgtgaacttgggattgggatttggtgatattcccccgtaacattctcggtgacattgag

SEQ ID NO: 5666 - DNA, 8537 bp, Oryza sativa
tgggccggctgggccgaggagagagagagaccgggttttgggccgactttcggcccaaagccaaaagaggacttttaaaacctttttcaatttaaattatttcttaaatgcaattccatttattaaaaatacttccttagctcaaataaatcccagaaaaatctaggaattatagaattaagcaaagtatttaatgaaattttatctggcccctttttatattggaatttattaattaaacttagattttcttttcaagacttttaaaataaattctagaaattccatttaaacaacaatttatataatttgaattttcagggtgtgacaaacctaccccccttaaacagaatctcgtcctcgagattcggaagaactggcgaacagatgcggatgagctgacttcaattcatcttctcgttcccaagttgattcttcttccgagtgattactccactggactttacaaaaacggataactcgattcctggtttttctctcatttgtttccaagatacggattggtttctcaacataggtcagatcctcttggacttctatctgttcaagattagcttcttcggtaggtacccttaaacactttttcaattgcgacacatggaacacattatggactcctgccaaggattgaggtaactccaactgataagcaacctctcctcttctactgacaatcttataaggtcccacaaaacgcggtgccaattttcctttggtgtgaaaacgatgaacacctcgaagaggcgtgacacgaagatacacataatctccttcttcaaaactcaaatctctgcggcgattgtcggcataactcttatgtcgagactgagccactcgcaatctttcttgaatgattttcaccttttcttctgcttcccttaggatatccgtcccgaaaacctgacgttctcccgtttgatcccacaaaagcggagtgcggcacttccgaccatacagtgcttcgtaaggagccatctgcagactagcttgataactgttgttgtacgagaattctgcatagggtagattcttatcccaacttccaccgaagtctaaagcacaagctctcaacatgtcttccaaaatctgattcactctttcggtctgtccgtctgtctgcggatgataagcagtgctaaagttcaacttagaacccatctcttcctgaagtttcttccaaaaatttgaagtaaactgactgcctcgatcagacactattttcttagggacgccatgcaaacacacaatccttgccatatacaattttgctaagcgacttccggaataggttgtttttaccggaataaaatgagccactttggtaagtctgtcgactattacccaaatagagtcatggcctgatgacgttctgggcaaaccagtgataaaatccataccaatttcttcccatttccattcaggaatcttcaaaggctgcaacaaaccggcaggtttctgatgttctgccttgactcgctgacaaacatcacatactgctacgtattccgcgatttcacgcttcatacttgcccaccaaaatcattctttgagatcctggtacatcttagtactaccagggtgaatggagtataaagtatcatgagcttctttcagaattgcatcttttaaatctttgttatcagggacacagattctctcacccaaccatacagttccgtgctcatcctccaagaaaccgatagcttttcctcttctcatattcttcttgatttcttgaatatcaggatcattaatttgggcttctctaacttgatcaattagagtgggcttcgcttctaaggctgcaacaaaacctctactgacaattcccaaatttaatctttcaaattccttgcataattccaatggcaactgtcgtccttctgtagcattgcaatagcctttcctgctaagagcgtcggctacaacattagcctttcctgggtgataatgaattcccatgtcataatccttacttaattccaaccatctccgttgtctcatgttcagatccggctgagtaaagatatactttaaactcttgtgatcggtgtacacctctgtacgagtaccgaaaagataatgacgccaaattttcaacgcatgaactactgcagctaactcaagatcatgagtagggtagttcttctcatgcggacgtaactgacgagatgcataggcaaccaccttcccatcttgcatcagaacacaacctaacccaagtttggatgcatcgcaatacacttggaaacccttctttggatcaggcaaaatcaaaataggagctgatattaagcgacttttcaactcttgaaaactctgttcacattcttccgaccacttgtacttcacatctttctgaagcagtcgtgtcatgggcttagcaatcttagaaaaattctctataaacctccggtaatatcctgcgaggcctaggaaactgcggatctctgaaactgtcttcggttgcttccaattggttacggattccacattactaggatcaacggcaactcctccggctgagatgacgtgaccaaggaatttcacttcagacaaccaaaattcacacttgctaaacttggcatacaattgatgctctcgtagcttctccaatgcaaggcgaagatgttcttcatgctcttctttggttcgagagtagataagaatatcatcaataaagaccaccacaaacttgtctaggtattccataaacaccttattcatcaagttcatgaagaaagcaggggcattggtaagtccaaaagacataacagtacattcgaacaacccatacctagtggtaaaagctgtcttaggtatatcttcctctttgattcttaactggtgataccctgatcgaagatctatcttggagaaaacagtggcacctttaagctgatcaaacaaatcatcaattctgggtagcgggtacttattcttgatagtcacatcatttaatgcacgataatccacacacattctctgggtatggtctttcttttcccaaaaaataactggagctccccatagtgacgaactcggtctgatgtatcctttctgtagcaaatcatctacttgcctcttgacttcagccaactcattggctgccattctataaggtctcttatggatcggagttgttccaggtaccaaatctattctgaactctatatcccttttgggcggcattccaggtaaatcatctgggaacacatcggaatactcccgaactataggaatctcttccaaagttatctggttcagtcttgaccttaaagactcagaagacaatgcattaacagttacaactcgaccatcattgctggtgagagttacttttctgttggcacagtctatcacacctttatgtctggctaaccagtccatccctagaatgacatcaaggtctttggattctaacaagataagattggccagaaatggtactcctttaatttctattctgaccgaggggctacgttgcaaagaaagtgcttgattacctggggtactaaccatcaaaggacgtctaagatcttctacttccatcccatgatttcccgcaaaactcatagataagaatgaatgtgtagcaccagaatcgaaaagtactgttgcaggaactgagttaacagggaacgtacccaaaatcatatctggagcatcttgagcttctgcagcagcaacatgattgacacgggcctttgatgctggtacagtagagttgctctgagcagggacaaccttcacgcgtcgaggcttcggacacttgtcagcataatgtcctgggtctccacagttgaaacacaccacgggcttgctaccttgctccctcttggcaggttgttgctgtgctggagctgcaacagggcgtggagcttgattgcggatgttattgccagcattgttgttgaagaactgacgctgcggacgaacaacagacgaagaacctccctgtggcataggctggggtcctaaagcaagacgcggcttctgattactcccctgttgtgccttgaagtgagcaatccggcgtttcttctgctccatgcgattatacttgtcctcctgacgaatagccttatccaccaatttctggaaatcagaataatctccagtcatgagtgggtaagaaagctcatcattaagtccttccaagaacttctcttgacgttcttcatcagtgcgcacatcttccggagcataacgagcaagacgattgaactcgtgcagatactccgtaacagagcgagatccctgagtaagcgacctgaactccttcttcttgagagacaccactcccgatggtatatgcgtctttcggaaagcagcagtgaattcaagccaagtgataggttcagcagtagtcctattcaggcggaagtgatcccaccattcagaggcagggccatgtaactggtatgatgcaaatgagaccttctcctgatcagtgcactgaagcaaatccaacttcttctctatggcatgcagccagtcaccagcttcaacaggattagtggtactagagaaaacaggcggccttacacgaagaaattctgctaacttattctgaggaggtgcatggttatttccttggttctgctgattctgaaattgttgcatcatcatgttcattagctgtgtctgttgagcaagaacttgagcaagagtgggattctctccattgttattgttattggggttgttgggaccattcccgttgctgcgagtattcaccatctggcatggacaggataagaagagaaaccgggggaaaactacttaggacagagaattactttaacttttattgatcttaactgagttttattattacaaactgaagactctcacaccactaaactcaccaacttcctaacactcaaaagcaaacaaacgcacgcacttacatcccaccactgatgtaaatcacatgcaagacccacacacacaaccaaacttaaagcaagcaaactaacacaacgatctaagacaacgacttaacaagtcactctagttcttccaagcatcggaggtcgattgaaggctcattcggctcgtcttcatcatcttgagttgctacccactcaatcttggaatggttgcgcttggattcttcttcttcatcactacttatgatgatgactggaggatctgctagggttggggcaacttctttctccaccacacgaacctttggcgccaattgatagcgagggacaaatagagctctcttccttgcggtgagacgaatcctggccttctgcggtggtgcttctcccttcaatgcggctagttccttctccaaacgatccaccttatcttcgagcttgcaaatcttaccacgattccgatcttcccgatcttgagctgctagcacactctctgcacgactttcatccatagcccacagcatctcaaccaaatatcttgtggtagcatcattctcaattccttcagtctcaaggtaactgccacgatcacttccctgaggttgacgaggatggtagctgtcacgaccggaaatcacccaacaggcgttcccgacgtgcgtgtattattccttgtcccaggaggcaaggtacaccaaaagttgatacaatacagagtttaacaagcggaagcgtatataaaattattacatgggcaacgaaggcccagcacactcaaagacaacgaaaaacagcggaagactagggcgacgaccacaggcgcttgacggcaggcacgagctagacaccaaagccttcatcttccaggaactcctcatctgggcttgggaaaattaagcaagactgagtacaaccaccgtactcaacaagacacacccaccaatgcagaataaatgcaagggagtacaagggaattataatataaagggttagggttgcagtaaacagcatttaaagacatttagttgctcaaagctactttgtaaacgcgatcctagaactaaacaatattattaatcaaggccgtgaacccgcacgaacctgccttaacccaaggcctatgatgattcagaccgaactggcaacccgaccctgggtcccagctcgtcctaagccaacccaggccaaccattccatattttagttgttaagcaagttttaagaattaaaacactaacttgggtacattgctcggcttgcccataaccgagggctcggctattcgaatagattttactctgatcagaggtgtacaactttacccacaagacacatcttcctcacgtgttgccacgtgccacataccaccacggtatacggacggaagacgtgacatagtttccaacccatcctagccttagacaagagtaccgacccaatcccacctacggccgggatacccgggacaggcaggcagaactgagcccctagcagcagggcaccaaccctctgccgtatgacatctcgactaccgggccgcagctcgtgtagccttcatttgccctggagaatgtccatcgacgcccgacttcatccatctccaatccgtgtacttttgtctatgactagactgagccacaaactaagccttacccattagacatgtggaagtacggtagtgctttgcaacagaggcccgaagaccggtccttaaacggccgaggtgctactatcaaaaccatgcaccccgagcccagcctaaaaccattttggggattttgaataaagggggatggtgtgagtccaattccacaataaaccaacaattccagagtatccaggtgatatgaatatttcccaaagtctatagttgtaaaaccacctaaggttacctaattagattgcgaagcatctacctaaaatcatactagggataccatgagtagagtgtccactagttgaggttttgtttgtctagggtgaacaaggtagtaataataacaataacaataataatatggtcataacaaaggtaaataggcatggctaagtaaaatagtgataacgcgggaatttaaataaagtgataatgcaataatttaaatcaacataattttataaaatgggattcaatatgatcaagatgatgtgtcttgccttgctcgttttcccaatcgacggcttcgacttccacgaagagcggatcttccgaagctgcagcgtctacacgaccaacggaaaagaaaaaggctttaacactaaataactccacataacagcagaaacaaagcacaaaaatgggttctttacatcttaaggaaaaattagagacttgaacggtccaattccgagttcaaatggccaagatatggccatttgaagtttatatgctctttaaatggatatttgcgaatttcttcatttaattttcaattaaaaatcctatttattgcgtcagccgagggagcggggcgcgcggaccgggtccacgggagtggggcccacgcgtcagccccacggtccacggtggaccgggcgcacgcggctggcggcggtcggcgccgtgggtcccacgcgtcagccgcacccgcgggcgcgggcggctgacggccgggcccacttggcagccgcgagggcgcgcccgaaggcggcctcgccggcacggccgacgggaggaggacgcgcacccgcgccccgatggtcgccgccggcgaccaacggcgcggcggagtggcacccgagagagaggagggaagggggaagcgaacggaacggtcttcggctcaccccggtcgacgagggcggcggaaacgacggacggagcggaggaagacggcggcgcggttcgggatgacgatgacgacggcgctccggcagtcgacgggcgaagcggagcggcggacggggtcggcggcaacacggcgaagcggacggaggtgtcgccgagtaaggaggaagtccggagcggcggcggcggcggaacggagctcggcggcgatggcggagagagaggagcacggcgcgagcacgaaaccgacggcgagagcgagcggcgagcggcggaaacggaagagcgaagctcgggcaacgtttaaatagcgccgggggaaggaaagagcggccggagagggaggaatcggtcgcggagatttcggccgccatagatgcgccggcgatgaatgcgggattaaatccgagcgaatccgagggagagagagaggggaaagcgggggaaacgggagagggaatcacggggagtgattcccctctctttaatgcgcgcggggacggcgggatgcggcgcaatccgcggcggcggcggcgctagggcacgggcgcggcggcgggcgcggcgggaggaaggcgatgacaggtgggccccacccgtcagcgagagtggcgggcgggcctgcctgtcagcggcgcgcgcgcgcggggagccgatgggccgcgggggaagagagagagagggagagggaaggaatgggccgagccggcccaagaagggaggaggagggggaaaagacttcttttagggttttctttttataaaacctttttaactttgtttatttcttttctattattatttgtgctctgaaaattccactaaaatttatt

SEQ ID NO: 5667 - DNA, 17483 bp, Oryza sativa
tttcgctttttccatgaggagtttacacttacatggaaaggtttaagtacacttcttggttttcacgatacctgtaaaatcgatctcttgaaaggaatttctgggttcgagaaaaataggttttgggaagacatttccggtgctacaatttgcaagaaacctagaacgaatgatatccataatcctacacttaggcttatgcacaaatggattgctatgactttgtttcctagaggtgatattagacccattaggggagatgaattgattattatgtttgccatggttagaaagattaaaattgctcctgtgaaatgtatgataaggcaatggttagaaagtatcaagttctttgctcctgttgagtgcacttctctgattactcggatagcaaaagggctaggagtcgttagtgaccaaattgcttttttctcagttactcgtccgcgtattgatgaggcctatctagtgcaggggcattttttgaaacatggagaagatggatctttgatttactttttctctggttgtacaaatgaaatcctgttgccaaatgcggggtatcatttgtacaactgtcatgaactaaccatacccctgcagaccatagaagaatctcgtgcaggtggagcatacagggagacgcgcaacatgacaagaaatgaacgagaaagttcatcatcctcaacaccgtacagatgtatgagcgaggttgggaaccaactagggatgcacccggatggacccaagctccacgtcacaacatcggagtcttaggctgggcaagtgccagtgaggaccggtggcgtgcacctcatgacatacaatggggggacaaccaaccctccagatcaagcggtttgcctccatctcctggtggatggcgctcaagttcctctcgttgggacttgggtgaaatctctagtagactggacacccttgatatgcagacgggggagagattcagtacaacctctcggaacacatagcacaaacgcaagaatggcaacaatctgctgatgctcagttcgccaacttcaacaacatgatgcagcaacagcacgattaccttcaagcatgcttgagcgaaggctttaggttcccgggcttgacggtcctagttacttgcggcattgccacgtcaggaggctcaaaacctcccggcaaccatccggcactggccatgcctcacccggctatgccaggtgtccctcataccgttggccccacaggtgactggcaaccacctaggggttgagcgatggcttcaggtccttgggcttgacggtccttgttacctgaagcacagccattttcggggacttactacccccaggccaccacccgaccccggtcagacccgaacggctgagccaggtgtccccataccgttggctccgtaaatggtttgcggccatctaggagttgaccgaagacctcggcttcatgggcttgacggtccttgtttccctttgtattgtcacgcaggagacttgtaacctcctgccaccatgcctagcacacatctcgaagccgggcgagatccccaagcacttgggtggcaaggccttcctcacttgtagcatcagggcatcagccgggctcctacatcaatccagctggtaaaggagtctggccaccctccttgaatagtcggcagcatgagaaagctaagtacactgcaaatttaaacgccagcgtatttacaagcttcagtctttgccacacattcccccacatgttctaaccaacaagatagaaaggaaaagtgtttcattataggtcaagatcattgaccaatgcagcagcagcagaggcgacttcttctaatcgccagccgacatcctcctcagagtagtcggccgcatacccttcctcgacagcagccatatcaacccaagggtagtgcgacttcaccattgccagggcatggttggtggcgatcctcgcagccgactcagccatccgacgacaccctgccatcatgaagggatctttgccttcacctcgactcgggaagagcacgcgcagagttgggaccagggccttcaccaagtcttcgcgctgtgccttcaccgagtcaagctcccgctggaaatgctcatactgcgtacgaatgttctcagcgcgcacattgacctcctgatacaaattcgccagattcgtatttgtcttcacgaggtcttcctccagggtcgccttttcgacaagaccatatacggtggtctcttgccaaaactaacaaaaccgtcataactaacctaattaatagatacaattgccttaattgagctctatctctaactggcaatgacggttaaaccaatctaggcccatgccgagcccaagtcacaccatatcggctgtatcggccatcagcattatcaaccttgattattatcaacctctgttttcaaccgatacagtcttcagccaatgcacagtccgactccaaatctaactcgatccaacaccgaatccgctttgatcttcttccttcttctccgaatctgatggcaaattccgttgttaacaacaatatagcagaatttgaaggagttttgctagttatgagaaaggcaaaagcactaggggctcagctcttgataattaaaactgattcaaagttggtagctagtcatttttcgaagacaattgaggcaaaagaagaaacaatggcaaaatacctacaagaagcaaggttgaatgaaaagcactttcttggaataaccgtaaaagccatagcaagagaagaaaacggagaagacaatgagctagcaaaagcagctgctgcaggccaaccattggaatattcattttttgatgttgtaacttactccaagctatgagagaaaagagtttacatgcatacaaaaagtggcaaattggagagaaccaattctgaagtatcttgttagtgaacaacttccagagaaagaagaggaagcaaggagctacaattgatgtccaggaagtacaaagtaatagaaggacagttatacaagagcggagttaccactccactgttaaagtgtgtaacaagagaagaaggcatgagaatagtggtggagatacatgaaggattgtgtggcgctcaccaagcaccatggtcagtagcatcaaaggtgataagacaatgaatatattggctaacaatcatgaaagacacggagaaatacatcaagacatgtaaagcatgccacaaatttggtccaacatcaaaagcactaccgaaagagttgcaacaaattccaccggtttggccattctatagatggtgatttgcttttggtcattatggcaattgagtatatttcaagatagattgaagcagaagctgtagcgaggatcacctctgcggaagtacaaaagtttgtttggaagaacatcatatgccgatttggagttccaagggagatagcatgtgacaatggaaaatagttcgagtcaggaaagttcaaagacatgtgtaaatcactcaatttgcttcagtaggccatccacaaacaaatggaactgaagaaagagcaaatggcaagataatggaagccattaaaaagagggtggaaggatcagctatgggaaaatgggtagaagacctattgtcggtgctttgggcattaagaacgatggtggttcgatcaactggaatgacaactttcattctagtttatggagataaggcaatgaggccaagtgaagttggagcaaattcacctcgagtcatatttcatcagcaagatgaagaagagagattacactagaaatgctagacgagataagagttgaagcattgtacaaaatgacaatgtacacagaaggaaccaaaaactactacaacaaaagggtgaaaacaaggaaaatacaagtaggtgatttggtattgaagttgttgttgggaaacttgagtcaaaatgggaaggaccatttatagtgaagaaaagaatagaaacaagcgcattcaatttgccatatcttgatggagaagaactaaagcacacatggaatgccatttcattgaagaagttatatgttttaaaaaaaacttttcgtgcttatagtatattactcagtttgtaaaatacctgccagcctgtaaagtactcctctccaatcttaatatatataaacatgtcacatcctgatttttgtttcaggatttataaattatttaataaattattattagaatttatattaaatgttcgttaatttacaagtgaagttaaatgtgggaaataaaatttcctaaatataaagcatggatggatttaatttttattaaattctccatggttaattatactctctggaattttctcggatttttcggagctcaattattaattttaatcatacaaagagcatttcagtaattacccacatattaaattaatcattaaatggtctaattataattttgttaagtacttttagtgtccaagtattttcaggatttttcttgaaattatttgagcattggaagtatttttaacaattcaaagatcattttagtgattattttaattgaaaaagttttaaaagccctcccttaagtcgttgggccgaattcggcccaacactccctctctcccgcgcggccgagccggcccaaaaccggcccgagtcggctcaagccgagccgcccgccccctcctctctcaggcgccgacatgtggggcccacatgtcggttgcttctcctacctccggccggccggccatgcctagcccgagccgccgccttgccgcctcaaatccgcacccaatccggccccgtttcttccggatttttgaggggttttgatcctctcgttctcctctatcctttcccctaagaatcggagcaaaccgttgagtattttatccgaatcgaactcgtttttgagtttatctccaaaaccgagtttttgatttcccggatcgatttcttgcgggaggagtccgatctcttcaatccaaggctataaataggaccccctagtcctcctctttcgtttgccccctcttccgtcctctcccgtgacccgtagagccgtcgccaccgtgcaagccgccgccgccgtcgcttcttcgtcgccggccgtcatccgtcgtcgttcgtcgcgttggtgagtaccatcgggttcgtctcgtcatcctctatgtgtacatgccctccaattccgcagccggccgctctatctccggcgaggtcgccatcttggttcggccatgggtgatgtcagcatgacgtcatcggtttttctttttctcgtttttctaatagattaaaacttcggaaaatcataactaaataaccgtagatccgtttcaggtggttcaagttgctaaatttttctaaaataaagatctacatattaaaattgtccataaattgaattaaatttatttaattttttttaaatgggctttaaatagatttaatcttgtaaaattcataataaattcatttgaagtcagaatgaggccgttcaagtctcataattcatctaaaattatgatctacatgtttgtttactttatatgtattgtttatttggtttttattagtctttttcttcgttttacgtgttagcttgttgtttccgtcgttgcgaaggttcgtgagtgcaccggaagtattcaagaagattaattgaagaccgattattgcaaggcaagtcacacagatcctaaacacaatcctttgagcatgttgatcctatatttaaattctctatttatttcaactgtgcatttattttcgaatgtcaccgggtggtgtgaacctattcctttgttatggccaatttgcattgaatatcctattccttgataccttgggtaataaattgattagcttgaaccttatgtattggtttggttcagctaaatgttagatataattgcttagcaaagcttagaaacattagctcactaataggatgaatcatatatattacattattatttatggttatatttaatggtagctcacgatggttaatcgtgttatgataattaattggtaattaaaatatgattaatggtgggttgtgagcacatggttttgaaggtcgtgctcatggcaattaaggaccggttcgcgagctactgttgtgaaacatttatcgtgccaaccacaagccagcgtgggcaacggctttatcttttgtatagcgtgattcattatagtgcgccagactgagaagtggcgagaagtccatgggggtcgctggggagtccatgccttgtttataagggggtgattatgatccaggaacggtgcactgttttgagttgtgttgtgcaaagggtattgtcacgatttccccctttgcaatgccgtggtggtatttcggggcatggtaacatgtgtggaatcgtgtcttgtgggtacagtggtacacctctggccagactaaaactattcgaatagccgtgcccgcggttatgggcgggttgagcaatgtttttcgtgattagtctcacacctctcacaataattatggatgttatacctggtaataatttgcttagctcctggtttggagaatagatctgtacagccgggtatggttgttcaggatggttgggcctgtgcagcatgggtgtgttgttcagtgttgattaaaatttctgattaattactccactgttttacttcttttaaatgttttgctaaatgctgcttttgcaaatgagcctatattatgccatcctttggtatccttgtgcacttgcatatttgctgggtggcttgttgagtatgtcatatgctcattcttgcaataatcaatcaacctcagttgaagaaaaaggatccagaaggagaagacgtttggcttataccccagttgagctgcctgtgggagtggagccggagcttcgctagattttattttccactgcagttttcttcttggtgaggactaagtgcctcttaagtaagtatttatcggtttagttattatgatggatttgtatattaaattgtcagtttgtgtacctcggctgattcctggacgaggattttatgcacaaatcagttcggaaattactagtaaatttccgggcgtgacaaaacaggatgtagggtttttatccataatggaggcccgaacctgtataaaaaacttgtctttgtgtgtttatgaatgatgatggaaaatactccacatagttcggagaaagtacaactcgatcacaagcatcgataaaatactctgcacggttcggagaaaacacaactcgatcacaagaattgagaaaacattctgcacagcttggagaaaacaaaacgaaactaacatgagctcgaacgctacaatctgtactcgagctcgaaagctaaaaattgcgtgacgcggcaaaacatagttcgacctcgtcactcctttgaaagatgaggatgacggtggttttcgagcaatttttgccttagctaaaaaaacatgcatatcttcagcattactttcattttgttctttgcggataagctcgagctcttcattacttttttccaaaacggtgatttgttctttcaacttatcttcagcatcagctagttggcgagaaacctcttgatgttcaaggacagaccgctcgagagctttttctcgagcatgtaattttttgttctcttcaacgagcacctttttctcctcaataagcccttttatcacgccgctgatttttcgaacaagatcagtgaaggcgttcttctcgttagaaactcgattgagctcacgatgaaggaattcttggtctttcttgagtttagctatatgttcgacggattttttccattgagcgcaaattgcctcaagtgctttcttagcaacatcccgttgaagtcgagcaaggctagcagtctacaaaagcaacaacaaaacaagtaagacgtgagcactcgaaaacttaaaagttcaaaaatatgattactcgacagtgaaagatctcgaagtgtagaaaatacctttgcggcagacacatcgagcgtggcccaagaggacataagatcattttccttgatgaactctttttccaactccaaagggattaaaatcctctcgagctcatcgccaactgggccgagggggttgtggtgcttcaagtcgtccatgcataggttggccctgtgatggctactttcccccatatcgctgaaattgggcaaacccatcaaccaatgcccatcttgagcgcaacgctcgctaaagctgccaagaacttcttttaccagttgaggagatggagttaatataaatgggggagaaggagtccaaacagttttcgaactatcaccaactcgaacatcgccagttatagtgttttttccaatttcgtgccgttggctgatgttgactggagactgagctgtctgagtttctaagtctttgttagctcgagtcgggctactcaagctggtagtctcgacagcatgtgctcgaacactcttctccactactgtggcagtggatgcaagtacatccaaaggagcagtttcgttcactgaaacggcaaggctggcatcagctcaaatggggatgacgttgataacagggaattcgattcgaatttaatcatcatccagttcatcatcactgtcattgacaattttgacgttgatgtttgggggcctgcttgaaacatttttcctcttcaacccgctcgaaacatgatggggaggaggagcgatctttgcagtatcagaggcagttgattcgctcgagctatcgctcgaactgctgctcgagtcatcatcactgcttgaactgtcctcatcctagtcattttccttattttcatcgctgtcttcattttccacattgatatcttcaacatcaacttcgtcttcatcggaggatggggcttttgccttctttttcttttttttttcctagctcgggagcttgctcgggatgaatgcaagcaggaatatcggtgtttagaacagcaaacacatgattttgtcttttcccattttgcagtgtcaagtacttcaagtactcatccttggtaaacggaccaataagcttccgacagggacggacaatgtcctctgggatgacaactgaaacaatagaaaaacatgaataagtcatttaaaaaactggaaaagcgaagaaaacgcaaaagaaaactttcaaacaagatgaaacttacgttcagaagaaacgatgaggggatgaagtagtgaggtggccccatccggaagttcaccaaggctaagggcccaactagttgagagaggtcgaataccaagacagatgaactcctcgaccaagtctcgaacactaaatttcgaaacgagttcttcaactagagatcgaatggcggtaaaatcagaggaaagcgctaccgatggttcgaagacaactttcggggtcttacaagaaaaagtgaaagggcagtctttctcagcatacaactcggcaggaatttggaggtagaaccactttgattgccacttgtttccccacttggttcgactcgcagaaacaataggcccgggatagccgcggttcgagtggggggagaagttgatgcagccaaacttcgaattctgcttggtgtagtgtctggtgtggtgaaagtacgcaaaatcttgagcatgaggaactccaccacaactgtgaatgatccattcgaaaacccctagcctcacgacagcgtttggagtaagttgtgggaactcgagcccatacagcttgagcacatccacaaggaaaggactgcaaggaaacatgaagccgtcatcgaaaaaatcttcaaacatgagtgtgtagccaggcctcggagaggggttcaactcgttgactggtcgaatagtgacatttgacaagaaatcgaaccgtttgtgacaagttcgtccaggtcctagaccagaaggggtcttctccaatttcttggtgttgtcgaagcgaccactgcgtacgtcgaaggacgtggttactcaacagttgttgggaacagtgaagtgtattaattttggaatttttcttgggatcccccttttatatgaccctaggggtctatttataatactatcacaggttcccccagtagggttttggttttacaggggaatttacataattgcccttacaaaagggacatttacatgggtacacagcgtaattgtgatacaagggccaataatgggcgcctccttgaagctggactcgttatggcgaagtcaccctccttcagcatgcacccttcgccatttagtctttgcccaagattcctttggccttgtgggataccagcgcgatccttcgcccttcgccgcctttcttcacagtctttgccatgggggcttcgcccagatgaacttgacaccttgagctcgaatcctcgctggttgcatggtttcggcaggtctggtcgaagggtttcatgacataccactaacaagccccacacgggcaagggtgagataggagcttcgaccgagaccgtgaaaaccatgcggtatggtatgaggttggcggtatgtcatgagacccttctaccagactagctgaaaccatgcaaccagcgaggattcgagctcaaggcatcaagttcatctgggcaaagcacccactgcgaagtctgttaagcaaaaggcagcgaagggtgaaggatcgcgctggtatcccacaaggccaaaggcatcttgggcgaagactaaatggcgaagggtgcatgccgaaggagggtgacttcgccataacgagtccagcttaaaggaggcccaaggggccatcccagccgctcaagcccgttggcccttgggccaacattcgccaattggcccattataggcccatgtatcacaattacgctgtgtacctatgcaaatgtcccttttgtaagggcaaccatgtaaattctcctgtaaaacctaaaccctaatgggggaacctatgataggatcataaatagacccctagggccatgtaaaagggggatcccaagaaaaattccaaaattaatacacttcactgttcccaacaactgttgggtaaccacatccttcgacgtacgcagttgtcgcttcgacaacagctggcgccgaccgtggggatctctgagcgaaaccactgagagcgaatgccacagaagaaggttgcaaaggagaaggttgctaagcgaaaggagagtgaagcaggaggggaaatggccgtcgaagagggagcagagccttcggcgcccgtcgtcgaagctggtgcagcaccatcggcttcggcacctgcgccgcaaccaccaccttcggctcctgccgcttggacggggcaggcgccgaacacggttgatgcggcataggcagctgcggcggcgagggcgctctagaccagggcggagatcctttcgacaagccaactggtggcgccccaagccgcttcgccgcaaccggctacgacttcgaccacgctcgccgctgcacaagtcaaccccaaccttgaggcacaagccgaagcagacatggaggccatgcgccagaaaatgacgcaacttcaagacatgcttcgccaaatgcaagagcagcagcaggcatacgaagcagcaaggcaagccaaggtcgcttcggccccaattctccagtattcagcgggctacattccaccccaagtctacccgcaagcaccgattcaggcccttccgccacaagtcatgcaagcgccagcgtacttcgccgggtagccttcggccgcaacagtacacccgacccctcgtgtatagccacaagttcagccagtcgctgcccaagtacgccccccaccacctggtcaaatgtcacaagcaatggcggagggggcttcggccttgcaggcgcagcttcaagctttccttcagtaactcagccaaccccacaacacttcaggtacaaccccttcggcccaaccggaggggcaaacaagtcagggtgcacccagttggctactgtcgaaccagcctagtccgggggcttcgccatggagtcaaggaccacagttcaacctcagcaatgccattcaagcaccaaccactcgaccacaggtaacgacgctaggctgcggaacaaatcaagcgcagaaccaggtcgctatggcatggacccagcctccgttcgacccatccatggtggcacaccaagtgccaccgttcggagctgggcaaccgaatactgtggtccaacctcatgcgctagtcatgacttcgcccttcgccacgccatatccacaaccaaacgggccttcgcagcaaggtaccgtgagcaaggcggggggcgaaaaggggctaccattgagtgggggaatcaaaatttgtccaatctcaccccagttcaagttcccacccgttctgcggtactcgggcgaaacggacccaaaagagtttctgtccatctacgagtctgcaatcgaagccgctcacggagacgagaacaccaaggcaaaggtaatccatctcgctctagatggcatcgcccgttcttggtactacaatttacaagctaatagcatttactcatgggagcaattgcgcgatgtctttgtccttaactttcgaggcacctatgaggagtcgaagacgcagcaacatctactcggcattcgccagaggctgagggatcgataagggagtgcatgcgttgcttctcgcaatcccgatgccaagttcaggacataaccgaggtgtccgtcatcaacgccgcttcggcggggctgcttgaaggcaaactcacaagaaaaatctccaacaggagccgtagacactcgagcacctgcttcacatcattgacgggtacgcaagggacgaagaggattccaagcgacggcaagcaatccaagccgagtacgataagccttcatcgccgctgctcaagcccaagtacaagcacaagtcgccgaaccggctcctctcgccattcaccaacctcagccagcgaaccaaggacaaccgccaaggccaagtcaagctcccatgacttggaggaaattcagaaccgaccgcgcgggcaaggccgtgaaggctgtcgaagaagttcaagccctccgcatggagttcgatggccaacaagcaggcagccatcaacagcccattcgcaagaaggtcagaaaatacctctactgcgccttccatggacgctcttcgcacaccaccgagcaatgccgaaacattcggcagcgtggcagcgcacaagatccaaggccacagcaaggagcagctgtcgaagcacctcgcgaagctgctcaagaacaagcaccctcggccgaatagcgccaagatgtgcaacgcaaagtaatccaagtgattacaagggccgatctaccagatcaaccgtcaaaacggcagaagaagatgcagctgcgaatggtgcacaacatcacttcgacaggcgaaggggctccgcggtatttgaaccagcagatctctttcgggccggacgatgccgaaggagtgctgttcccacatcaagaccccctgataatcttggccgagatagttggcttcgaagtccggcgaattttggtcgacggaggaagttcagccgatgtcataatcgccgaagcatatgccaggatggggttgccaaccctagccctcacccaagcaccaacctcgcttcaaggtttcggcggcgaagcagttcaagtcctgggccaagtacaactggcggtggctttcggcacaagcgacaacaggcgcgaagagcaaatactcttcgacgtcgtcgacatcccatacaactacaacaccatcttcggccgcgcaaccttgaacaagttcaaagccatctcccaccacaactatctcaagctcaagatgcctggtctggcaggcgtgatcatggtcaaggggctccaaccttcggctacatcaaagggcgatttggccgcaatcaacagagcagtgcacaatgttgaggccgaaccgcatgtccgggcaaagcacattccgaagcccgcctcccacggcaaggtgatcaaggtgcaggtcgacgatgccgatcccacaagatttgtttcgcttagaggcaacatgggcgaaaaggaagctgagagcatcctagaggtgctcaagaaaaacattgtcatcttcacctagggccccaacgaagtgggaggtgtttcgacagacctcatcatacatcatctggcggtcaaaccggatgccaagccaaggaaaaagaagctgcgcaagatgtccgctgatctccaagaggcagcaaaagccgaagtgtagaagttgctcaaagccgggttgatccaagagatcgaccatcccaagtggttggcgaatccggtactggtgcggaagtcgaacggcaaatggcgcatgtgtgtcgatttcacagacctcaacaaggcatgtccgaaagacgacttcctcctaccgcggatcgaccagctcgtggatttgacagctggctgtgaacttacgagctttttggatgcgtactccggctatcaccagatccacatgaatccagctgacatccccaagacagccttcatcacgccgttcggtactttttgccacctcaggatgcctttcggcctaaggaacgccggagcaaccttcgccagcctggtatacaaggtcctctacaagcagctggggcgaaatgtggagacctatgtcgacgatattgtcgtagaaagccacaaggctttcgaccatgcgtccgacatacaggaaaccttcgacaacatacgctcggcgggtatgttcgcgcgggcaaggttttgggttttcttatttctgaaaggggtatcgaggcaaaccccgagaaaatcgatgccattcagcaaatgaagcccccgtcgagcgtacgcgaagtacaaaagctcgcaggccgaattgcggcgctcagtcaattcctctcaaaggcagccgaatgaggtttgcccttcttcaagaccctccggggcgcgggaaagtttagctggacacctgaatgccaagcaccgttcgacgagctgaagcaatatatgcaaagcccacccgctttggtcagcccagcaccgggaagtgaactgctgctctgtctagcagcttcgccggtggcagtcagtgcagccctcgtccaagagagagtcaggccagaaacccgtgtatttcgtctccaaagctttgcaaggggcgaaattaagatacattgaaatggaaaatcttgcttacgccctagtgatggcttcgagcaagcttaaacactactttcaggcccacaaagtcactgtgccatcacagtatactttggccgaagtgctccggggcaaggaaattactggccggctcaacaagtgggtggcggaattatctcccttcgacctgcattttgtcgcccgcactgccatcaagtcccaagtcctagcagccttcgtggccaaatggacaccggcgttcgcctccgaaaccgagcccatcgaacaaccttgggtaatgtactctgacagctcgtggtcacacaagggggcgggcgccgtggcggtgctcacttcaccagggggcatgctgattcggtatgctgcaagactgcagttcgacacaaccaacaacacggcagagtacaaagctgtactgttgggcctaagaaaggcgaaagcattgggggttcggcgcttgctcatccgaacagactccaaacgggtggcaagccttcttgacaaatcttttgaggcaaaagaagaaggaatgaagaggtatctggaggctattcgatctatggaaaagtgtttcgccggcataacggtcgaacacctacctagaggccagaatgaagaagccgacgccctggcaaaatccgctgccagtggaggcccacattcaccaggcatcctcttcgaagtcttgtacgcaccaagtgtgcccacagagagcctggacatcatggcagtcgaccaggcagaactgggcgaagacccagaggactggcgaacaccgttcgtgaagtacctcaagaacggttggctcccagaggacgaagcagaagcgaagcgcctacagctcaaagccgcacgatacaagcttgtctctgggtagctgtatcgctccggtgtgctccaacccttgcttcgctacatctccttcgccgaaggtgaggatatggcaaaagaaatacaccaggggctgtgcggtgcgcatcaggcagcaagaacggtcgcttccaaagtgtttcgtcagggtgtgtattggcccaccgtgctgaaagtttgtgttgagcaagtcaagaagtgcgaaagctgtcagcagcatggctgaagccaaacagcaccccagtacgaacaacaacctatcgcaccagtctggcctttcgccagatggaggctagatatcattggccctttccccgtggcacgaaatgggtacaagtttgcagttgtagccactgaatacttctcccgttggatcgaggccgaaccactcagcgcgatcacttcggcagcagtacagaagtttgtgtggaagaacattgtttgccgtttcggagtgccaaaagaattcgtcactgacaacggcaagcaattcgattctgacaaattcggagaaatgtgcgaatggctaaacctagaaatcaagttcgcttcggtcacgcacccacagtgaaatggggcggccgaacgttcgaatggtaagatgcttgaagcgctcaggaaaaggcttgagggggagctgttgtcgaagcgacaactacgtacgtcgaaggacgtggttacccaacagttgttgggtacagtgaagtgtattaattttggaatttttcttgggatccccccttttacatggccctaggggtctatttatgatcttatcacaggttcccccattagggtttaggttttacagggaaatttacatggttacccttacgaaagggatatttacatgggtacacagcgtaattgtgatacatgggcctataatgggccaattggcgaacattggcccaagggccaatgggcttgagcggctgggatggcccctagggcctccttgaagctggactcgttatggagaagtcaccctccttcggcatgcacccttcgccatttagttttcgcccaagatgcctttggccttgtgggataccagcgcgatccttcgcccttcgccgcttttgcttcacagtcttcgccatgggggcttcgcccagatgaacttgatgccctgagcttgaatccttgctggttgcatggttttggcaggactggtcgaagggtctcatgacataccgccaacaagcccctcacgggcaagggtgagataagagcttcggccgagaccgtgcaaaccatgtggtatggtatgacgcgcccccttttcgaccgacgctcctgccgaaacctatactggagtcctgcggagaatgtgtgcactatgtgtacatgtgtttctagctttcgccttttgcaaacggcgaaacagtctttatttttctctgggccgaaatgaacagtgatgggcttcccttcgtgggcttatcattgtgtggcccgatcaatgagaatttaccgtttcgcataccct

SEQ ID NO: 5668 - DNA, 17501 bp, Oryza sativa
ttcttccgagtgattactccattgaactttgcagaaacggataactcgattcctggttcttctctcatttgtttccaagatacggattggtttctcaacataagtcaaatcctcttggacttctatctgctcaatattagcttcttcggtaggtatccttaaacatttttttaattgcgacacatggaacacattatggaatcctgccaaagattgaggtaactccaactgataagcaacttctcctcttctactgacaatcttataaggtcccacaaaacgcggtgccaattttcctttggtgtgaaaacgatgaacccctcgaagaggcgtgacacgaagatacacataatctccttcctcaaaactcaaatctctgcggcgattgtcggcataactcttatgacgagactgagccacacgcaatctttcttgaatgattttcaccttttcttctgcttcccttaggatatccgtcccaaaaacctgacgttctcccgtttgatcccacaaaagcggagtgcggcacttccgaccatacagtgcttcgtaaggagccatctgtaaactagcttgataactgttgttgtatgaaaattctgcataaggtagattcttatcccaacttccaccgaaatctaaagcacaagctctcaacatgtcttccaaaatctgattcaccctttcggtttgtccgtctgtctgcggatgataagcagtgctaaagttcagcttagaacccatctcttcctgaagtttcttccaaaaatttgaagtaaactaactgcctcgatcagacactatcttcttagggacgccatgcaaacacacaatccttgccatatacaattccgccaagcgacttccggaataggttgtctttaccggaatgaaatgagctacttttgtaagtctgtcgactatcacccaaaagaatcatggcctgatgacgttctgggtaaaccagtaataaaatccatacctatttcttcccatttccattcaggaatcttcaaaggctgcaacaaaccggcgggtttctgatgttctgccttgactcgctgacaaacatcacatactgctacatattctgcgatttcacgcttcatacttgcccaccaaaatctttccttgagatcctggtacatcttagtactaccagggtgaatggagtataaagtatcatgagcttctttcagaactgcatcttttagatctttgttgtcggggacacagattctctcacccaaccatacagttccttgctcatcctccaagaaaccaatagcttttcctcttctcatattcttcttgatctcttgaatatcaggatcattaatttgggcttctctaacttgatcaattagagtgggcttcgcttctaaggctgcaacgaaacctctactgacaatttccaaatttaatctttcaaattccttgcataattccaatggcaactgtcgaccttctgtagcattgcaatagcctttgctgctaagagcgtctgctacaacattagcctttcccggatgataatgaattcccatgtcataatccttaattaattccaaccatctccgttgtctcatgttcagatccggctgagtaaagatatactttaaactcttgtgatcggtgtacacttctgtacgagtaccgaaaaggtaatgacgccaaatcttcaatgcatgaacgacggcagctaactcaatatcatgagtagggtagttcttctcatgcggacgtaactgtcgagaggcataggcaaccaccttcccatcttgcatcagaacacaacctaacccaagtttggacgcatcgcaatacacttgaaaacccttctttggatcaggcaaaatcaaaataggagctgatattaagcgacttttcaactcttgaaaactccgctcacattcttccgaccacttgtactttacatctttctgaagcagtcgtgtcatgggcttagcaatcttggaaaaattctctataaacctccggtaatatcctgcgagacctaggaaactgcgaatctctgaaactgtctttggttgtttccagttggttacggattccacattactaggatcgacggcaactcctcctgctgagataacgtgaccaaggaacttcacttcagtcaaccaaaattcacacttgctaaacttagcatacaattgatgttctcgtagcttctctagtgcaaggcgaagatgttcctcatgctcttctttggttcgagaatagataagaatgtcatcaataaagaccaccacaaacttgtctaagtattccataaacaccttattcatcaagttcatgaagaaagcaggggcattggtaagtccaaaagacataacagtacattcgaacaacccatacctagtggtaaaagctgtcttaggtatatcttcctctttgattctcaactggtgataccctgatcgaagatctatcttggagaatacagtggcacctttaagctgatcaaacaaatcatcaattctgggtagcggatacttattcttgatagtcacatcatttagtgcacgatagtccacacacatcctttgggtatggtctttcttttccacaaaaataactggagctccccaaggtgatgaactcggtctgatgtatcctttctgtagcaaatcatctacttgcctcttaacttctgccaactcattggctgccattcgataaggtctcttatggatcggagttgttccaggtaccaaatctattctgaactctatatcccttttaggcggcataccaggtaaatcatctgggaacacatcgggatactcccggactataggaatctcttccaaagttatctggttcagtcttgaccttaaagactcagatgacaatgcatgaacagttacaactcgaccatcatagctggtgagagttacttttttgttggcacagtctatcacacctttatgtctggctaaccagtccatccctaggatgacatctaggtctttggattctaacaagataagattggccagaaatggtactccttgaatttctattctgacagaggggctacgttgcaaagagagtgcttgattacttggggtactaaccatcaaaggacgtctaagatcttctacttccatcccatgatttcccgcaaaactcatagataggaatgaatgtgtagcaccagaatcgaaaagtactgttgcaggaactgagttaacaaggaacgtacccaaaatcacatctggagcatcttgagcttctgcagcagcgacatgatttacacgagccttggatgctggtacagcagagttattctggacagggacaaccttcacgcgacggggcttcggacacttgtcagcataatgtcctgggtctccacagttgaaacacaccacgggcttgttgccttgctccctcttggcaggttgttgctgtgctggagctgcaacaggacgtggagcttgattacggatgttgttgccagcattgttgttgaagaactgacgctgcggacgaacaacagacgaagaacctccctgtggcatgggctggggtcctaaagtaagacgcggcttctgattatttccctgttgtgtcttgaattgagcaatccgacgtttcttctgctccatgcgattgtacttgtcctcctgacgaatagccttatccactaatttctggaaatcaggataatctccaaccatgagtgggtaagaaagctcatcattaagtcctcccaaaaacttctcctggcgctcttcatcattgcgcacatcttccggagcataacgagcaagacgattgaactcgtgcagatactccgtaacagagcgagatccctgggtaagcgacctgaactccttcttcttgagagacactactcctgatggtatatgcgtcttccggaaagcagcggtgaattcaagccaagtgataggttcagcagtaatcctattcaggcggaagtgatcccaccattcagaggcagggccatgcaactgatgtgatgcaaatgagaccttctcctgatcagtacactgaagcaaatccaacttcttctctatggcatgcagccaatcactagcttcaacaggattagtggtactagagaaaacaggcggcctcacacgaagaaattctgctaacttgttctgtggaggtgcatgattatttccttggttttgctgattctgaaattgctgcatcatcatgttcataagctgtgtctgttgagcaagaacttgagcaagagtgggattctctccattgttgttgttattggggttgttgggaccattcccattgctgcgagtgttcaccatctggcatggacagggcacaagaagagaaaacgggggaaactacttaggacagagaattactttaacttttattgatcttaactgagtttcattattacaaactaaagactctcacaccactaaactcaccaacttcctaacactcaaaagcaaacaaacgcatgcacttacatcccaccactgatgtaaatcacatgcgagccacacacaagcaaactttaagcaagcaaactaacacaacgatctaagacaacgacttaacaagtcactctagttcttccaagcatcggaggtcaattgaaggctcgttcggctcgtcttcatcatcttgggttgctacccactcaatcttggaattgttgcgcttggattcttcttcttcatcactacttatgatgatgaccggaggatccgcttgagctggggcaacttctttctccaccacacgaacctttggcgccagttgatagcgagggacaaatagagctctcttccttgcggtaagacgaatcctggccttctgcggcggtgcttctcccttcaatgcggctaattccttctctaaacgatccaccttgtcttctaacttgcaaatcttaccacgattccggtcttcacgatcttgagctgctaacacagtctccgcacgactttcatccatagcccacagcatctcaaccaaatgcttcgtggtagcatcattctcaattccttcagtctcaaggtaactgccacggtcacttccctggggttggcgaggatggtagcgatactcagtgtcggccaattgatcactgtagcgatcacggagctctcctatggcgatccttgccacctcctgacatgcatggatgtagtttcttcctccagcttcaaacatcactgaggggatatcttcactattactgttcaaggtgactttgactcggcacttctcttcatgacgatcatgaggaatctgggcataaaaaggggcagtcccaaatcgaatgacaaaggacatcgtacgcaactcctggacaaaaccctcaacaccaaacaggtactcaggcttgtaacgcggcatgtaaagacaagtgaaaggagagagttaagacctttatccaattaatagcacaagtttttggattaatttgaataaagttagaaaatcagagtaaaaaggtaagcaaataaagtaaaccaagctttgcgagataagttaaaacagttggaaacgaggtcacaaattttgtaattttgaataactggtttctaaagaaatgaaagaaaattataaaatcaacatgctaaatttattttattgcagcaagattaaataaaacagtattataaaacttttgctggtaaatgagccattagtacagtaatagatgtatagtactaataacactggaataaatttttaatgagaaccattaaaagagattatgaagtgcatgtgccattagtttggtttaattaaaagagaaagggaggagaacagttctacttttccaatatttttagagggcttctatggataaccatttggcataacctagggtcaaagaggctctgataccaacttgtcacgcccggaatttctatccaaaattccaaacgcttacatgtgtgtgaaccctcgtccaggaatcagccgaggcacacaataacaaattgataatagagtacaaatattactctaattaataagcgaataaaatgtcattacagaggtagatagtccctctcaatcaataaaaatctaagcagcggaaaaaaaataaacggcgcagacggctccactccacaggcagcttgaccaaggctacacctaatcctccacaccatcagcctcattgtagaactcttcctctgatgaatgattgcaaggtgagtatatgacatactcagcaagccacgcagcaaatatgcaagttcacaggataacaaaggatggcataatagggttgcatttgcaaaagcagcatttagcaaacatttgagaatttgataaaacagttaagtaattaaacaatattaatccaacgctatacaacataccctgttgtataggcccaaccattctgaacaaccaccccggctgcacagttctatctccaaaccaggaatgtaccattccaaaccaggagctaatcaaattattaccagtttaagcatcttttacaatgatgagaggtgtgagactaatcacgaaagacattgttagacccgcccataaccgcgggcacggctattcgaatagttttactctgatcagaggtgtaccactgtacccacaagacacaaccccacatcatgtcaccatgtgcctcaataccaccacggtatctcggaaaggagttgtgacaatacccctcgcataacacaatccactgcagcgcaccttcctggatcataatcacccccttataaacaaggcatggactccccagcgacccccgtgggcttatctccgccacttctcagtctggtgctccgcaatgaaccatgctatacaaaagataaagccgttgcccatgctggcttgtggttggcacgataaatgtttcacaaccgaaactcgtgaaccggtccttaattgtcatgagcacgaccatcaaaaccatgtgctcacaacccaccattaccaggttttagttggcacattaattaattaactaatcacgattgatcatcgtgaactatcaataggccatcatgaaataatagtgagtcattagttatcccataagtgtgctaatgtttctaagcagggctaagcaattatatctaatatctagttgaaccaatataaataaagctcaactagtcaaattataataacccaaggtatcaaggaattaagtaatcaagaacaaaagggctataacaaacaataggttaattccacccaatgacattcgaaaataaatgcaatagttgaaaagaaacaatagctttaaataggatcaacatgctcaaagggttgtttgggatctgtgtgacttgccttgctggccttggaactcttcaaactcttcttctgcgaaaacggactctccggaaacgacggaatctaagcagaaaagagcaaaatcaccaaaacagcacataaacaagcatgaacagtacatgtggatatttttagtgtgtagatctcaattttagaaaaatttagagacttgaaccaactaaatcggagctaagatgaattagttatgaatttttaaagattaaatcggattaaaacacttatatcggtttaaattgaattatgacgcaataatgaattatttttgaaaaggaaaagagaattattgcgtcagcgggctagggtttcggtggaccgggcgcacgggcggcggttcacgcgaacggacggccgagatctaaccgatccaagatggacggccgagatcgatcgggtccacggcggttcacggcggacgaccccgatggcgtcagcgatgacgtcaccgacggcggcggcggctcggcggagcggacggctcgggcggcgcacgctcgccggcgaacggcggcgcgagaacgcaaacggaaggcaccgggacgaagcgggcggcacggcgaactcaccgacgaccaaaagagcgacggagaagcaacggacggcgccggcgacgaggaggaaacggcggggctcttcggatcgacgacggcgacgatgctccggtggtcttcggcggcggcgaaggggcggacgaggacggcgatgcgacggcgaccacgacggcggccttcccgagcgatggcgacggctggaacgacggcggcgcacggctggagcggcggcggcgacggcaaagctagggcgcacggcgctaggtctcttccggcgacgagaggcgaaggcgagggtggcggcgagaagagaagagcacggggatccttttaaaggggctcggaggcgacggcggaggcccacggcgacggcaacggcgaaggaaacctcggcttggagagaaagaaaaccgatccgaatcgaactcatttccaaagctttccaaagcgatttaaccgatgattccaaaggagaaaaggtagaggagatcccggagattgtttcccctcaaacaattcggccggagaaggaaaggaacggccggatttggaaaggaacggcggcggcgcgaaactagggtttcgggcggcggcggccggaggttgacgacgggtccgacaggtgggccccacctgtcagcgggcggacgcgcgcgcgcggcggcggactgggccggctgggccgaagagagagagaagagaggttttgggccgactttcggcccaaagccaaaagaagacttttaaaacctttttcaatttagattatttcttaaatgcaattccatttattaaaatacttccttagctcaaataaatcccagaaaaatctaggaattatagaattaagcaaagtatttaatgaaattttatctggccactttttatattggcatttattaactaaaattagattttcttttcaagacttttaaaattatttctaaaaattccaattaaacaacaatttatatattttgaattttcagggtgtgacaggctcttcgccctagtccgccgcctctgccttcgccatgtgctcaagtagacgcgccttggcagtagatcggccgtccttttgctagaactgtttgcgctaggcacgaagtgcgggcaaaacgtcctgagaactgacctcccagtcccccttcgcaaaattggggaactcgacgatgtgctcgcacctgaactgctgcagcaggcccatggtgaaggccgccgacacacgcgcacaataatcgccgtacgcagtggcgcaatctgagatcgcaccgccggcctgttgagtccactccaagaagtcgaagacggaagcatctttgccagggagtcctcgtactctcgcccccatgtcagtaagggcaaggcgaagcgtatggcacacggtcttggcggactcggtggctttcgccatctcctgcgcgaaccgttgcgcctctttctcagcgttcgcctacgccttgagggcctcctggcgaagagcctccatctttggctcagtgaggttgtagtactcagtcaaggcggcagaaaaatcttgttcttttttgagctcggccttgagacgctcaatcttggtcttcgcctcgctccccttctccagctcagcttggagccgctcattttttgccttcgtctctttgagggtgttggcgaggctttccatttccaggctcttgcggcccagttcatcgtccttggctcgaagacggctcttgaagccgtcaagatgagcacgcatggttctctccgtcgaacaatgggccgcgagaatctagttcaagaaaaaaggggggccgaaaagggtgatcgttaatataagttgtcgaaaaatgactattaaaaggaaaagaaaaacgaacgacatacccggactgccaagctcttgatggtagaatagccttcgtcgaacccgttcagctcggtgaacaggctcgggctgccaaccagagagacgagattacttaccccctcgacgaaggggacaaggtctgcccgagtatcgaaatcagcaggggcaaagtggggcaccgctagagagtactctgaagcagacgtttcggcggcctttttcttccccttctcgatggcgagcggcgaagccaccagtttgcgcacagggctgccgtagagactggccgcggccttcacaacccgatcagcagaagctgaagtcccgacagcaacgctaccacccgctccgcccgcgtcgaccgcagcaccaggaatggtcgagatacctaggctccgaccagcaggcgaagtaagggtctcgtccaaagactcgtcgtcgctgaaaacgcgagcgacatcgacgagccctttcttcttggaggttttcttgaccaaacaccccttcgccaccttggccgctgcgatcgaaaccagcgccttcgcccccttcaaatcctttcggcggtggggggagctgttcgactctaccccggttttgacatggtcggggcttggagttggggtgtagccgcgcatctcggtgcggttgttggtggcctcgtccgcggccttttcggccgtagcctctgtctccccctcatcctccccctcctcttcgccgtcatgatcttcgacagtgtcttcgtcgtgggcatcggagtcggtggaggtaggggcccttcgcttccgaggagccaacttcacttgcctgtgtgtccgtttcctggatgtcccctcatcgccatcggccttgaagggcttcgctcggggaggaagatcaccgtcatacacccgattcgctcggccggccgcctgccgcataagcagctggccgaactcagcgatcaacacatcaccgatcatcttccgggcttcgatgtcggcctaagcaagggttaacactgcaaaaacgaaacgtgttatcatatcagatgccgaacagggaaaaaggcaaagcacaggaatgtatggggcataccgttcgccccctccggcatgaccagcttcggcaagccatcgacctcctcgtcttggttcacctcgacttgccatgattgggagagggggaagattcgaagcatacaaaattcttccaccaggtcacggcagctaaggcgggagcagaccttgcgaagcagggcgaatcgggcctccatagcgccatcgacggtgaccttgggcttcctgttcggcgcgatcgccctgcgccgccatcggagggctttcgcctcctcaaacccggcctcaaaggggatgctgtggtagaaccacttcaacatccaatggtgatcccatttaggcatagcggcattgaccttccaaagatcggagcgctcggggcgaacattgaagttcacgctcccgaacgccgtcttctttgttcctgccggagtgaccaccgtctttgaattcacggtggcataaaaaatggtgtcgaagagctcggtgctcggctcgaacccagcggtccggcacgcccagtcgaagatggcgatctggatgtttgccattgggctcaattgggggagctccacctgaaaaaggcgaaggatctccggcaacaacacgttgcccagaaattgaaggcccgcctcgaacaacacggcgaagaccaccttccttttgtcgccaggcttcggcaccactaccttccccggggcgaaggcctgattctctgccaatgcgccggaggtgaccagctttgccaactcgtcgtcgtccacaagcgaagcccctagaaaggcggtggtgtcatcatcgattctgccgggatcagggcctgtcgcggaggctgggttcggcttgcgaggagccatggcaaaaagtgtgtgcggtggcgaaaagaggaacaggcgaaaggtctagtattcaagagcgccgcgaagcaagagggcggagaaagagagagctcgcggtgaaaatgacgggggcggtagtgaaaaagggggtatatataacccacccagacgccggttcgccttcccacccaattatgagccgccacgtgtcacgagggtatgcgaaacggtaaattctcattgatcgggccacacaatgataagcccacgaagggaagcccatcactgttcatttcggcccagagaaaaataaagacggcttcgccgtttgcaaaaggcgaaagctagaaacacatgtacacatagtgcacacattctccgcaggactccagtataggtttcggcaggagcgtcggtcgaaaagggggcgcgtcataccataccacatggtttgcacggtctcggccgaagctcttatctcacccttgcccgtgaggggcttgttggcggtatgtcatgagacccttcgaccagtcctgccaaaaccatgcaaccagcaaggattcaagctcagggcatcaagttcatctgggcgaagcccccatggcgaagactgtgaagcaaaagcggcgaagggcgaaggatcgcgctggtatcccacaaggccaaaggcatcttgggcgaaaactaaatggcgaagggtgcatgccgaaggagggtgacttctccataacgagtccagcttcaaggaggccctaggggccatcccagccgctcaagcccattggcccttgggccaatgttcgccaattggcccattataggcccatgtatcacaattacgctgtgtacccatgtaaatatccctttcgtaagggtaaccatgtaaatttccctgtaaaacctaaaccctaatgggggaacctgtgataagatcataaatagacccctagggccatgtaaaaggggggatcccaagaaaaattccaaaattaatacacttcactgtacccaacaactgttgggtaaccacgtccttcgacgtacgtagttgtcgcttcgacaacagctccccctcaagccttttcctgagcgcttcaagcatcttaccattcgaacgttcggccgccccatttcactgtgggtgcgtgaccgaagcgaacttgatttctaggtttagccattcgcacatttctccgaatttgtcagaatcgaattgcttgccgttgtcagtgacgaattcttttggcactccgaaacggcaaacaatgttcttccacacaaacttctgtactgctgccgaagtgatcgcgctgagtggttcggcctcgatccaacgggagaagtattcagtggctacaactgcaaacttgtacccatttcgtgccacggggaaagggccaatgatatctagcctccatctggcgaaaggccagactggtgcgataggttgttgttcgtactggggtgctgtttggcttcagccatgctgctgacagctttcgcacttcttgacttgctcaacacaaactttcagcacggtgggccaatacacaccctgacgaaacactttggaagcgaccgttcttgctgcctgatgcgcaccgcacagcccctggtgtatttcttttgccatatcctcaccttcggcgaaggagatgtagcgaagaaagggttggagcacaccggagcgatacagctacccagagacaagcttgtatcgtgcggctttgagctgtaggcgcttcgcttctgcttcgtcctctgggagccaaccgttcttgaggtacttcacgaacggtgttcgccagtcctctgggtcttcgcccagttctgcctggtcgactgccatgatgtccaggctctctgtgggcacacttggtgcgtacaagacttcgaagaggatgcctggtgaatgtgggcctccactggcagcggattttgccagggcgtcggcttcttcattctggcctctaggtaggtgttcgaccgttatgccggcgaaacacttttccatagatcgaatagcctccagatacctcttcattccttcttcttttgcctcaaaagatttgtcaagaaggcttgccacccgtttggagtctgttcggatgagcaagcgccgaacccccaatgctttcgcctttcttaggcccaacagtacagctttgtactctgccgtgttgttggttgtgtcgaactgcagtcttgcagcataccgaatcagcatgccccctggtgaagtgagcaccgccacggcgcccgcccccttgtgtgaccacgagctgtcggagtacattacccaaggttgttcgacgggctcggtttcggaggcgaacgccggtgtccatttggccacgaagtcagctaggacttgggacttgatggcagtgcgggcgacaaaatgcaggtcgaagggagataattccgccacccacttgctaagccagccagtaatttccttgccccggagcacttcgcccaaaggatactgtgatggcacagtgactttgtgggcctgaaagtagtgtttaagcttgcgcgaagccatcactagggcgtaagtaaacttttccatttcaatgtatcttaacttcgccccttgcaaagcttcggagatgaaatacacgggtttctggcctgactctgtctcttggacgagggctgcactgactgccaccggcgaagctgctagatagagcagcagttcgcttcccagtgctgggctgaccaaagtgggtgggctttgcggatattgctttacctcgtcgaacgctgcttggcattcgggtgtccagctaaactttcccgcgccccggagggtcttgaagaagggcaaacctctttcggctgcctttgagaggaatcgactgagcgccgcaatttggcctgcgagcttttgtacttcgcgtacgctcgatgggggcttcatttgctgaatggcatcgattttctcggggttcgcctcgatacccctttcagaaacaagaaaacccaacaacttacccgcgcgaacaccaaaaacacacttctcagggtttagtttcatacctgccacgcgtaagttgtcgaaggtttcctgtaagtcggacacatggtcgaaagccttgcggctttttacgacgatatcgtcgacataggcctccacatttcgccccagctgcttgtagaggaccttgtacaccagcctggcgaaggttgctccggcattccttaggccgaaaggcatcctgaggtggcaaaaagtaccgaacggcgtgatgaaggctgtcttcgggatgtgagctggattcatgtggatctggtgatagccggagtacgcatccaaaaagctcataagttcacagccagctgtcgaatccacgagctggtcgatccgcggtagggggaagtcgtctttcggacacgccttattgaggtccgtgaaatcgacacacatgcgccatttgccgttcgacttccgcaccagtaccggattcgccaaccactcgggatggtcgatctcttggatcaccccggttttgagcaacttctgcacttcggcttttgcggcctcttggcgatcaacggacatcttgcgcagcttctgtttccttggcttggcatccggtttgaccgccagataatgcatgatgaggtctgctgaaacacctcccacttcgtcggggccccaggcaaagatgtcaatgtttttcttgagcacctccaggatgttctcagcttccctttcgcccatgtcgcctccaagcgaaacaaatcttgtgggatcggcatcgtcgacctgcaccctgatcaccttgccgtggggggcgggcttcggcatgtgctttgctcggtcatgcggttcggcctcaacattgtgcactgctatgttgattgcggccaaatcgccctttgatgtagtcgaaggttggagccccttgaccatgatcacgcttgccggaccaggcatcttgagcttgagatagttgtggtggaagaagcttcgaacttgttcaaggttgcacggccgaagatggcgttgtagttgtatgggatgttgacaacgtcgaagagtatttgctcttcgtgcctattgtcgcttgtgccgaaagccaccgccagttgtacttggcccaggacttgaactgcttcgccgccgaaacttcgaagcgaggttggtgcttgggtgagagctagggttggcaaccccatcctggcatatgcttcggcgattatgacaacggccgaacttcctccgtcgaccagaattcgccggacttcgaagccagctctctcggccgagattaccagggggtcttcatgtgggaacagcactccttcggcatcgtccggcccgaaagagatctgctggttcaaataccacggagccccttcgcaaaccgaggtgatgttgtgcaccgttcgcaactgcatcttcttctgccgttttgacagttgatctggcggatcggcccttgtaatcacatggattactctgcgctgcacgtcttggtgctattcggccggtggtgcttgttcttgagtagcttcgcgaggttcttcgacagttgttccttgctgtggccttggatcttgtgcgctgccacgctgccgaatgttttggcattgctcggtggtgtgcaaagagcgtccatggaaggcgcagtagaggtcttttctgaccttcctacgaacgggatattgatggctgccagcttgttgggcgtcgaactccttgcggagggcttgaacttcttcgacagccatcacggccttgcctgcgcggtcggttctgaattttctccaagtcatgggagattgacttggccttggcggttgtccttggttcgccggctgagattggcgaatggcgagaggagccggttcggcgacttgtgcttgtacttgggcttgagcagcggcgatgaaggctttatcgtactcggcttggattgcttgccatcgcttgtaatcctcttcgccccttgcgtacccgtcaatgatgcgaagcaggtgctcgagtgtctgtggctcctgttggcgatttttcttgtgagttcgccttcgagcagccccgccgaagcggcgttgatgacgggcgcctcggttatgtcctgaacttgccattgggattacgagaagcgacgtatgtactcccttatcgatccctcggcctctagcgaatgccgagtagatgttgctgcgtcttcgactcctcataggtgcctcgaaagttaaggacaaagacatcacgcaattgctcccatgagtaaatgctattagctggtaaattgaagtaccaagaacgggcgatgccatctagagcgagatggattacctttgccttggtgttctcatcgctatgagcggcttcgattgcggactcgtagatggatagaaactcttttgggtccgtttcgcccgagtaccacggaacagatgggaacttgaactggggtgggattggacgaattttgattcccccactcagcggtagccccttttcgccccccgccttgctcacggtaccttgctgcgaaggcccgtttggctgtggatatgtcgtggcgaagagcgaagtcatggcttgcgtgtgaggttggaccacagtatccggttgcctggctccgaatggtggcgcttggtgtgccgccatggatgggtcgaacggaggctgggtccatgccatagcgacctggttcagcgcttgatttgttccgcagcctggcgtcgttgcctgtggtcgagtggttggtgcttaaatggcgttgctgaggtcgaactgcggtccttgactctatggcgaagctgccggaccaggctggttcgacagtagccaactgggcgcaccctgacttgtgtgcccctccgg

SEQ ID NO: 5669 - DNA, 13210 bp, Oryza sativa
ctctcgttgccggtcgtcgtccgacgtcgtttgtcgttgtggtgagtaccgttgggttcgtctcgtcgtcctctacgtgtacatgccctcctttttcccggccgaccaccctagctccggcgaggtcgccatctgagccggccgccatggatgatgtcagcatgacatcatcatcttctccttttccagttttttctaatagatgaaatcttcggaaaatcataactaaataaccgtagatccgtttcaggtggttcaagttgctaaatttttctaaaatcaagatctacatgttaaaaatatccacatgtactgtttatgcttgtttttgtattgttttgttgatttttattcttttgctttagtttccgacgttctgaaggagagcgtttccgttgaggaaggttcggaagtgtttgcggaagctcaaggcaagtcacacagatcccaaacaaccctttgagcatgttgaacccatttaaagctattattttatttcaactatgcattgttttcgaatgtcatcgggtggtgaacctttccccgttaattaatggccgaagatgatcttattttcctatgggttataatttgattagcatgaaccttatatattggattggttcagctaaatgctatatgtatgtttgcttagctatgcttagaaacattagctaactaaaggggttaattataaactatattatattattcttattaattatggttatatttaatggtagctcacgatggttaatcatgtgatgttaattaattgataattaaaacctggttaaggtgggttgtgagcatatggttttgaaggtcgtgctcatggcaattaaggaccggttcgcgagctactgttgtgaaacatttaccgtgccaaccacaagccagcatgggcaatggctttatcttttgtatagcatggttcattatagtgtgccagactgtgaagtggcgagaagtccacgggggtcgctggggagtccatgccttgtttataagggggtgattatgatccgggaatggtgcactgttttgagttgtgttgtgcaaagggtattgtcacgatttccccctttgcaatgccgtggtggtattttggggcatggcaacatgtgtggaatcgtgtcttgtgggtacagtggtacacctctggccagagtaaaactattcgaatagccgtgcccgcggttatgggcgggttgagcaatgtttttcgtgattagtctcacacctctcacaataattatggatgttataactggtaataatttgcttagctcctggtttggagttagatctgtacagccgagtatggttgttcaggatggttgggcctgagcagcatgggtgtgctgttcagtgttgattaaaatttctgattaattactccactgttttacttctcttaaatgttttgctaaatgctgcttttgcaaatgagcctgtattatgccatcctttggtatccttgtgcacttgcatatttgctgtgtgccttgttgagtatgtcatatgctcattcttgcaataatcatcaaacctcagttgaagaaaaaggatccagaaggagaagacgtttagcttataccccagttgagctgcctgtgggagtggagctgaagccatcgctagaccgttaattccgctgctgttttcttttcttttgtaagtatgtaacgttattattaagatggatttgtatattaaattgtcagtttgtgtacctcggttgattcctggacgaggattttatgcacaaataagttcggaaattactagtgaatttccgggcgtgacaagttggtatcagagccatctcgactgtaggataagccaaatggtcaaaccttaaggacaaatcttccgaaaacataatttgtgaaaatttctcctttcttccttatctagaattctttgcaaattgtttcattgtctactctcctctctcgttcaacttgagtagttctgaaactagttgttgaaactagaagatgttgatgaggtcaacttatggaggccagtaaagtggatcgaggaagaaccgaagtgcaagtggtcaagatggaatgaagtttggatcctatcttagaacctatgccgccaaactgtcctcgaagaatagttagtagggtagaacgtttgttgtttgctttgtgtgtaggtatagttgcattcccatcattggagtagttcattgatgagtgtgtaactatactaggttgcttgcttaatcaacttgaacaatataatggtctacacacatcagatcagtgttaacctggttaaggtcttatctttagtgtaacccctctcctcctatcttctctaatctgcaacagatggtgaacactcgcgccagtggaagtggaaacaataacaatgaagagaacccaacccttgctcaagtgctggctcaacagacccaattgatcaacatgttagtgcaacaaatgcagaaccagcaagggaacaacaatgtcaatcctccgccgccgcagaacaagttagctgattttcttcgtgtgaggccgcctaccttctctagcactaccaacccagtggaagcaggtgattggttgcacgctgttgagaagaagttggaattgctccagtgcacggatcagaagaaagttgttttcgcttcacatcagttgcaaggatctgcttcagaatggtgggatcacatccggatgaacagagcagaaggacaaccaatcacttgggcggagttcactgaggcattcaagaagacacacatacctgcaggtgttgttgctttgaagaaacgtgagtttagggctttgaagcaaaaggatcataccgtggcagagtatcttcatgagttcaatcgtctagctcgctatgctccagaagatgtgcgtactgacgaggaaaggcaggagaagttcttggaaggcttaaaggatgagctgtcagttatgttgatctctcatgactatgaggattttcaggagttggttgacaaagcaattcgactggaagacaagaagaacaggatggacaatcgtaagagaggaaggattgttttccaggaggcacaggatagtagccagaggcagcgtatcaagccactccaaattggtgaatctttttctactggtcaaggacagtcgcaacagttgaacatcggtggtgagatcaaatcagagactaatgaaagcaatgaagttaacatcgagcaagctaatcagccggtgccagttcagcaggatcagtctcaagagaataacagtagtggaagggagcagcaggtatgtttcaactgttacaagccaggtcactttgcaagagagtgtccgaagccgaagcatcagcagccgcaaggtcagatcaacaacattgttgtcacaggagctaatgcagtgccagttgcgtcttcaagagttgcgtcttcaagtgttacagctcagccaccagtttcaaagcagcagtagttttctttaaagccttagaataattatctgagttatggaataataagatagaatgcagtttacctatgcccttttctttctagccgttccgaatctcgggacgagattctttgtaaggggggtagatttgtcacatcctgatttttgtttcaggatttataaattatttaataaattattattagaatttatattaaatgttcattaatttacaaatgaagttaaatgtgggaaataaaatttcctaaatataaagcatggatggatttaatttttattaaattctccatggttaattatactctctggaatattctcggatttttcggagctcaattcctaattttaatcatacaaagagcatttcagtaattacccacatattaaattaatcattaaatggtctgattataatttttttaagtacttttagtgtccaagtattttcaggatttttcttgaaattatttgagcgttggaagtatttttaacaattcaaagatcattttagtgattattttaattgaaaaagttttaaaagccctcccttaagtcgttgggccgaattcggcccaacactccctctctcccgcgcggccgagccggcccaaaaccggcccgagtcggctcaagcctagccgcccgccccctcctctctcaggcgccgacatgtggggcccacatgtcagttgcttctcctacctccggccggccggccatgcctagcccgagccgccgccttgccgcctcaaatccgcacccaatccggccccgtttcttccggatttttgaggggttttgatcctctcgttctcctctatcctttcccctaagaatcggagcaaaccgttgagtattttatccgaatcgaactcgtttttgagtttatctccaaaaccgagtttttgatttcccggatcgatttcttgcgggaggagtccgatctcttcaatccaaggctataaataggaccccctagtcctcctctttcgtttgccccctctcccgtcccctcccgtgacccgtagagccgtcgccgcgtgaaaccatccgccgccgccgccggccgggttgcagccgcgccgagcagccttctccgccgtcgccgccgcttgccgccatcacctttaggtgcgccaagccgtggggaagctcggccgcccgttccccttcgccgccggccaccggagcccctccgccgccggtcaaccgagccgccgccgtcgcccctctcgttgccggtcgtcgtccgacgtcgtttgtcgttgtggtgagtaccgttgggttcgtctcgtcgtcctctacgtgtacatgccctcctttttcccggccgaccaccctagctcctgcgaggtcgccatctgagccggccgccatggatgatgtcagcatgacatcatcatcttctccttttccagttttttctaatagatgaaatcttcggaaaatcataactaaataaccgtagatccgtttcaggtggttcaagttgctaaatttttctaaaatcaagatctacatgttaaaaatatccacatgtactgtttatgcttgtttttgtattgttttgttgatttttattcttttgctttagtttccgacgttctgaaggagagcgtttccgttgaggaaggttcggaagtgtttgcggaagctcaaggcaagtcacacagatcccaaacaaccctttgagcatgttgaacccatttaaagctattattttatttcaactatgcattgttttcgaatgtcatcgggtggtgaacctttccccgttaattaatggccgaagatgatcttattttcctatgggttataatttgattagtatgaaccttatatattggattggttcagctaaatgctatatgtaagtttgcttagctatgcttagaaacattagctaactaaaggggttaattataaactatattatattattcttattaattatggttatatttaatggtagctcacgatggttaatcatgtgatgttaattaattgataattaaaacctggttaaggtgggttgtgagcatatggttttgaaggtcgtgctcatggcaattaaggaccggttcgcgagctactgttgtgaaacatttaccgtgccaaccacaagccagcatgggcaatggctttatcttttgtatagcatggttcattatagtgtgccagactgtgaagtggcgagaagtccacgggggtcactggggagtccatgccttgtttataagggggtgattatgatccgggaatggtgcactgttttgagttgtgttgtgcaaagggtattgtcacgatttccccctttgcaatgccgtggtggtattttggggcatggcaacatgtgtggaatcgtgtcttgtgggtacagtggtacacctctggccagagtaaaactattcgaatagccgtgcccgcggttatgggcgggttgagcaatgtttttcgtgattagtctcacacctctcacaataattatggatgttataactggtaataatttgcttagctcctggtttggagttagatctgtacagccgggtatggttgttcaggatggttgggcctgagcagcatgggtgtgctgttcagtgttgattaaaatttctgattaattactccactgttttacttctcttaaatgttttgctaaatgctgcttttgcaaatgagcctgtattatgccatcctttggtatccttgtgcacttgcatatttgctgtgtgccttgttgagtatgtcatatgctcattcttgcaataatcatcaaacctcagttgaagaaaaaggatccagaaggagaagacgtttggcttataccccagttgagctgcctgtgggagtggagctgaagccatcgctagaccgttaattccgctgctgttttcttttcttttgtaagtatgtaacgttattattaagatggatttgtatattaaattgtcagtttgtgtacctcggttgattcctggacgaggattttatgcacaaataagttcggaaattactagtgaatttccgggcgtgatacttgctgagtacagtgggtagtactcagtcttgctctattttccccaaaccccagagtttgagtatgcgtcagatggtggtttctccgaggagtaggcttcgtccgtgccgtcgaggatgcctgtggagtggtgttctcgctgcagatcaagtcaaggcttagctccagttatctttcgtttttccgctgcatttatgtaagactttgacaatgtttgtaagacgtggatctgtatgtcaactttgtcgtctgtgtaccccggccggtcctggacggggattttaatgcacattctgcttggaattctattcgggaatttctgggcgtgacagctgcccagcgccgtcgttcggccggttggctttgtgccgtgccgtgccccagccgtgccgcccgtggccattggatcagctttgggccgatccgggccgtcagttcccgtggaccggcggtggaccgtctcggtggtcctggtccacggtggaccgacacccttgtcccgctgacgcgttgggcccgcctgtcggcgccgacgccccttgctgatatcagcgaatgccttttcctttgagaaaataattgataattgcatcataattcgataataattgtagaaatcaattaaaatggctcaaaacttctaaaattcatatctaattcattcgaactccgaattgagccattcaacttgcaaaattcatctaaaattgagcactacatgtttgtttactttttatgtactattttcttggtgtttattagagtttttcctcgttttgcgtgccagcgtgtagaatccgtcgtttcagaagtccgcggtcgcgaggaaaagagttcggaagatcaaagtgaagaagcaaggcaagtcacacattcccccttgagcatgttgatcctaatttacaaatgttttaccgtttgcaaataaacatgcatgtcttgctaattacatgggatccgggtattacctaactgcttgcttgtgctatgtttacttgatatctgtcctttgtcaaccttggataataaatcgactaactcatgttacttatgtgacctagcaagaactatatgcttagccatgcttaattaccacgtgttgtggggctatgtcttgtgggtacagttgtacacctctgatcagagtaaaactattcgaatagccgtgtccgcggttatgggcggtcgaccagattcactgtgattagtctcacacttaataaattgacccaatgcactgtagttcaggtgggttggttgggcctgttcaacgtggtgtagcgttgatcagtggagatttaatgttactttaattactcaacagttttactgttttgctcaataaaatgttttacaaccgcctttatgcaaatagccacaaaccgtccttgcgttccccttgcacgtctgcatcgttggtgtggcttgttgagtacggtgggtgaactcagccttgctattattcccccttttcagaagtgtagtgcttctgagctgaagacgaagttagaaaaccaaggctcagacccccagttgagttttacctttggaatggagctgaagccccgctaggatcgcatttttttccgctgctgtcgtttctttttggtgcgagcactaagagcctcttctgtaagtattgtacgctttatttacgtttggaattgtatattacttgtcgttttgtgtaccctggctggtcctgaacagggatttaatacacaaaatagtctagaaatttgggctaaatttctgggcgtgacagtaggtgttcaaccgttatgccggcgaaatactttttcatagatcaaacagcctctagatacctcttcattccttcgtcttttgcctcaaaagatttgtcaacttggcttgccaccagtttggagtctgttcggatgagcaagcgccgaacccccaatgctttcgcctttcttaggcccaacagtacagctttgtattttgccgtgttgttggttgtgtcgaactgcagtcttgcagcataccgaatcggcacgccccctagcgaagtgagcaccaccgcggcgaccgcccccttgtgtgaccacgagccgtcagagtacatacccaaggttattcgatgggctcggtttcgggggcgaacgccggtgtccattcggccacgaaggctgctaggacttgggacttgatggcagtgcgggcgacaaaatgcaggtcgaagggagataattccgccacccacttgttgagccagccagtaatttccttgccccggagcacttcgcccaaagtatactgtgatggcacagtgactttgtgggcctgaaagtagtgtttaagcttgcgcgaagccatcactagggcgtaagtaaacttttccatttcaatgtatcttaacttcgccccttgcaaagcttcggagatgaaatacacgggtttctggcctgactctgtctcttggacgagggctgcactgactgccaccggcgaagctgctagatagagcagcagttcgcttcccagtgctgggctgaccaaagtgggtgggctttgcggatattgctttacctcgtcgaacgctgcttggcattcgggtgtccagctaaactttcccgcgccccggagggtcttgaagaagggcaaacctctttcggctgcctttgagaggaatcgactgagcgccgcaatttggcctgcgagcttttgtacttcgcgtacgctcgatgggggcttcatttgctgaatggcatcgattttctcggggttcgcctcgatacccctttcagaaacaagaaaacccaacaacttacccgcgcgaacaccaaaaacacacttctcagggtttagtttcatacctgccacgcgtaagttgtcgaaggtttcctgtaagtcggacacatggtcgaaagccttgcggctttttacgacgatatcgtcgacataggcctccacatttcgccccagctgcttgtagaggaccttgtacaccagcctggcgaaggttgctccggcattccttaggccgaaaggcatcctgaggtggcaaaaagtaccgaacggcgtgatgaaggctgtcttcgggatgtgagctggattcatgtggatctggtgatagccggagtacgcatccaaaaagctcataagttcacagccagctgtcgaatccacgagctggtcgatccgcggtagggggaagtcgtctttcggacacgccttattgaggtccgtgaaatcgacacacatgcgccatttgccgttcgacttccgcaccagtaccggattcgccaaccactcgggatggtcgatctcttggatcaccccggttttgagcaacttctgcacttcggcttttgcggcctcttggcgatcaacggacatcttgcgcagcttctgtttccttggcttggcatccggtttgaccgccagataatgcatgatgaggtctgctgaaacacctcccacttcgtcggggccccaggcaaagatgtcaatgtttttcttgagcacctccaggatgttctcagcttccctttcgcccatgtcgcctccaagcgaaacaaatcttgtgggatcggcatcgtcgacctgcaccctgatcaccttgccgtggggggcgggcttcggcatgtgctttgctcggtcatgcggttcggcctcaacattgtgcactgctatgttgattgcggccaaatcgccctttgatgtagtcgaaggttggagccccttgaccatgatcacgcttgccggaccaggcatcttgagcttgagatagttgtggtggaagaagcttcgaacttgttcaaggttgcacggccgaagatggcgttgtagttgtatgggatgttgacaacgtcgaagagtatttgctcttcgtgcctattgtcgcttgtgccgaaagccaccgccagttgtacttggcccaggacttgaactgcttcgccgccgaaacttcgaagcgaggttggtgcttgggtgagagctagggttggcaaccccatcctggcatatgcttcggcgattatgacaacggccgaacttcctccgtcgaccagaattcgccggacttcgaagcagctctctcggccgagattaccagggggtcttcatgtgggaacagcactccttcggcatcgtccggcccgaaagagatctgctggttcaaataccacggagccccttcgcaaaccgaggtgatgttgtgcaccgttcgcaactgcatcttcttctgccgttttgacagttgatctggcggatcggcccttgtaatcacatggattactctgcgctgcacgtcttggtgctattcggccggtggtgcttgttcttgagtagcttcgcgaggttcttcgacagttgttccttgctgtggccttggatcttgtgcgctgccacgctgccgaatgttttggcattgctcggtggtgtgcaaagagcgtccatggaaggcgcagtagaggtcttttctgaccttcctacgaacgggatattgatggctgccagcttgttgggcgtcgaactccttgcggagggcttgaacttcttcgacagccatcacggccttgcctgcgcggtcggttctgaattttctccaagtcatgggagattgacttggccttggcggttgtccttggttcgccggctgagattggcgaatggcgagaggagccggttcggcgacttgtgcttgtacttgggcttgagcagcggcgatgaaggctttatcgtactcggcttggattgcttgccatcgcttgtaatcctcttcgccccttgcgtacccgtcaatgatgcgaagcaggtgctcgagtgtctgtggctcctgttggcgatttttcttgtgagttcgccttcgagcagccccgccgaagcggcgttgatgacgggcgcctcggttatgtcctgaacttgccattgggattacgagaagcgacgtatgtactcccttatcgatccctcggcctctagcgaatgccgagtagatgttgctgcgtcttcgactcctcataggtgcctcgaaagttaaggacaaagacatcacgcaattgctcccatgagtaaatgctattagctggtaaattgaagtaccaagaacgggcgatgccatctagagcgagatggattacctttgccttggtgttctcatcgctatgagcggcttcgattgcggactcgtagatggatagaaactcttttgggtccgtttcgcccgagtaccacggaacagatgggaacttgaactggggtgggattggacgaattttgattcccccactcagcggtagccccttttcgccccccgccttgctcacggtaccttgctgcgaaggcccgtttggctgtggatatgtcgtggcgaagagcgaagtcatggcttgcgtgtgaggttggaccacagtatccggttgcctggctccgaatggtggcgcttggtgtgccgccatggatgggtcgaacggaggctgggtccatgccatagcgacctggttcagcgcttgatttgttccgcagcctggcgtcgttgcctgtggtcgagtggttggtgcttaaatggcgttgctgaggtcgaactgcggtccttgactctatggcgaagctgccggaccaggctggttcgacagtagccaactgggcgcaccctgacttgtgtgcccctccggttgggccgaagaggttgtacctgaagtgttgtggggttggctgagttgctgaaggaaagcttgaagctgcgcctgcaaggccgaagccctctcagctattgcttgtgacatttaaccaggtgatgggggcgtgcttgggtagcgaccggctgaacatgtggctgtacacgaggggtcgggtgtactgttgcggccgaaggctgcccggcgaagtacgctggcgcttgcatgacttgtggcagaagagcttaggggtagacttggggtggaatgtagcccgttgaatactagagaattggggccgaagcgaccttggcttgccttgctgcctcgtatgcctactgctgctcttgcatttgacgaagcatgtcttgaagtcgtgtcatgttctggcgcatggcctccatgtctgcttcggcttgtgcctcaaggttggggttgacttgtgcagcggcgagcgcggtcgaagtcgtagccggttacggcgaagcggcttggggcgccaccagttggcttgtcgaaaggatctccgccctggtctggagcgccctcgccgccacagctgcctttgctgcatcaaccgtgttcggcgcctgccccgtcaaagcggcaggagccgaaggtggtggttgcggcataggtgccgaagccgatggtgccacaccagcttcgacgacgggcgccgaaggctctgctccctcttcggcggccatttcccctcctgcttcactgtcacgcccggaatttctatccaaaattccaaacgcttacatgtgtgtgaaccctcgtccaggaatcagccgaggcacacaataacaaattgataatagagtacaattattactctaattaataagcgtataaaatgtcattacagaggtagatagttcctctcaatcaataaagatctaagcagcggaaaataaaataaacggcgcagacggctccactccacaggcagcttgaccaaggctacacctaatcctccactccatcagcctcattgtagaactcttcctctgctgaatgattgcaaggtgagtatatgacatactcagcaagcc

SEQ ID NO: 5670 - DNA, 39360 bp, Oryza sativa
cactaaaatttatttaagcattttaggcttttaggaaatatacaaaaatcctccaagcctcatttgacttttatctttgcacattttaattgttggaggctttcacacgaattttacttattcttttgcacaattttgaggatgaattttagagtcgatttgggacgcgacaaacctaccccccttaaacggaatctcgaccccgagattcggaagaactggcgaagagatcgggatgggctgccttcagctcgtcttcacgctcccaagtagcttctccttcggcgtgattgctccactggaccttgcaaaaacggattactcggttcctggtcctgcgctccatggtgttcaggattttcactggcctctccacgtaggtcaaatcttcgcgaacttcaatttgctctgagtcggcctgctcggatggcactcgaagacatttcttgagttgcgacacatggaacacatcatgcacgttgcccaaggaggcgggcaactccagctggtaggcgacttctccgcgtcgagcagtgatacgaaaaggacccacataccgaggtgcgagcttcccttttgtctgaaacctgtgcacacctcgcaatggcgtgacccgaagatacacaaaatcatccactgcgaattccagatcacggcgtcggttatctgcataacttttctgccgggactgtgccacctttagattatcccgaatgattctgactttagcttcagcttctctcaggatatcagtcccgaacacttggctttctccaacttggtcccacaataacggtgtccggcatttgcgcccgtacaacgcttcataaggtgccatttgtatgctggcttgatagctgttattgtaggagaactcggcataggggagactcttatcccaagtcttcccgaaatctaggacacatgcgcggagcatatcttctaggatctgatttagacgctcggtctgtccatctgtctgcgggtgataggcggtgctgaaattcaatcgagtacccagctcttcttggagcttcttccaaaagtgagaggtgaattggcttcccctatcagatacgattttcttgggaataccatggagactcacgatcctagcgaagtagagctccgctagtttgttccctccataagtggtcttcacaggaataaatcgagccacctttgttagtcgatccacaattacccatatagaatcatatccaccttgggtttttggaagtccggtgatgaaatccatcccaatttcatcccacttccattctggcacttggagaggttggagaagtccggccggtcgttggtgttctgccttgacacgctggcacacatcacatagagccacaaactctgcaatttcccgcttcatgctaacccaccagtatttctccttcaagtctaagtacatcttggtactgcccgggtgaatggaataaggactttcgtgagcttcctgaagtatcagctgtttaagttctctgctatctggaacgcatacccgctttccgttccataaggttccgtgttcatcctctgtgaaaccagcggctttaccctgtttcatattcttgaggagtccatgcatgtccggatcattcttctgagcctcgcggatttgatcgagcaaggtgggcttggcttctaacgcagccaagaatccgcgaccaaccatgcttaggttcagggcttccatctgttgattaagctcgggtggaatgcctcggacgttgagagtgttgcagtggctctttcgacttagagcgtcggcaaccacgttggccttaccaggatgatagtgtattcccacatcataatccttgatgagttctaaccatctcctttgccgaagattcagatccgactgggtgaagatgtatttcaagctcttgtgatcagtatatatttcacagcggttcccaatgagatagtgccgccagatttttagagcatgaaccaccgctgctaactccaagtcatgtgtagggtagttgccttcatgaggtcgtagctgacgtgaggcataggctaccacatgaccgtcctgcatgagcacgcaccccaatccttggcgcgaagcatcacaatacaccatgaaatccttgcgagtatccggcaagattaacactggcgaggaaaccagcttttccttgagagtttgaaacgccttctcgcattgcgggctccacacaaatttctcttcttttttcaacaactgtgtcatgggtcgagcgattttggagaagttctcaatgaatctccggtaatatcctgccaaacccaagaaactgcgaatctgagtgactgtcttgggttgcttccaatcggtgacggcgatcactgtttcggggtccacagcaactcctttagcagatatcacgtgccccaagaatttgacttcggacaaccagaactcacacttgctaagcttggcatacaattgatgttcccgcaactttcccaacaccagacggagatggtgctgatggtcttcctctgattgtgagtatatcagaatgtcatcgatgaaaaccacaacaaacttgtccaagtattccatgaacactttattcattaagttcatgaagaaggcaggagcattggtcaagccgaacgacatcaccgtgaattcatacagtccatatcgcgtagtgaatgcggtcttcggaatatcttcttcacgaatacgtaattggtgatatccggaacgaagatcaatcttggagaatacagtggcacctttaagctggtcgaacagatcatcgatccggggaagagggtacttgtttttgatggtaacttcattgagagctctgtagtcaacgcacatcctcttcgtcttgtctttcttctctacaaaaatcacaggagcaccccatggggaagtactcggacgtatgtaccccttttctttcaactcttccaactgtttctttacttcggctagttcatttgctgccatacggtagggtcgcttgtacagaggagtggttcctggagcaagatctatccggaactcaatctctcgcttgggcggcataccaggtagttcttccggaaacacgtctccgaactctctgactatggggatttctgacagttctatctgatgaagttctgaacttctggcagaggttgggggtgcaaagaaaacaaccggttgttctggccctcggtacagagtgacagtgcgcctcgcgcaatccactactccttggaattgagccaaccaattcatcccaagaatcacatccaaattcttggtgtctagcagaatcagatccgagggaaaaggaatcccctgaatttctatagggacggcagggctataatactttgctgtcataacccctccaggggtggtgatgagtagagggtttctaagcctttctacccccaactgatttctccccacgaatggcacagatataaacgagtgggaagctccagagtcgaacaaaattgtagcagggatggaatgaacgaggaacgtaccaacgatgacgtctggagttgtcagcacgtcctcggccgtcacgtgattcacacgaccccgaatgacgtccttgccaccgttgttggagcggggaggcgcttggccttgctgacgccttggcttcgggcatttatccgcaaagtgcccgggctcgaagcagttgaagcacagacgctgctgaccttgagcgtccctgcggccttgaacgggctgcacagctggcgtaggaggacggggcgcacgagtcccttgttgattctgctgctgctgcggctgtgggacgcgcaccacgaattgaggtcgaggcgctgggcgaggttgctgctgctgctgctgctgcgaggaggatccccctgggtagggattggtgtagcggaccctctggttagcaccctgttgattgcggaaattcgccaagcggcgcttgtgcgattccagctccttgtgcttggcttccaagcggatgctcttgtccaccagtcgttggaagtccgggtagtctccagagactagacgaacagacagctcggggtccattcctgccaagaacttctcttgcttctcctcatcttcccgcacatcctccggggcataacgggctagattgttgaactcatgcaggtactccatcacggagcggttgccttgcttcaactctcggaattccctcttcttgagagccacgactccggcgggcacatgggttttccggaaagcggcggtgaagcgagcccaagtgatcggctgcccctctggctgcgtagcctggaagtggtcccaccagagagatgcgggcccctgcagctggtgggcggcgaagacgactttctccttgtcactgcactgcacagtgtctaacttcttccccacggcatgcaaccaatccaaagcatctacgggattgttggagctggagaaggtaggtggacggatgcggaggaactcggcgagtttagagtgttggggaggtggtggtggagcattctgttgtggcgggttttggaggtggtggaggaaagcattcatcaggttagcttgctgggcgaggatttgggtgagaatggcgttggtgtctggtggtggtggtggaggcggaggaggaggtggaggtggattgccttggtggttgtggttgctgccttcgggttggttgccttcaccggtgttaacatttctcctggtcgtcaccatctgaaaaccccacacagaaccagcaaacagagaaggagagctgacgattaaaactaaccacccacgactactataattcttgaatttattactgctattaaattggttcattaatgttcaagttgcttaggcaaacaaataaagacaggctccgacatagttacaccacacaccggtgtaaccatgccccacacaactcaaaaaagacaaacgagaaaaaacacacgcgcaagcctactaactgctcgtctaacgctgcgacgggccaggacggaaggtgagcaacagcgcaccctccgagctaccaacgccggaggcttccccctcctggggaaccacgggcgcaggctcggcacgaggggtctcgacgaagcaggtccacgccagggactgacgaacaagctcaggcctggaggtgctcttgcgggcggtgatcttctggctgcggcagacgcggcgacgcttgggtcggctgtcctctccctgggcgatcttgagctgatgcagctgcgcctccaacgcgtcgaggtccttcttgagctgcaggttctcctgacgcagctccaggatcttcatgttgttctcgaccatgccacggcgcaccatctgatggaagtcgatacgagccgcgtcgtacgcctccaccatgcgtgccagatgcacgacggtagcgtcatcctccgagctggcgtctcggaaggtggcgtagtcgcgggctcctccgcgacgagggtggtagcggtagggcgagtgctgcaactcgtccgggtagcgctggtgaagggtgccgatggcgaggagagcggcgttctggcaagcggcggggaaggagtcgccacccgcggtgactgtcagcgaagtccgctcagaagagccggcgaggatcactgcagtgacctcccaaccagcgcggggctctgcatcctcaccctcctgctccgggagcggcctggcctggtaatccactccatgtggataccccaagaccacgcacatgccccgcagctccaaaacgaagccagtcatgtccaaaccacgacgggtaacgctgccggccatctacaaacaaaaacaaaaagagaaacaacattttaaaggacagattttgatgataagtgaagcagcaagacaaagagagaatagcgggttttcacaaataataaaggatttttatttttgaaaatattgctaaggcttgggatctacggctcgtcctagggtcaagggaggctctgataccaacttgtcacgaccggaaatcacccaacaggcgttcccgacgtgcgtgtattattccttgtcccaggaggcaaggtacaccaaaagttgatacaatacagagtttaacaagcggaagcgtatataaaattattacatgggcaacgaaggcccagcacactcaaagacaacgaaaaacagcggaagactagggcgacgaccacaggcgcttgacggcaggcacgagctagacaccaaagccttcatcttccaggaactcctcatctgggcttgggaaaattaagcaagactgagtacaaccaccgtactcaacaagacacacccaccaatgcagaataaatgcaagggagtacaagggaattataatataaagggttagggttgcagtaaacagcatttaaagacatttagttgctcaaagctactttgtaaacgcgatcctagaactaaacaatattattaatcaaggccgtgaacccgcacgaacctgccttaacccaaggcctatgatgattcagaccgaactggcaacccgaccctgggtcccagctcgtcctaagccaacccaggccaaccattccatattttagttgttaagcaagttttaagaattaaaacactaacttgggtacattgctcggcttgcccataaccgagggctcggctattcgaatagattttactctgatcagaggtgtacaactttacccacaagacacatcttcctcacgtgttgccacgtgccacataccaccacggtatacggacggaagacgtgacatagtttccaacccatcctagccttagacaagagtaccgacccaatcccacctacggccgggatacccgggacaggcaggcagaactgagcccctagcagcagggcaccaaccctctgccgtatgacatctcgactaccgggccgcagctcgtgtagccttcatttgccctggagaatgtccatcgacgcccgacttcatccatctccaatccgtgtacttttgtttatgactagactgagccacaaactaagccttacccattagacatgtggaagtacggtagtgctttgcaacagaggcccgaagaccggtccttaaacggccgaggtgctactatcaaaaccatgcaccccgagcccagcctaaaaccattttggggattttgaataaagggggatggtgtgagtccaattccacaataaaccaacaattccagagtatccaggtgatatgaatatttcccaaagtctatagttgtaaaaccacctaaggttacctaattagattgcgaagcatctacctaaaatcatactagggataccatgagtagagtgtccactagttgaggttttgtttgtctagggtgaacaaggtagtaataataacaataacaataataatatggtcataacaaaggtaaataggcatggctaagtaaaacagtgataacgcgggaatttaaataaagcgataatgcaataatttaaatcaacataattttataaaatgggattcaatatgatcaagatgatgtgtcttgccttgctcgttttcccaatcgacggcttcgacttccacgaagagcggatcttccgaagctgcagcgtctacacgaccaacggaaaagaaaaaggctttaacactaaataactccacataacagcagaaacaaagcacaaaaatgggttctttacatcttaaggaaaaattagagacttgaacggtccaattccgagttcaaatggccaagatatggccatttgaagtttatatgctctttaaatggatatttgcgaatttcttcatttaattttcaattaaaaatcctatttattgcgtcagccgagggagcggggcgcgcggaccgggtccacgggagtggggcccacgcgtcagccccacggtccacggtggaccgggcgcacgcggctggcggcggtcggcgccgtgggtcccacgcgtcagccgcacccgcgggcgcgggcggctgacggccgggcccacttggcagccgcgagggcgcgcccgaaggcggcctcgccggcacggccgacgggaggaggacgcgcacccgcgccccgatggtcgccgccggcgaccaacggcgcggcggagtggcacccgagagagaggagggaagggggaagcgaacggaacggtcttcggctcaccccggtcgacgagggcggcggaaacgacggacggagcggaggaagacggcggcgcggttcgggatgacgatgacgacggcgctccggcagtcgacgggcgaagcggagcggcggacggggtcggcggcaacacggcgaagcggacggaggtgtcgccgagtaaggaggaagtccggagcggcggcggcggcggaacggagctcggcggcgatggcggagagagaggagcacggcgcgagcacgaaaccgacggcgagagcgagcggcgagcggcggaaacggaagagcgaagctcgggcaacgtttaaatagcgccgggggaaggaaagagcggccggagagggaggaatcggtcgcggagatttcggccgccatagatgcgccggcgatgaatgcgggattaaatccgagcgaatccgagggagagagagaggcgaaagcgggggaaacgggagagggaatcacggggagtgattcccctctctttaatgcgcgcggggacggcgggatgcggcgcaatccgcggcggcggcggcgctagggcacgggcgcggcggcgggcgcggcgggaggaaggcgatgacaggtgggccccacccgtcagcgagagtggcgggcgggcccgcctgtcagcggcgcgcgcgcgcggggagccgatgggccgcgggggaagagagagagagggagagggaaggaatgggccgagccggcccaagaagggaggaggagggggaaaagacttcttttagggttttctttttataaaacctttttaactttgtttatttcttttctattattatttgtgctctgaaaattccactaaaatttatttaagcattttaggcttttaggaaatatacaaaaatcctccaagcctcatttgacttttatctttgcacattttaattgttggaggctttcacacgaattttacttattcttttgcacaattttgaggatgaattttagagtcgatttgggacgcgacagtagcgatactcagtgtcggccaactgatcactgtagcgatcacggagctctcctatggcgatccttgccacctcctgacatgcatggatgtagtttcttcctctagcttcgaacatcactgagggaatatcttcactattactgttcaaggtgactttgactcggcacttctcttcatgacgaatctgggcataaaaaggggcagtcccaaatccaatgacaaaggacattgtacgcaactcctggacaaaaccctcaacaccaaacagatactcaggcttgtagcgcggcatctaaagacaagtgaaaggagagagttaagacacttatccaattaatagcacaagtttttggattaatttgaataaagtttagaaaatcaaagtaaaaggtaagtaaataaagtaaaccaaacttgcaagatgagttgaaatagttgaaaacaaggttacaagttttgtacttttgaataacaggttttcaaaagaaataaaagaaaattataaaatcaatatgctaaatttattttattgcagcaagattaaatgaaacaacattgtaaaacttttgctgataaatgagccattagtacagtaatagatgtacagtactaataacactggaataaattttgagtgagaaccattaaaagagatttatgaagtgcatgtgccattagtttggtttaattaaaagagaaagggaggagaacagttctacttttgcaatatttttagagggcttctatgggtaaccatttggcataacctagggtcaaggggctctgataccaacttgtaacgcccggaatttctatccaaaattccaaacgcttacatgtgtgtgaaccctcgtccaggaatcagccgaggcacacaataacaaattgataatagagtacaattattactctaattaataagcgtataaaatgtcattacagaggtagatagttcctctcaatcaataaagatctaagcagcggaaaataaaataaacggcgcagacggctccactccacaggcagcttgaccaaggctacacctaatcctccactccatcagcctcattgtagaactcttcctctgctgaatgattgcaaggtgagtatatgacatactcagcaagccacgcagcaaatatgcaagtgcacagggtaacaaaggatggcataatagggctccatttgcaaaagcagcatttagcaaacatttgagaatttgataaaacagttaagtaattaaacaatattaatccaacgctatacaacataccctgttgtataggcccaaccattctgaacaaccaccccggctgcacagttctatctccaaaccaggaatgtaccattccaaaccaggagctaatcaaattattaccaattatagcatcatttactatggtgagaagtgtgaaactaatcacgaaagacattgttcgacccgcccataaccgcgggcacggctattcgaatagttttactctgatcagagatgtaccactgtacccacaagacacaaccccacatcatgtcaccatgtgcctcaataccaccacggtacctcggaaaggagttgtgacaataccccttatacaacacaatccactgcagcgcaccttcctggatcataatcacccccttataagcaaggcatggactccccagcgacccccgtgggcttatctccgccacttctcagtctggtgccccgcaatgaaccatgctatacaaaagataaagccgttgcccatgctggcttgtggttggcacgataaatgtttcacaaccgaaactcgtgaaccggtccttaattgtcatgagcacgaccatcaaaaccatgtgctcacaacccaccattaccaggttttagttggcacattaattaattaactaatcacgattgaccatcgtgaactatcattaagccatcattaaataatagtgaatcataagttatcccaatagtgagctaatgtttctaagcagggctaagcaattatacctaatatctagttgaaccaatataaataaagttcaaccagtcaaattattataacccaaggtatcaaggaatgaggtaatcaagaacaaaagggctataacaaacaataggttaattccacccaatgacattcgaaaataaatgcaatagttgaaaagaaataatagctttaaataggatcaacatgctcaaagggttgtttgggatctgtgtgacttgccttgctggccttggaactcttcaaactcttctccggcgaaaacggactctccggaaacgacggaatctaagcagaaaagaacaaaatcaccaaaacaacacataaacaagcatgaacagtacatgtggatatttttaatgtgtagatctcaattttagaaaaatttagagacttgaaccaactaaatcggagctaagatgaattagttatgaatttttaaagattaaatcggattaaaacacttaaatcggtttaaattgaattatgacgcaataatgaattatttttgaaaaggaaaaggggatttattgcgtcagcggctagggtttcggtggaccgggcgcacgggcgacggttcacgcgaacggacggccgagatcgaaccaatccaaatcggacggccgagatcgatcgggtccacggcggctcacggcggacgaccccgatggcgtcagcgatgacgtcaccccggcggcggcggctcagcggctcggacggctcgggcggcgcacgctcaccggcgaacggcggcgcgaggacgcaaacagagagcaccagcacgtagaggacgacacggcgaacacaccggtgaccaaaacggcgacggaagaacagcggacgacgacggcgacgagaaggaaacggcggaaaccttcgggtcgacgacggcgatgctgctccggcgatctccggcgacggcgaaggggcagacgaggacggcgacgcgatggcgaacacgacggcggccttcccgagcgacggcgacggctggagcgacggtggagcacggctggagcggcggcagcgaagacgaagctagggcacacggcgctagagcgattccgacgacgagaggcgaaggcgagggtggcgacgggtagaggagacaccggggaggcttttaaaggggctcggaggcgacggcggaggcccacggcgacggcaacggcgaaggaaacctcggcttggagagaggaaagccgatccgattcgaactcgattccacgaattccaaaacgaattagccgaagattccaacggagaaagggtagaggagatcccggagatcatttcccctctatcaattcggccggagaaggaaaggaacggccggatttggaaaggaaacggcggcggcgcgaaactagggtttcgggcggcggcggccgaaggtagacgacgactgacaggtgggacccacctgtcagcgaccgaacgcgcgcgcgcggcggctgcggactgggccggctgggccgaggagagagagagagcgggttttgggccgactttcggcccaaagccaaaagaggacttttaaaacctttttcaatttaaattatttcttaaatgcaattccatttattaaaaatacttccttagctcaaataaatcccagaaaaatctaggaattatagaattaagcaaagtatttaatgaaattttatctggcccctttttatattggaatttattaattaaacttagattttcttttcaagacttttaaaataaattctagaaattccatttaaacaacaatttatataatttgaattttcagggtgtgacattcactctcctttcgcttagcaaccctctcctttgtgaccttcttcggtggcattcgctctcaatggtttcgctcagagatccccacggtcggcgccagctgttgtcgaagcaacaactgcgtacatcgaaggacgtggctactcaacagttgttgggaacagtgaagtgtattaattttggaatttttcttgggatcccctcttttacatggccctagggtctatttataatcctatcacaggttaccccgttagggtttaggttttacaggggaatttacatggctgcccttacgaaagggacatttacatgggtacacagcgtaattgtgatacatgggactataatgggccaattagcgaacgttggcccaagggccaacgggcttgagcggctgggatggccccttgggcctccttgaagctgaactcgttatggcgaagtcaccctccttcggcatgcacccttcaccatttagtcttcgcccaagatgcctttggtcttgtgggataccagcgcgatccttcgcccttcgccccctttgcttcacagtcttcgccatgggggcttcgcccagatgaacttgacgccttgagctcgaatcctcgctggttgcatggtttcggcaggtctggttgaagggtctgatgacataccgccaacacttggatttcgtggacttggccttgccaactaacttctttatgtcttttcccattctcaagaagagagagctcgcactaaaaagttggattgaattggacagtgctagctcgaatacatttcgaggacggcttgagtgtctttgagctagtttagaacgtggccaagagcaggagtggctatttgaaagcgacccccaccccttatatagcgcggggcggtgggggtcgcgagtgggtgagtgggcgcgagcaccgaagcgacgaaccccctccccccggtcggttagtgcaatgcaaggttgacacgtggcacacaaaaaaaataataataataacgcatatatagtaagaaataaaatatgcatatcagcatatatgaaataaacagtgtgttttgaccgaataggaggacggccgttttccccctacttttaactcgagcactgttttggccaaaaacacatgtcacccttacccgtgaggggcttgttgttgtatggggtaaacatcatccttcccattcaatcaaaacaccgagggaaaggaggtcttgagaatcctaagtttccaactcggaaaagacttgtgattgggaaaaatactattcgactggtaaagttccatttgagtggtaaagttctattcgagtgattttgtgatacttcagcagcttatcccgcttgagtagacttttacttgtgacaggtaaattctaagagcctaacaggtgaaaaggaatgtttgaactctcaagatggaaaagacgtccaatcgaggaactcgagggaaaacactacttgagcaaggaagataccataagaagattgcatgggaccacactcaaccacctctgccagctggcaccaaaagaccataaacacctccaaaatgttccaaattgcccctaggattgctgacatggcaagggtattatggtaaactcacaagagcctataggggcaagattataacctcacatgtacggctgtgggctatataagccggccaaaatcctgtatcaagacaagatataacttaatagagaaataccacttgctaataccgtgcattttgtgtccgagctcatttttaggataggtggggaaaacgtactttcccgcctatccctgaacttgtccgtggcctaaggtcacaacattgagaataacgttggattaaatattccgatgtggccctattaatacaatggcacattggccgagtttatgtgtataggaatgtactttacacagataggtttaatctatttaatttttattccatgaagccactgtgtgacttggtgcaatgtctgtctaaatattgaatcaaatactcccataagcctattttatatagagagctaaatttatttacatgaacaattattttatatgagtgaattttgtgccctaagagacttgataaagtgttttaaatattctagtgaaacttatagatagggtcattatagtggtgaccattatttcatgtgtacttatatttcatgacactcatcaacatgattcaagtatttaatatttgacctataatttaaattagtaattaaccttccctttgtctagctttgctttcttgtgcgtaaatatttatagggttcataataaatatcttattattaaaattattacttagttgtacaactttagtttaatttcccattgtgacaatttatggcttggcaagcaatagcagccataacatccagcatgatgtaaaagttttaaaaaggttcaaatttttagtgatttttattatcaggaattttcaggatgttacacattcacaaaatttgtaaattgagaatggatagttactcctttatgtatgttgttgaggatgttgtagggatgatcttgttgactctttgatgaatccttgggtgagacaccgtactttgttgcaagtgactactccattatcgtcttgttagttgaggaagacccagttggtgccaatgacattatatttgtgtctcttcactaatgaccatacaccattgcgagtgaaattgttcaattcttcttgcgtagtcatcacccaatctacatcaccaagtgtatcttccatcctaattggcttcaaagaaaaaacaaaagagtaattcttagaaaacttacaatgagatagaatagttaccccatttgtgatatcaccaagaatcttatcgatgaggtgatctcgttgaacaatgtagtgaattcttggatggtgcactgaggggacatgagcttgcatggtgtctctttgctcttgagtacccttggcatcaatcccattcacttatgttggaggcatgacttcaagttcttcatagtcggttgtgagaggttgactagagttgatgaaggttgaccaagtattccatcttggtcatcatggacttcttgatgtctcacatccccaagtattctctttttttccattatctagcataattgagagaacatgctccatttgggagtcattagcaacatcacacaccacacctatcgtgatttcaataaatattagctgaaaacatggtaagtatgagggtttgtctaataaccaaggaccttattccaaaaagatataaattgaaatttcaatagaagaagatactacttgaaagcacttggtcattagggataccttgagcatctaagttaagatgcccgtttgctttcttcaagaacacatgttggtggagtcggttaattcttggatttttttcattttcatcacttcacaccttctcaaccttgggctcagtcttatattgagcacaccgtgcatttcactcgaaggtgtcttgggtttcatgttaagcacaaggaaaaaaaacccaaatgaagtagaaaaaaactcattcataattaaggacaagaccgcatttgttatcttacgtgtttagataagcgatgagttcgtgaagattgatgcatcatagcttcaagctcttgtctcgagtgaggctttatcgatttgactcataattgccttcacttgataggttgtggtaaacatgggctcaaaaatctacaacaaaactttgagatggattataaataacgcacaagtttttattttgcaagccatgctgagatctcaaccactcataaatattaataaacctgaaaaattcaggttttcagattttggaaactcaaaatgagcttggaaagagcattgaaacatcacgaaaaaaaaagatttcatgaagtttaacatttgtaaaatcttggatgagttagagacgtaaagagaagccaatatccacaaagaacattagctaaattagctaaacccaccatatgcatgcaagtttaagtaaaaatgtgctgaaacaagattttggataaaagccattttgcttggaataaaataatttttactccaacagctttgaaaaacgttacaaacaaatattgaagcaattttgaaaagatcttcacaaattttcgacttttgaccaaacaggctatttgaaagggctataaatccaaaatttgaaatctttcatgttttgaaagcaagagatacatgaatataatttacataagttcaccctaatgtatctctcacttgaaatccatgaattcaacatttttggacaagtccaagtttgagaaaacatatacataaaagttcacttttccaaaccttccttaaaaaagagaaagaagtaacaaatgagatgctttggattgaaatgcatatgtattagtttgaaaaacctccattaaccagcatgtatcaaaatatgtagttctcgtggcaaaactcacttgatgccataataggaccaaatatggcgagattgctttaatatctggttaatctaattaatagataagagacttgttttcgttggatacgaggaaatcattctacctcgaaagattgaattagacagaatgtcagatatcatttcttctcagagatgtgacaactggggaaataatttggctctagcgctaagcaagactttcctggatttgatagaatcaggggtgttcaaactatgagccagaatgaacctccgatctgataccacagtaaactagatatcttttaatcaacatcctaccaaggttgaggggatggtgatttcagaaaggcaaacaagaacgcaactacagaagataggctttttttggaagaagcacagaaaaatgaaagccagataaaggaagtggtcggcgaaggattgccctacccaacttcttgctagccgtttcaaatctcgggatgagatttttgtaagggtggtggatttgtcacaccctaaaaatcattaaaatataaattgttgtgaaaaaggaatttttagaaattattcaataattaaagcaagtgtttgaataaaatttatgaaaaatttgaacatcaaactgagctagataaaattttgttaaatacattgattgcccaagtattttcgacaattttcctggaattatttgagcattgtaattatttttaatgaatgaaagatcatttcagcaattatttaaattggaaaataaaataaaatttcttcctagcctttggaccgaaacccggcccattcctttcttcccacctcctcggcccagtcacgccatccgcagccttcacccctgtttcggccaaagtccgcatctactccctccgccccttcctctcgctgacatgtgggcctatgaacagtgtcatcccctacctcccacccgatgccattgttgaaaccgagcccaaatccacatccgatgccacccgactcccccgtccgtttccaaaattgattgaggcctatttcgctagccgtgggaaatgatccgaaggaaaaccaacccacgtggggtttgggttgtccccgctccccacacccaatacctttcctcccaatccccctctattccactgtcacgttatgtcttgttccctagcagtttggagtagaaggtgggattagaggtgggattagaagggattactaccattcaaattcagagtgagaaaatatcatgaaaaattcggataaattaaaaaaatggaaggtcacgaaagtcaaaataattcagaaatgacaagaaaaaaaaagatcatgaaaatggaacagaaattcaacgtgcaaaataattctaaaaagcgtaaaaacagaaaatcgtagatttaccacagatgaattctaaaaatagtccagaatattaaaatcataattttggatagattaaattctacaagcagtaaaacatccaattgccattgtgcaaagcaagctacaaaattggttcttggaaggtaatatatctctgtctgatcaaagtgttaattttgtagaaaaaattggttcctgcaaccatcatagctacatgaattaagaagcagttaggaaaaattgttgtccatccatcgcatttcataattcaagcggtctctgagaactatcttgcaaaagattccttccaatgggcgtagctagcaaatgggccatgggaccctgtaactacacaaccaaaaagaaaccagtcttagacattagacaatggtgattgttaatatgtaaaccaaacaacaggtaaaatgaacttgaatcaaatcagataaatatgcgaaagatggttacttatactcaagttagcaaatccgatatatatattaaacctcagagatagccaaggtacagttctcagattcagatatgtgtacttagttttgctaaaacctcacgtagcagaggtacaaatcttagattcagaggtcagtatatttgtgtgccaattcaaattacttctgctactctagtaaatatgcaggggtaagattaaatgcttcgtatcaggtaaatataagtacaactgtatgtagttttttctcaaataccttgagtaatatcaactccttcagctttccttttgccaacctcacacgccagtgcctctcctgaaaatttaattgagcacaacagattatatttttgtcattcaatagccatttatatagctttgtatggtatgacctctagtaaaatatctgaacacccagtttcctgaaactagttatgaacatagtagcagttcagaatagataaatatgctaaattgattgctaagagtaaaataggtattccaataaaagatatgattacatttttcttgacaatacatcagacaacaaatgcctaattggtgttctgtgttcagatattttacttcttgttgcttgtttggtcagattttcactgttttagcgcaattctgtttctgtccatcaaggcttaatggcttatgcattgcgaagatattcaccactcaagtactcaagtagccaattaatctggtagttcagaagcactttcacccaaaaattactaaagattaattgttgggagaggatagaagcttggatccgaggcacttttgtgacaaataacagatgaagtactcaagtaacaacattttgactgcaaaacaaaatgtaacatgtaaccataataaaatggatctgggaaccactatagcaagaacgcaagaatcagttagttggcagagattcatgagcatctgctcatttgttttcgcaatacacttagtcattcctctacagaatatgtatttatctgttttggctgttctgtgtgtagccgggagaaattcagcgagatgctcccgctgttggaaaagaggagatcaagaatcatacatgcttcttgatgtccaggctgttgccctcgaccttgccctctcccgcaaccggtgaattcgaagcgaggaaggagagatggcgagcagcggtgactgggcgggatggagagcaggaaggagagcagcagcggctgaagcgggatggagaccggcggcgaccgagggcgggatggagagcggcggcggctggaaatatgctgctcccggatctccaccctagctagagccacctcccggacctcgcgccgcatccaaaccctagcgccgtgaggagtcgaggaagacaagcgccgtatttgctcgggaagaaaacaaccgtctccgagacgatttttctgtacccgggggtttggcgtggatcgggcggagaattgcctccaccccggcccaggcgaacgtgcatatgggccatggaagaaaattagacccggccgggatggcacacggggatttcggcccatcccccccccccaaacggaataagttcaccagaggtccctcaacttaacagcgagattttttgaggtcccttaaccacaaaaccagaaatatgcacccgtaaactttcacaaaccgtgcacaaaaggtcctatggcagtatacgtgagtggtttcactgacgtggcatcctagtcagcgaaaataaataaataaagtacgtgggtccacatgtaagtgagagaaaacgatgcgggccccacatcccttctttttccccctttcttctcttctctcgtcttcttcgacgggtggggcgacggccggcgagagcggcggcactttttgtaccttgttagttactctggtttaatagaattatctttatgagaaattaagatttacttagtgggaattattcttggttagttcctaatcagcatatgggatcatttttcactatagtccattaaatatatagtgattgttttagtgtttagctagcactagagtagttattaattgcgtatacgcagtgtgtgggtaattaattttcagtggttgctgcgtatcccacagtacgttagaggtgactattgaggcggtgacagccctcaagagcacttaagtcctccctgtacgagtatgtagtagagcgacatatgagaacagcgggttaccagtgcctgaagtatcgtgttaggattaaaattaagctttccttagacactacttctcactaggaaatactctctaccctttgcctatctttgctttgtgtccttggatgaatctggagaacacctgagcacacacgttccctgtggaaattgataccttggaatacttccgggtgaagtgctacattggtatatccgtgcgcttacggattttatttgtaatgttaaaagataccaacactaagcatcacctaaaccaatcatatcatcaaattataccccaagctatcaatgattcgggataacaaaggatgagtacaataggtatccatccctcatgatattataaaataatgcaatttaagtagaaagcgagggatttataaattaggtacaatatgatcaatgctttgtgtatgacttgccttgctctggcgctggaggaacttctgcaaccactttgtagtaaacgggagcgtcggaactgctggattctataagccaaacaaagcaaacaagcaaaacatgctataagtctattgaaacatgaagcaaaaccatttttaatggattttagatatttttataaatttattgagacttgatgggttaatatagagcatggataaattagatacgaattttagaagttttactgtgttctgactataaacaaaaaattccttaatgatttattgcgcattaaagcctgagggctgacgtcatcaggggggggcgttcggtgccgacaggtgggtcccacatgtcagcggcacggggtgccggcgtaccatggacctggaccacgtgggtggtccaccgccggtccacaaaaccgacggcccagatctgccataagggccgattggacggcgcactagcgttgtcgggctcgagatcggctcggccagccatggcgagcacggtggcagtgcggctaagcggcggcacacggcgacggtgcaaggcgcaacaacgatgagcggcggcgcacgttcacgagcggcattgaacgacgagagagaaaaacaaagtggggtccttactggtgagcgacggcggccggagcggaaggggaggtggcaaacgcgacctggtggtcggagcaacggacggcagcggcggcgtctagtgggcaaaaacaagatggatcagggtaggggaagatgaccatggcggcaagcttcgctggccaaagatggaggagatgggaggactcaccggcaagcagcggtggtggcgctccgatgggaaatggtagcaaccaaacggtagccacggtgcagaaggagagggtgaaagcaacagtggcattggtgcagccgggcggcgactagcagcggccggaggtggagatgtggcagcggcggctaggacacggcgcggcagcggaatagggctcaggaatggtggcaaaaatagggaaaaaggtggaggaggtcctgagggggctttttaaggtggcggtgggctcagtggaggctggtggcggctagcgtggcgacggaattagggcggcggcaggataagggcacgatttctgccgattttgaaggggataagggcggtggcggttgcgacgggatggataaggatgccgcgtgcgaggggcgaggccggaagcggcatgggagcggcggtggctgttacggcggtggtggcgcgaggtcggggatgggcctgacaggtgggccccacctatcaatgtcccagcgaggggagcggacgcagctaggccacagcctcaggccggcccagccaaggaaaaatgagaaaactcaagatgtgacaacttcattcgcaaggcatcgcgaatgcattgatgctttgctattggtttaatttggttctggcctccttttatttcttctcttttttttcttcccgttccgtgatacaactcgatcgaactatccttgttgcttccactgcaagatttcaaaggacagaaaggattatatacctcccaaggtattgtactagtagtacctcccgaggctgggcgtggcacggaagcgtcggcggctgttgcggcagtggcggcgcgaggacggggacgggcatgataggtgggccccacctatcggtgtcccagcgaggggagcagacacagctgggccacggcttcaggccggcccagcaaagggggcgcgcgggggaagggaaaggagaggtgtgggccgtttccggcccacagccaaaggtgagagaggaaggaattttaattaaatttaatcccgttaattactttggattcattataattaccttgtttgctctaaaaattccactaaaaattctgtgagtgtatttaaacctgaggaactcaagaaaaattccaccatcccaattccacttattaactgcattggtaaattaatgttagctccaggttaaattaaataatttctccggttgatttattaatgaattcgagactaaggaaaaataggaaaactcagcatgtgacaacttcattcgcaaggaatcgcgaatgcattgatgctttgctattggtttaatttggttctggcctcctcttctttcttctcttttatttttttcccgttccgtgatacaactcgatcaaactatgcttgttgcttccactgcaatatttcaaaggacagaaaggattatataccttgcaaggtattgtactagtagtaccctctttttcttaaaaaaaaggcaaactaaaaatatttttcatataatttaaaatttgggttgatagcgaaatttaaaatataggtttaattcggttattaattgagtaattagctgaatggaaaacaaatggtttaaagttgtttggctgttaactatacggttttgatgattaattatatacatgaagcgtaatttaccaaagctaattgttgttggattttcggtttggtcactgttaaatatgtatgcgtgttgttagttttgcatgcaaattagagtccagaattttctacaagcgccgagggttgaagacgaaagcgtgcagtcaaagaagatcccaatagcaggcacaagtaatcggcacagagcatgcctcggtgaagccatgtcacggagcatctcctctggccggactccaatgcaatatttctttgtgtggatgtttactgattcggtcacaataacgtctataatcctatctatctatatgtcctgctatctatctatctatctatctatatctttgtgttcaagtatagcatatggcctacgcaggctacgcggcaagcatttcttcatacatattttttacttatttatttttattattatattttattctaaaatttttttatacatttagtttattttgcaattcatattgcaataatttttttattttaaattttagtttatctcaagttgtattttagatggactcttcttttaatatttcttatttttcaattctaatagttatttctaaattatattgctatatgtgtcgacgggctatacctatagacgaaatttgtagagcatgggaaagattggaaccagaatatacgcgagactatatcaagcagacaagtgacagatttgtactggttacagaagttggacgactcgcgcatatgtctggttggcatcgatgaaaagattaggatagcgtcgatcagattggattgaaagattgtttgaaagcacgaaaccaaacatacaacgaaaataaaaagaaataataataaagttactctaataatactggaaccctaaattaatcaccctaataaccaagacaccctgcacagtatgaaaccttgggtacagcaccgaaacatgaaggctacggtacacgcgcgtactatggcattgtgcatgtccggtaaaacagcaaactgatcgaccttgcacgaaaaacactataactccaccaattctattccattttatgtgaaactcgaaatataagttataaacatggcctaggttcaatttttaccaagaaacataaaaacaacagataaaattgatgagatctaattaaactctaatctaaactaaaacagaaagaagtttacttaaaacctacatcgtgatgagaagctaaccagtgaaactgcgctaggactttcggttgattatcgggtgcagggtgaatttggccatcgacgtaggcgccatctcagcgcgcgcagatggtggagttatggggtgcgtcatttgttacgccgtctcgtcacgtgcaggaagagacatggagtctgtcgctctccatctactctctgcattctaatgtactcaatgatgaactttgaagcctataatctaaactggacagtgacccacacgtgagattagttttgggctttaaaaatccatggttaaaattaatctatggtcatgatattattgttaatataatcaaaggtcacaatattgatttaatacttccaaaacctaattacaaattaataatttgacctaatagtagcaattgccgtaatataataagatattggaactatataattttaaaatataaattttgaagacaaagtcaaattacttcgaccaaaacatgacaattcataaaaaaattgaaaatatgctataaatgttgaaccatatgagacatgaatttggtagatataaagagatattgacgtgaacgtgtttgaaaacacatgcatatgaatataatttttatacacataattgagctgagtgttgcgagcagatcgcacttgcctagcatttgtatgagatcttctcaagagctaattaacatgtagattgcacatgtaagctacatattacgttcctaaatctttgaggaatacctaccagcttccgatgtggtgtggttcgaccggtctgcacactgcagccgatctgccgcctgctacaccttgctgtacgtgcctagatacatctcgtgatgctgtgctccccatcgatctactcctgcgttccccacactgtacgactcctaaatgtacgtacgatgagcaaaacaaataaaggttgagatatatgtggtgggcaaaacatagattggctaggcctgtaattaaagcagttgattggacgagctttacatgaggcccataatgttaatgccgattaaagtttataatcaatggttaagattatatgatctatcaaaattaacgatcagattttacaagttaatgcgggagctcgtagaaagtggccaattagtataagtactagtcggcaacccgcgcgatgcatgggttatcataaaaaaatagccgtaagctaaatatgatagttattttattgaaataatagaagatacctatgatggttttaattttctattattgtttcaaatttaaaaataaaattagcaaaatactgatcaaattaagattggtgtgacttcgtatttattaattttgatttggcattatttaattttaaacaattaaaaatctaagggtccgtgttatatttaatttgatgtcttatgtgacacatattctggctacttatctacggttatcatatctgcatgggctacatttataaatagcaagacatattataacttgcagctaaactgtatggtgttgagagcaaaactttccaatcatataagttttgttcaaaatgccatcattgtagaaagatgggttaaaatattacgtatacctagtgtgaatccagtcttattaattcatcatttatttgtgtattattcctaacgattacgaactgatacaaataataattgtaatttagatgacaaatataagtttgctgaactcagagtatataagcatacgaataaacatccattgtaacactgtcaaaattaaagaaatcctaggtgcacagagataagatttaaaatccgttcgtttctaatcacagatgttagctaggtttccgctttttaaactactaacgatgcattcgtgcgaaaagtgtttatatagaagtatactttacaatataaaagatacataaatctattgttcaagttaaaaataattaaaaatcaagtaattatgcactaatggtttttttgttttgcatgcctgtacttcatcttcattgacgcactactgaccggagccttacttgatctccatatttcgatttagatttgcatgaatcagtctatataacgaattgaaaaaaaaaacagacatgaagtacatatgggttaatcaatggcttaattttaattgaaactatacgtactttggtgaacgtaatagtagatttactggttggcaaatcataaaatttgtgtttgacccgaccaataatctcatcatttgaattcacagagcagcacaacacacatgtttagatgcgcgaagctccaacgctggagcaggcgcagcaagcccatgaaattaaacttcaattaaattgatagcatatatatgccactgctaacctgctaccatgcatgtccatgcctccagctcgctccatcgatgccaaggtgtacgtgttacgtgtgtagctgattctgtgtgcgtacttcttccggttaactacataatcgccgccgatcctgatggacacgtcacaccagaggctatgaaggagttcatcttggccgccgtcttagttttgggataggtctcctactggagtacttgttacattgtacgtgagatacgtacggtggttaggtaaatgaggcgtattagatgggcttaacctggcccacaacgtcgatgaatcgatctattacttaaaagctatttaattacatgatcgatggtgacgatgatacgctcgacctaatcaacggccataactttctaattaacatgagaactcgtaggaagtgcccaattagtataggtatagaggtatagatagatagatagatagatagatagatagattgatagatagattgctaaaaggaccatccctttgttgtgtaattatagttaacgtggcattttaccaaagtgttaacaatgcagaagtgtcacaaaaagtaaatgactaaatagaacacggatacatcacatatcacaaaggaagtgaaagttttattttattgttgagtaccaactgatcaccattacattagtaaagcgacacattgccaacataattacttcaagccgtgtagtgacaggcatgataaaatgctacccttattcttctcttatgcctcagcaactgcatagtgcagcagctcgttgtccctgatgagggcatcaatctcactcttcttttcctcctatgctgcattgtaattctcagtctcaccatccttttcaggattgtaattctcaagttcctgaacgtttgacttcagcttccatgcttcaaccttctctgcatctagagcttcctagactgaattcttctcatcattcaggcacggatacttggcatcaagttcattgtatgatgcttgcaactctgataaagaaacacggatcttcaccaactcgtctcttagcctatgggcctcagcatccttgtcatgcacggctttctcagccgctttcttgccaacttggatttcctctaccatccgaagcttatccttttcactttccgccaaatccttgctagcctggatttcctccaccttcctcttaagatcctccaattccttcatgattttttctttctcagcatcaaatgccttcgtagtcacctcctttgcctccatcaaagcatccaatatcttccagagacgcttaacctctgcttcagatatgctttctttctgttctgcagtagaaacatccaaccgaagtttatcattttcaccctccactaaatacttgttggcctggatttcctgcaccttcctcttaagatcctccaattcctttaagatttctgccttctcaacattaaacgcctttgcagtaacctccttttcctcctctaatgctttcaattcattcttcaggctcttaatctctacttcaaattgattatatttctgcttcgttgtcacaatatctaactgaagcacgttattttcactctccaccaaatccttcttggcctggatttccagtaccttcatctttagatcctccaattcctttaggatttctgtcttctcaacattaaacgcctttgcagtaacctccttctcctcctcgaatgcttccaattcattcttgaggctcttaacctctacttcaaattgattgtatttctgcttcaatgtcagaatatctgaccgaagcacgtcattttcactctcaaccaaatccttgttaaccagaatttcctctaccctcctcttaagatttcctgattccttcaagatttctaccttctcagcttcacatgcctttgcagctgcatccttcgcctccaccactactctcaatatctgattaagccacttaacttttgcttcagactggccatatttctcctctattgccaaaacctctgactgaagcttatcattttcaccttccactaaatccttatttgtttgcagttcctcaaacttcctcttaagatcctctagttcctttgtgatttcatcattttgagcttcacatgccttcgcagcagcctccttcgcctccgtcaatgcaaccaattccatattgagtgtctcaatctttgcttcaaacatgatttgtttttgctttgtaatcagagcttccgaccgaagcctatcattttcactctccaccaaatccttattggcctggatttcctccaacctcctcttaagatccgctgattccatcatcattttgtctttctcgtcatcaaatgtcttaacagctacctctttttccatcaccaatgcacttaattccatctggagcttcttaacctctgcttctgactggccatatttctcctttattgccaaaacatttgacagaagttcatcatttttagcttgcactaaatccttatttgtttgcagttcctcaaacttcctcttaagatcctccagttccttcatgatttcatcattttgagcttcacatgcctttgcagcagccttcttcgcctccgtcaatacaaccaattccatattgagcctctcaatctctgcttcaaacatgatctgtttttgctttgtaatcatagcctccgaccgaagcatatccttttcactctccatcaaatccttcttcgcctggatttcctccaacctcctcttaagatcctctgactccatcatcattttttctttttccttcaccaatgcacataattccatctggagcttctcgaccatatgattatatttttcctccacattcaaaaccttcaacccaagcatttcattttgacccttcaagctactctccacctcctctttctgccttgagatgacctgagcttcctgctttgtctcctccaattgcttctccactttacccttctcgtcaagcagctgggcatttttgttctccaactccgacaccctctccccaagtgtggagacctggtgcattagggtcctcctcttgtcatctgtgaagaagtatgcaacatatgttttagaggggtcttaggggagagagatgggaccacactgtgcaaaaggataaagatgatcacctttcccacccggaagcagcgatttcagcgatgacggcatgctagtcactattgccacacactcctaggtggaagatgccttgttgtctcactgtgcagcagccaaaggatgcagtatattttcctgcccctgcagaggttgcctcagagtgaatatatatacaagaggagtaggagaatgagaggatgaagtatccatgactcctccaagaggaagagggaagaagcaagggagagaagggatggagtgttggtgcagcagaggaatggagtgtcgatcgggaagagggatgggtgaatatacgttttgttttgtaagaagaaaattaaaaagggataatagattttgactatctagtgttagtagggcaagacaggattaaaattgctgccaagaaagaatcaacgtaatgcagaaggaagaaagaaacgaacaaattctcgatgggaaattaaagcagcacagatatattgttcacaagtgtcttcattcgcaaggcatcgtgaatacgttgatgctttgctattggtttaatttggttctggcctcgttttccttcttctcttttgttttcttcccgtttcgcgatacaactcgatcgaactatccttgttgcttccactgcaagattacaaaggccagaaggattatatatatacctcccaaggtattgtacttgtagtaccctcattttatttaagaaaaaggcaaactaaaaatctttttcatataatttaaaagtttgggttgatagccaaatctaaaatataggtttaatttggttattaattgagtaattagccgaatagaaaacaaatggtttaaagttgtttggctattaactatatggttttgatgattaattatatacatgcatgcgtgttgttagtttttaatgcaaattagagtccagaattttctgcaagcgccgagggttgaagacacaagcatgcaggggccaacagatgatgatgaagacaaggacagggacaggcagcgcaggagtcgtcacaagagccgctctgtgtgggattggctcgggcgcctgtcctcaagtcacagcagggagccagaaaggagagatggccagggggcgctcgcgcaaccgggagcgctctgatccacgtagcagaagcggccgttcccgagagccaagcaaggtgagaccacctctctcttcatccttcacctctcagaacaatcctgcctcagacacccttctaccctctcccaatcggcttgcctctccatgcaagcaaccaagctcggtccgcaaaccgagcccggacggggacgccactgctaccttctccgtcaaccttgccatcccggaccaggctgttcttcaagctgacaactgcttctgttcgcaggggcaggaggatgttcttaccctcccggagagccaccttgacccaatgctgcacgaggcggcggtgcagtactccatctactcgccggacacaaattccctccgtgctgtttcccctgttttcgtattttcctcttttgcagaacaggtgactcaagttcatggggcgtcggtggcaggacaggtgaacaatcaagctcaagctgcattgctggtaagccaggtgaacaatgtggaagagttcattgacaccctctcgattccgcttcagccgccgctcctgcctgctctggacgcaaatgctcgccatccaagccacgtgaaagtgacaatacctgcaatttcctcggcacaatgtcatagcgaacgcctgcttggcatgaggcgggcgggagcaaaacttgaaacttttgctcaagagatcatgtcaaaaaagtttggtataattgatgatcatgcttcctttgatgataacatcaaaaagatttacttgcagcgctacaagaaaccgttgtccccctccttcttgaagacaatcactgagctggcggagaagggaggatgcaagagcatccgcctgaaggcagcaagaaagaaggcagcgatcgcgcccctgtgagcgcgctgcatcctgaagaagtaccctgcattggccatgaagagtcccacccctcatcaaattagcttgtcttcctactgtcatctctgcatgttagttccagtcaaagatgttttgtcttcctctgcctgtgcttctcccagctttgctggttgtgtttcaagaaaggccttgttactttcaccatcaactagagtagtagttgcagcagcttctgtgcccatgtcacaagacaatgtttacttgtttaactggaatgtaagggttctgaattccaaggcgaagcaagatgcagtgaaagttattttgcaacaatatggtgccactcttgtctgtcttcaggaaactaagattgcttccatcaataatcgtattattcttaacactttgggtcaaagatttgtgcgacactatgttgccctgccggctgatggcactaggggctgttagacttgatgatataagctggcgctatggagcactgtttcaggagctctgtttcttcctcaccataccgtgcactgttcgttgcatgcaaggtgtttgttagagtctgttttatttccgttttttgaggcttggttgttaaggatcgagctgcgtcctgtaaagccggaatcgtgcgtgttcacgatgaggcgtagtgtagcgagtcgtacgctcacgttcttcgccgtgtgggatggcacatgcgcaaatggacttcatgggagtgcacagagtcggagacacgatctacatgatcgcatgatctcgttttcgctttgtataaactagaaaggtagcccgcgcattcgcgcgggcatgtaccatacgtaggataaatttgagaaacttataacggcggtataccagcgaaataatttctacaacgtttcaaaattgtggtttttttttcatgaattttcttcgttagtattgcatgatgaatttaattgttatatataaaattacctactggagattagggttagcaacttatgatacctaagagatatgactcttgaagtttcatagggaaagagagaaaacttaagttataaagacattacatatataagcatatataattaacagaaaattgataattaatttattatttgatggcatacatcgattggtcatagctatggataattactcataggaaattaagaatatgtgtccagtatagtgatacaaattagataaaatagtaaaagttatgagaaaaaataaaatattgtgcacaggataccctcaacttttacttggtttggtagaccattatttctaaccattggatattcatatgatctaacatattgtgcacggtccaactaaccaaattattcgtcttccctcaccacagacggtggatatgttaattcgtccctccggcggcatgctcgcatcatcataccaagaagaaaaaaaaaacatgccctacatgtatatgcataatacatgtaactatcttatgcccctctttttatctgagaaaaatattctacacccaacatgcatgcacaccgggatgcaccggctagctctccaatttgttcactccatggacagtatgttgctttgttctagtgattagataatttaataagcacaaataagtatgtgaaatcaatttttattagtagaatatccgtaaggacaactctacagaccccctctccccttcttcttttcttggtgtattagttggatttgagcaacgtgagatagcattcccgataattctgtgatataggtattttgggctatgagttaatgtccgactaccaagggattaaggttttccaacactcgacaccgaacacagcacaacatctcgtgcatttatccttaaaagaatatcatatctttataaaagcatcgcgattaagtaaatagcctccacatacatgttaaagaatatcatatctttataaaagcatcgcgaacgttcatgttgagagatataattaagttggttgagagtcaaaaggtccattgatgctataattaaggttaatggtttataggtatgggtccattgattttatcagaaaaaggtggatattttgatttttaatgagaactcttaggatttttttcatatggatgtgggtccataatacaataattttattagcaattaaatatagttggtatagattttaaactattgattaactaaaaaatacaatggttcaaacagatcataaattgaatatataatttaaaatttacagctattgaagaatttttttatttatttataaaacatcgcaagatcaatatgtatgagggatattatctatgtctatatttgcaagtgcatgcagtctttggagtgtgatgaaattaagttactaatatataagatattagatacccttaagctaacttaattaccttagagaaaaaaagggaagtgagcaaggaaaaagcacgcatactcttctcatatgtgtggatggaagcacgtacgtgcgttgggcggactcgtaccgccagattgatgtttagttttttttcctaaagataaatctaacggtatttgatggtaaaaaaattagattcaccagattaaataaaaccaatagttagatgttctccttttttacatagcttttctaggaattaattagagcgttctatgtcatcttaggagcgtttctaggaatatcacgtggcagttcaagagtgcttttagtatgtaatagatagatatatctatgtaggtgtgtgaaatttactttataatatatattgtcatctttattgttttgttcttattttataaagataaatataatagttgaaaatagtggatctaacgatttattaaacaaatagtgggtccaccggtttattagaacgccatgtggcggtttagaagcatttatatgatgtcacatggtgatttaggagtgtttataagaaatataatggacttttagtatataatagaagattttgctttctaactaataaagcataaaaatatgagaaggaagagttaatctaggaagacgggtgaaatatgaatcaaatatcataattaggtaagtacctatgagattaggacagaatgattagttaaatttataatggttaaaaataataggttcatcgatttaagtgtaaattgttggtgtgatattttgctttttttcacaacttttttattttttaatcttaaattagggcagagattagccgtgaaggattaattagtttaaaaatcctaatctaatcgtcaaaaataataggctcaacggtttaagtgtaaatcaattatatgaggttctgcattttacttagaaatgtttggattttattgatctaaaattatttgcttaactataaattaaatcagactcatcatgtttaccttgaattgcttgctataaaatagaaagtagagagaaggggagacacatgatatatgtgcgctacggataacatatcacaacataataaaaataataatatctgagatatatattttttttcatatataatagttagtcgtacgtgacatctacgtacgtacgcacgtttgtacatgctaggtgggcccaagattgggtgtttaagataaatctaatggttgtaaataatgggtccaccaaatttaatgaaaatcaacggttatttgttagagtgccacgtgtcgggttaggagtgtttctaggatgccacgtggcgacttaggagtgtttataggaagtttcatggacttttagtatataatagaatagatggtgatgaaatacacggaaaagctgcataagtttggcggcacaaaaacttctcgcgtgtgttcttctcttccactgttcatcgtcaagcattgtcgatttccaagggttcgtgtgtagtttgatcctgagttttgccaacatctggtatcagagccatgtcggctccgacgccgcgagtctcgcgatcgccgcgtcatcaatcccgctcgcctcctctgcgccgtggtcgtcgtcggcctggcgacgcctggcacttgggtccagtcaggcgcgtggtcaaggaggtggggggctcagccaactattcgatcctcacgaagacgaactacagtgattggtccctcttgatgagggcgatgctccaggtgcgtggcctctgggaagctgtcgacacgggtgacgtcaacttccaggaggacaggatggcgttggaggccgtcctcaaggtggtccccgctgatctgctgccggtgctctctgtcaaggagacggcgaaagacgcctgggatgccatcaagacgatgcgcgtcggcgtcgaccgcgtccgcaagtcgaaagcgcaggagctgcgcaagcagttcaatgcgatcgagttcaaggaaggggagtccgtggaggaattctccgtccggctgagtgggcttgtcaacaaccttgccgtacttgggatccagcttgaggaatcaaaggtccatgaaaaatttcttcatgttgttcctgaacatcttgagcagattgccttgtccatcgagactgctcgaccttgataccctgtcgctcgagaagctgacggggcgtctgaggaacgccgaggagcgccgtcccaagaagaagtccggcgatgagggcgacaaactgtatatcacggaagaacaatgggccgctcgcgccaaggaacggcagtccggcgagggatcgtcgcgcaagaaggcgggtaacaaccgccgacaccgcgatgggcgaaagaaaaccgagggcactgccgatggcgagcgcggtgcgcgttacacgcgcgatcaagggcgtgacaagtgcaagaactgtggccgcctcggtcactgggcgaaggactgctgccagcccaagaaacaagtcgcggcacacgtcgcacaaggtgaggaggaagatgatgagctggcgctgctgatggctcacgcggttgagctggcgccacctccaccatcgctcccaccttcaactgaaccgctcaacctcgttgagcccaaggtgttcacacacctgcactgcgatgtcgacgctggtgtttggcatctcgacaccggcgcgactaaccacatgactggcgtgcatgacatcttctccgagctcgacacggtggtgcgcggcaaggtctgttttggcgacggctcggtggtcgccattgagggccaaggcaaaatcatctttgagtgcaggaacagtgaacatcgggcgctcataggggtgtactacatccccaagctcaacgcgaacctcgtcagcctcaggcagctggatgaaaatggctgcgacatctgcatcttccatggcgtctgcacgatccgcgacgctgcgcgacagctcctcgctcgcgtgcggtgtacgcgtattcggctgtacctgatcaagatcaccgtcgctcggcctgtgtgcctctcagcacgcacgcaggaggccgcgtggctgtggcatgctcgcttcggccacctccacttcgacgcgctacggcgcctcactcaacaagacatggttcgcggccttccacagatcgaccaagttgagcagctgtgcgactgctgcgtcatctccaagcaacgacgttcgccgttccccgggcagtctctgttccgggaggaggaccgcttggagctcattcatggcgatctttgcggtcccatctcgcccgcgacgcccggcggcaagaaacactttctgctgcttgtcgacgatgcaagctgctatatgtggctcactcttctacagaacaagggggaggcggctgcggcaatcaagcactttcaagcccgcagcgaggctgagtccggctgccatctcaagctcctccaccccgacaacgggggtgagttcacctccgccgagttcgccagctactgcaccgagagcggtgtcaagcgccagctcaccccgccgtattccccccagcaaaacggtgtggtcgagcgtcgcaaccaaacgatcttggcgatggcacagtgtctgctaagggccaagtcagtgccggcatgctattggggggaggcagtcatgacggttgtctttttgctcaatcacgcgccgaccaagtgcctggtggacaagacaccctatgaggcttggttaggtcgcaagccggccgtcggtcacctacgcaccttcgggtgtctcgtgtactcaaggacgttcagccacacatcaccaagctccaggaacgcggcaagcccatggtcttcctcggctacgttgagggaactaaagcctacaaggtgttcgacccgaagtcgggtcgcgttcaagtgacgcgtgacgttgtgttcaacaagggcgctagctgggattgggatgccacagatggtatgcattcccgtcccatgtctgacttctctgttgaatacattgtcacacaggagccggaacgtgcggagtcatccatgccgacaccggccacaccgagacatggcgcggttgcgcacgacgctatgtcaccgacggcctcgctgcccaatgcgaggtcaccgagattcgtcagc

SEQ ID NO: 5671 - DNA, 8495 bp, Oryza sativa
atgtttgctaaatgctgcttttgcaaatgcaaccctattatgccatcctttgttatcctgtgcacttgcatatttgctgcgtggcttgctgagtatgtcatatactcaccttgcaatcattcatcagaggaagagttctacaatgaggctgatggtgtggaggattagatgtagccttggtcaagctgcctgtggagtggagccgtctacgccgtttatttattttccgctacttagatttttattgattgagagggactatctacctctgtaatgacattttattcgcttattaattagagtaatatttgtactctattatcaatttgttattgtgtgcctcggctgattcctggacgagggttcacacacatgtaagcgtttggaattttggatagaaattccgggcgtgacagagccagcggccggagagggtggaggagatgcccaagatcacccagaggtgtgaggccctccgcccgctctttagatttcgtagttttcttttggcgtttgccatggagggcgaacgatgtgaatttgggcgatggccctctccctttcgtattgtagccgaaaacggcatttttaatatatgaaatagatgacccaagtttagccaactattatgtttgatgcctttggtgcatatgcttgcattgtttcacatacgaaagggtgtttacccttttcgccaactttgtgtgttttgctgagtcttaactttgcgctttgccatttaccctttctatactgtcttagcagggtcttcgccgaaaattttgtgttcggccccccttgggaattggcgaagtaaaaacgagaagttcgtggcggtgaagggtttgccgaaggtccggtgtccgtttcagcctttttaccacgagatgataataaacggcaacagttacaatgttttgaaagttaccggctggatgcgggcgcaccccgggcgaaccctggacgactacgacagtgtccatgtggaacgtctagaggacatggttcgcttttggtgaaaccaccggaggacggatcgtcgggaagcgatcgcccagcgccgttatagtttagtttgtgtttcgcccccttctcctcttagggttgtgtataacattagtagtgatgacgaaccgagttcgccgaatcattccttagggagtggtgggtgttttgggggcgaagatgtaatttttttgtaagctaggctgtaaagcccgttactttctttcacctgtaccatgttgtatggcatgcactctttgatattttttgaagttaataaagatgtatttcatttcctttctgctattgttcgcatagtcacctttcgtgctttcgttaggtcgaaacatgtcggcccccttgcgtatattagcgaaataggtctgctaacatttcagctttcgacttccgctttcgatctgtggtattccgcgccaagagaagcgcttgcgttttttcacatgaatcgaatataacggtgttcggttatttacttcccgaaacaagctgtcgcggtttcaacgtttggcgagcgatgcttcggccgattcgtttcgcccccttagcgttttcgctgatcgggcatttgccttggggtttttccacgaactatcattcacacaagtaaaaaaagcgaaagacacaagaattttatattggttcgggcctccaggatggataatagtctgacatctagtttttttcttttttcattttcctctttttttgcatttttgtgccgaagggcttacataacgagaggtgccgaaagtcctatacaatagtatgtacatttttacaagttaacgaatgaggtgccaccccttctaaacatagaagcgcttaagagaagcagcgttccaggagtggtcgaactcttcgccttccagcgtcgccaagcgataggagcccgtcctggacctgtgcttgatgaggtatggtccttcccactttgattcaagcttcccgaccgccaccgggttcgccttctttcttaggacaaggtggccaggcaatagctctgtcggtcgaacttttttgttgtaagtcaccgaagtgcttgtggcttagttgcgcatgtgttctagcgcttcgactctcaccccttcgaggagttcaagtgacacctcgcgcccatcttcgcctccagagaacatcactcttggcgaattagcccctagctctgttggggtcattgcatcgtcaccatagagaagcatgaacgggctgaacttggttggccttgtgggggtcgtccgaagggcctagagaatagatagcatttcgttaggccatttacccttcgctgccccctcaagcattttcttgagcgcctcaaggatcttaccattcgcacgttcggccgccccatttgactgtgggtgagcgactgaagcgaacctgatttccaggtttagcccctcgcacatttctctgaatttgtcagaatcgaattgcttgccgttgttagtgatgaattcttttggcactctgaaacggcaaacaatgttcttccacacaaacttctatactgttgccgaagtgatcgcgccgagtggttcggcctcgatccaacgggagaagtattcaatggctacaattgcaaacttgtacccatttcatgccacagggaaagggccaatgatgtctagcccccatctggcgaaaggccagacaggtgcgataggttgcagttcgtactagggtgctgtttagcttcggctatgccgctgacagctttcgcacttcttgacttgctcaacacaaactttcagcacggtgggccaatacacaccctgacgaaacactttggaagcgaccgttcttgctgcctgatgtgcaccgcatagctcttggtgtatttcttttgccatatcctcacctttggcgaaggagatgcagcgaagcaagggttggagcacatcgaagcgatacagctgcccagagaccagcttgtatcttgcggctcggagctataggcgtgcttcgcttctgcttcgtcctccaggagccaatcgttcttgaggtacttcatgaacggtgttcgccagttctctgggtcttcgcccagttctgcctggtcgattgccatgatgtccaggctctctttgggcacacttggtgcgtacaagacttcgaagtggatgcctggcgaatgtgggcctccacaggcagcggatttcgccagggcgtcggcttcttcgttctggcctctaggtaggtgtaacgccccgattttcgttagggattaaaaatcattaaataatgcatttgacaaaaaataaataaaaatttaagcaatttaatcaagtgaaatagtgagggaattaaaattttctcccttaaaaatcattggccgaggatattttgtaatattctttgtgccctaaatattccccgaaattttcccgtgaattttcggagctaaagaagtaattttaacatcacaaagttcattgaatcaattaaataaaaagaaaaacaaattaaaaatcggttccccactacctcgtccacctcttcccccacttttccccaattttcggcgccgtttcgtgccccatctccacccacgttgagctccatgtcgccggccgttgccgcccaaattcaccactccccggcctccccgttgctccctcgcgctataaaaagcctccccgtgctttcctctttcgtttccccctcctcgccgagctcctcacgccctctcccatgctccccgcgcaccacctctctccgccgtcgccggcgagctccggccgcctctaaccgccactctcgccgccgccgcgctgcgccgccaccgctgtcggtcgccgtgccgaactccaccccagcctccactcctttttcccccttccaccccgaaacgctgccaccacgtgcaccacctctctccaccaccgttgccgactccagccggccgccaccgccgcttccgtcgccgtcgcgtcctgccgcttgcgctgctagcttcgcaacgccgcgctccaccccggcaacccctcctttccccaaaacatcgccgtagcactgcttcccccatcaacccgagctccaccaccgcctgtagcctccagccgcgcaccgcgccgccttcgtcactcgcttcgtagcgctgaggagcacctcggttgctgtttttcaccgccggaaccccgccaaaacatgttttcccgtcgccggtgagtatcttctttctttttcctcttcggccggccatactcacgcctcctcccttttccctaatccctccaatcgcttccccaggtgtagccgcccctcggcctcccctcctccttcgttggaagcggtcgaatcgccgtcgccgttgtcttcctccataccagctgccgcttccggtgaggatccctcctcccttcttcctttcccatccccttccttgctagctgccgcctctcggccgcttgccgtcgttccgcgcctccggtggctgtgcgctgctgtcacaccccgaagttctttcccaagcctaaattgaagttataaatggtctcaagaaaataccagtgtaaagcaagagtaaaccctaataaattaatgcgaatggtaatcggatttggcatgtggaatttttcttgagttctacatgtcgaaatacgctaacaagatttttagtggaattttcagatctctcgaaataattttaaccaattaaaaatgaccacaagcaatatttaatcccaggaaaatcctttttccttctttttcctttttctttctttttcttttctctttttcctttgaaatgggccgccggcccattcttctttttcttccccctcctcccactgggccggccgaaggccgaggcccagctaagcccgcgcgagccggccgcccgcctcctctcacccggggtcgccgacaggtggggcccagctgtcgggcccgtcgcccacctcacgcccgcgccgccgcgccaacaaccgctgccgcgcccacgtcggccacgcccgtgcatgcgccgcgtctcccgcacccacttccccctctctcccgcccgcgccctccccactccccacgtcggccggcgaatcccgcccctaccggccacatccgagttccccctccccaatttaagctccgccgccaccccccctctctttttccccatctcgccgaactcactcatgctccccatcgctcccgcgccgtgcacccatccgtcgctgccgctcccgctactccagccaccgctagccgtcgctagactcgccgccgcaccgcaccgtcgccgccgtcgggttcgcgtggccaaggtccacaccgtccacacctcctccgtcgaggtccgtcgccggagcccgcatcccctcacactccggtgagcaccacctctaccgccgccttcggacatggtttccgctcgccgtggtccacccctctccctctaatctctctcttttcctctcttagggcatctcggagctcgtccgcccgccgccgttgtcctcccgtggctttccgtcgacgttcgccgtcgtcctcctccgcgccggccactctcggtgaggcattccccctcctctattcccctccctctccctcctagccgcgccgggttgagccgccgccccggtcgtgcgccgccacccttgccatggccggccggcctactttgtgccgagccgagccgagccaggtcgccgccgcaccgtccgatcggccccggcccgatgcgggcagtcgatcccgtggaccggaggtggaccaccagcgtggtcccggtccacggtagaccggccaccccgtgcgcctctgacatgtgggccccgcctgtcggcgccgaccccccctgatgacgtcagccctggggcttgttgttatagtaataaacacagagaatcttctaaaaatcataactaattcatccgagctccgtttaagcccgttcaagtctcagtaaatcaagaaaaatgtgtagaatccattaaaaatggttttgttctctgtttcagtagtcttatagccgatttggattgtttgctttgtatgtcgcttagattccggctctcccggcgctccggtgtacttcgaaatagtcgccgaggttcctccagtagcagagcaaggcaagtcatgcttgtcacttgaacatgttgatcctatattgcaaatgctctattgtttttcttcaaatactgcattggtttataatgttactatgggatgtttacctattgtcatagccatgctatttttgtaccatgttcctttgttagcttgggttataacatgagtagacactgggctagggactgcttagccatgcttagttcaactagcacacaatgagggaaatcctattaatgtttagactgtaggttctaatggtaatgttggattagtgataccgcttcggtgttggttaattaaaataaatcacatggtgggctgtgggtgcatggttttgttggtcgcacccatggcaattaaggaccggttcgcgggatgccctggaagaacttatcgtacttaccacaagccagcatgggcaacggctgggcttgtagtgtagctttcctctagctgacgcatccaggcaagggtgggcgtgatggagtttggatgggccatgcgacggcctatgcggcttccggattcacctaggcacgagagggggctgcccgctgccttgcgaggagtgggggtgaaacctgaggtgtggtgtgcttggttagagggggttatgcgaatggtcctgtcacggcctctttccggtatgttgtggtggcatgtcggtgcacggtaacgtgtcgtggggctgtgtcttgtgggtacagttgtacacctctgattagagtaaaactattcaaatagccgtacccgcggttatgggcggtcaaccagattcaccatgactagtctcaccctagtttagttttatgaagtggattagtgcaggtggatggttgggcctgttgcaacatggtgtagtgttggacagtggatggttaatattgattaattattacaactgttttactgctttcaactattgtttataaaggctcgttttatgcaaatgaatcgctctagctactctttgagtttatcctgcatcataccctccgttccggtatgacttgctgtcacatcctgatttttgtttcaggatttataaattatttaataaattattattagaatttatattaaatgttcattaatttacaaatgaagttaaatgtgggaaataaaatttcctaaatataaagcatggatggatttaatttttattaaattctccatggttaattatactctctggaatattctcggatttttcggagctcaattcctaattttaatcatacaaagagcatttcagtaattacccacatattaaattaatcattaaatggtctgattataattttgctaagtacttttagtgtccaagtattttcaggatttttcttgaaattatttgagcgttggaagtatttttaacaattcaaagatcattttagtgattattttaattgaaaaagttttaaaagccctcccttaagtcgttgggccgaattcggcccaacactccctctctcccgcgcggccgagccggcccaaaaccggcccgagtcggctcaagccgagccgcccgccccctcctctctcaggcgccgacatgtggggcccacatgtcggttgcttctcctacctccggccggccggccatgcctagcccgagccgccgccttgccgcctcaaatccgcacccaatccggccccgtttcttccggatttttgaggggttttgatcctctcgttctcctctatcctttcccctaagaatcggagcaaaccgttgagtattttatccgaatcgaactcgtttttgagtttatctccaaaaccgagtttttgatttcccggatcgatttcttgcgggaggagtccgatctcttcaatccaaggctataaataggaccccctagtcctcctctttcgtttgccccctctcccgtcctctcccgtgacccgtagagccgtcgccgcgtgaaaccatccgccgccgccgccggccgggttgcagccgcgccgagcagccttctccgccgtcgccgccgcttgccgccatcacctttaggtgcgccaagccgtggggaagctcggccgcccgttccccttcgccgccggccaccggagcccctccgccgccggtcaaccgagccgccgccgtcgcccctctcgttgccggtcgtcgtccgacgtcgtttgtcgttgtggtgagtaccgttgggttcgtctcgtcgtcctctacgtgtacatgccctcctttttcccggccgaccaccctagctcctgcgaggtcgccatctgagccggccgccacacatcatcatcttctccttttccagttttttctaatagatgaaatcttcggaaaatcataactaaataaccgtagatccgtttcaggtggttcaagttgctaaatttttctaaaatcaagatct

SEQ ID NO: 5672 - DNA, 3020 bp, Oryza sativa
ccggcttaatcgacgagtgttttgttaattatgagttcatataatctcggcgtggaaatctcggcgtgggctgagagacttaagttagatgacagacatgtaatctcggcgtggaaatctctcttctccttttctatccgctccctcgatatataattggactctctgtactttctttgctattaatggattcaggtggggaagctctcccccccgggtgaattttcaaaaaaattatgagttcatatctcccaatttgaagtatggtgattcaaaggggagctatgcagtactagtttttggcttaattacatttagggaagagtggatttggagtactccatgcatatcggcgccgctcgccgtcgccgccgacgctgaatagttctggaagtttgccttgtcggccgtcgtgtccttctggtgctaaaagcccatctttttctccttttttttttcttttcctttttttttggggggcaactgttagaagagagggaagggtgggccatattaagtggggcccacatgccgtatcatatccatgacctttgtccttgcgttgccggcggcggcggcggcggcggctacggtggccatggagatctcacgcgaccatttgccggtgaggtcggctgctccgcctccgcctccgcatctacgcctgattgatccccacccctatctccactgactgtgctatcgcgtttccggcggtggttgatcgaggcggtagcccgtgcggcgcgcgagattccgcccgtccacggatttccggtcgccatcgccggggttcgtcttctccggccagcccctcgccgcgcgaacctgcgccgcccgtcctcggccaggatctggtcggggatcgcttgtggtaggtgttagggggcacttgggtttggaggacagcatcgttgatgtgctttgactttgagttccttgctaatttagttatgctgactgttcccataatccctaaaatcccagcagttgcgttgcgtggtaggttatgtaaagcgcattcctgtgatgaaaaatagaccctgggagacatattatcaattgtatcaagcgatccaacacactaggtccccaaatattgtcgtagataccattttctcttcagtatgctgcttaaaacgcaaagtgtaaggttttctctgtgctgtccagttacatctaattccttatgtttaaagactgatattagtctttggttgggtgtgatgtgcttcttgttaatcgcaatacttgatctttactatgatactatcggtgcatatttagttccagtatgcccttttagttaagttgctgaagcattgagcatcttgtcatgttgatcttcttgtgagtggttcaatatgatttgttctgttttaatggaagtaaaaacgagggctgtcccctcctaatgggaagagaaaaagagatgtattccagcaaccatgtgttatagtacaatccaattagttcgctaagctattatggcctttatatcctgctctgagtatttatttgatttgctgtaaagttattaaatttatggcattgttatacgtgatttgtacttgattatatgctgctattggtgattcatgtaattagagctgaatgggatttttgctagatacacattgcttctttcaacaacccttatgcgaacaaaattaatgggctggtttctcttctgtgctgatttccattgctccatagctgaagcttaagtaattgcaaaatttgtaggaactcatctgttcttttgctgaaccaatagacttttgtaaatacatttgcacaagacattgaggtcaactaaaattcttctatgcccaatggtgcagccatatttcatacatgaatatggctatcgctttgcctgataggttatggactgtgaactctgtgtttattttgatgtgaaaatggcctcaggggaacgcaggataactcatacatgtcaatccatacactaggtcctgagatattttcttaatgcccttttctcttttcactatactctacttgttaaacttctaagaaaagtcttatccctctactgttctattatatctataattcctttgttttgatgtcaaaagcagtgtattcagctgtatattttgttgtgatatgctctggttgatagtagttagtgtccgtgttttgacttgttgctgaacccttgagagcatctcgtaatgtttaactcttatgaattgctcgagatgaccttttttgtcttgatgaatagtggcatggcaacccaaggcaagagcactagggcctagaggtattcctagaaacttaggagcaaacggagaaagacgtagcaggaccagagcagaggacatttggcacctttgaaacaccataaatcatctcgtaaaatatattcaactttaaaatttgtactatgtaataggtggttaaattctgttcttctgagtgatggaattgcatattgtaaatcaatctctacttgtacaaaagatgagtaaatcttttgcttattcttatctacttttttttgtcaaaatgaataggaatatcaggtgcctttaaagtgcaagtataatggaaagagttggtaaattttaatatacttctgaaagaatcatcatccttgtgccattatctttttcatgtattgaacaacagatttgcacatgtatttttgccatctctaacagctctttattaacggatagtatatggctcttcttttatgtagggggatgttgagttgtaagaagaccagatgcatcagctctgatttagtgattttagaggcatgtataacctgtcaaagagcagcaaaagaaatgcgtcatagctgtgtgatacataactttgccaggagatctctctatttaagcacacagactgctatggcattgttaaacatttgctcagtttctcttaaatgcatttctgctggcataagatggtagcatggtggaggttctgttgttaaaccctggtatcaggacttgatcaagcagtttggtacgttcggt

SEQ ID NO: 5673 - DNA, 4198 bp, Oryza sativa
tattaagctcgatgatagagttgtaatttcttcctagaaagatcttttctcctcctcactcagaactctaaacatgtactccctccgtcccataaaaaacaaatcagtactgatatattctagtacgatgaatctacatatgtatgtccagattcgtaatagtactaggttggtttttatgggatggagagagtaataatgatctaagagttttactcccgtcggcgtccggcagcctgtaccagacggtactagtaccgggaggtacaagatcaaatctggccgtccatcttgaaatgatacgattgggaaacagaaaagagaagcggaacgattccagagtcacgccgccgctttcctccctagctgcgctctttctttcctccctccccgcatcgcttctttctcatctattcctccctccgagcgcagaaacggagcagttgcgccgcatccacgccccgctggacgattttttcccatccatctaccgtccgcgccgcggtgctggagaaacggcgcgctcgccccgcatccacgcctccgccagtgcccattttttccccatccatctgctgtccgcggcagcgaagccaccgacgcgctccgtcaccagcaacgccgccgcattcacgagcgaaggtgccgtggtattctgtgtcccctatccccccccctcgacggctcaagcaagtacctaacctcccccgctgccatcggcgcagcctaggcccccattacggctcaaacactgctccactatatggtctagttattttgtaatgaacaattcaatctgccatgtttcttgtaatgaatttgtgagaaaagcacaagcttttgctggagactttaatctttgaatggaaaattttaagctcatctgtcgtctgttttttttatgctgtttacagggcatgatctatcgttgaatggagcttttgacataatttttgtctgctgtgaacagagcatgatatatatgtcgtattgagagccattaatattttgtctgctgtttttgctcgatctcctgtaaaatacatgtcattctgcggagtgatcagcagcacaacaatggttacaaacaagtgttttcaatgaacagcaatccagctagagatctaaaagttgaggaatcactggagtaaagtgctagacacatgggcaataattgctgaaaaaaagtataatttacatgattctgaaagactgaaacaaacatactcgtactagtgagctgtaattcagagtttcagacagtgggagtgttaaatatgtgacaatatattcggattagtttcccagtaggagtttctatcaggtgtatttattttatccccctatatatactcttgtaagccgtacaggaaggggtgacgttcacattgtgattcccctacgtttgtaatcatctcctctgtagtgatcattgccggtcggcatccatggttttttcccgcaagggttttccacgtaaaattcgtgtctccgttgtgcatatattttcataacaagtggtatcatagcattggacatcaatctactaatcacgcggccaccggtgtttttgggatcggagaatcaatctgatcagcggcggcggcggcgctcgtcgttcgttggtgtcgtcgagttgccgacttgccgtcctcctgaccgccctgcgcatccacgcaggagcagcagcagtgccgcgtggaagccgcgcgggagaagcagaaaagcaggaggagcaacagcgtccaatccatccaaccagcgcacagttcccgagaaaacaaaaataatctaccgagagatttctgatccggttgattttttcaaagtgggaattgctacggccacctaagcttgtgtaccaggagataccctgatctacgcttcgtgcacacggaaagtgcaccagaggttcgcgtttttgctagatttaccctaatttctttctagcaaattcaggattaattcccatagcgagtttgaagtatgatctaccgctcctggaccaacacacaagattctcactttgacaagtgaagatgcgagccgttcttgcacaacaagacctcgatgatgcactttctggatttgacaagaagacacaggattggtccaacgatgagaagaaaagggatcataaggctatgtcatatattcatcttcatctatctaataatattttgcaggagatgcttaaggaggagatagccgctaggctgtggttgaagctggaacagatatgcatgactaaggatctgaccagtaagatgcacctgaagcaaaagttatttttgcacaagttgcaagatgatgggtctgtaatggaccatctctccacttttaaggaaattgttgctgaccttgagtctatggaggtaaagtataatgaagagaatttaggccttattttattgtgttcattgcctagctcatatgcaaacttcaaggatactatactttatagtcgtgatactctaactttgaaaaaagtttatgatgctttgcatgccaaagaaaagatgaagaagatggtaccctctgaaggttcaaattcgcaagcagaaggcttggttgttcggggcaggcaacaggagaagaacacaaacagcaaatcaagagataaaagttcaagtggctaccgtgggagatcaaagtccagaggtaggtataagtcatgcaaatactgcaagagagatggacatgatatctctgaatgttggaagctacaggacaaagacaaaagaaccggaaagtatataccaaaaggtaagaaagaagaggaaggtaaagccgcagttgttactgatgagaagtctgatgcagaattgcttgttgcttatgttggttgtgtacaaactagtgaccagtggattcttgatactgcatgcacctatcgcatgcacctatcacatgtgcccgaatagggattggtttgccacctatgaagctgtccaaggtggtactgttttgatgggtgatgatacaccatgcgaggttgcaggtattggaacagttcagatcaagatgtttgatggctgtattagaacattgtcagatgtgcggcatattccaaatttgaagagaagtctcatctctttatgtactcttgatcgcaaagggtacaaatattccggtggagacggaattttgaaggtaaccaaaggctctctcgttgtgatgaaagctgatattaaatctgccaacctataccatctgcgaggtacaactatattaggtaatgttgtagcagtttctgattcattatctaattccgatgctactaatctttagcatatgcgtcttgggcatatgagtgaaattggtttggcagaattgagcaagcgaggattgctagatggacaaagcatcgggaagctcaaattttgtgagcattgcatctttggcaagcataagagggtgaagttcaacacatctacacatactactgaaggtatacttgattatgtgcattctgatttatgggggcctgctcgtaagacatcctttgaaggtgctcattacatgatgactatcgttgatgattattcacgaaaagtttggccttatttcttgaagcacaaatatcaagcttttgatgtgtttaaaagagtggaaaactatggttgaaagacaaactgaaaggaaggtgaaaatccttcgtactgacaatgggatggagttctgttctaagatatttaaatcatattgcaagtctgaaggcattgtgcgtcactacaccgttcctcacacacctcaacaaaacggcgtagctgagcgtatgaacaggacaattatatcaaaggcccgttgtatgttgtctaatgcaggtttgcccaaacagttttgggcggaagccgtttccactacttgttatcttatcaatcgatcacccagttatgccattgataagaagactccaattgaggtatggtctggttccccagcaaattattcagacttaaaagtattttgttgtactgcttatgctcatgttgataatggtaaattggagcctagagctattaagtgcatttttcttggttatccgtctggtgtgaaaggctataggttatggtgtcctgaaaccaaaaaggttgtgattagtagaaatgttgtcttctatgaatcagttatgtgacacgtcaaacactttactaatgttcctgttgagagtcaggagaaagcaaatgtgcaggtg

SEQ ID NO: 5674 - DNA, 1327 bp, Oryza sativa
aggagcctagagtccatatagccatcccattagccaatgcctgacattcggcattcaccataaggaatattagaagaggagactagagtccatatagaaatacaattaggaaatgactgaaattcggaattaaaaataaggaatattagaagaggagactagagtccatatagaaatacaattaggaaataacttaaattcggaattaaaaataaggaatattagaagtagagtatagagtccatatagaaatacaattaggaaataactgaaattcggaattaaaaataaggaatattagaagtagagtatatagtccatatagaaatacgattaggaaataatagaaatttggaattaaaaataaagaatattagaagtagagtatagagtcgatatagaaatacaattaagaaaaaaagaaattcggaattaaaaagtaaggaatattagaaatagagtatagagtccatatatgaatttaaaactaactaaaatttggaataaacataataaaattaaaagtagagtttagagtccgtataaaaatacaatttacaaataactaaatttgaaattaagaaaaatatgggaagaagagtttaaggtcaatatagaaatacaaatataggaatacaatttagaagtaactaaaattcgaatttaaaaattaaagaatattgaaagataagtttagagtccacatagaaatacaattagaaataataaaaattcagaaataaaaaaaaatattggaagaagagcatagagtctatgtagaaatacaatttacagaaaattcaaaattaaaaaaaagaaatattaaaagacgagtctagagtccatataggaatatatataatttacaaataactaaaatttgataataaaaataattaataactaacacgtatataaaatataatataaatattacacattagtagtttcgtaaagttaatgcaaaatttaaaattatgttgtcattttaatatatttgaagaatataatgagaaaacatatatactattatataagagaaaatataatgatgctagccgcgtaatctgtgtgggccaccatgctaattattcaataaaaaaacaacttaaactaaataaatgtcttttaattgatttgataagctagaaagttaatctgttttggttgcaacataatgagtcaaagacacacatgacaaaaacaagtgatgtgacctaagcacaacggtgaagttgccgcgtgtaatttggctcccgtttcccaccactcaacggatccgtgagtccgtgactcgtgagtcaattgccattagaaattgagggca

SEQ ID NO: 5675 - DNA, 2268 bp, Oryza sativa
tgttaacttctaagaataagcttatccctttactgttctataacatctataattcctttgttttgatgtcaaaagcagtgtattgagctgtatattttgttgtgatatgctctggttgatagtagttagtgtccgtgttttgacttgttgctaaacccttgagagcatctcgtaatgtttaactcttatgaattgttcgagatgaccttttttgtcttgatgaattgtggcatgacaacccaagagtactagggtctagaggtatccctagaaacttaggagcaagtggagaaagacgtagcaggaccagagcagaggacatttggcacctttgaaacaccataaatcatctcgtaaaaaatattcaacttttaaaatgtgtactatgtaagtgttgttcttctgagtgatggaattgcatattgtaaatcaatctccacttgtacaaaggatgagcaaatcttttgcttattcttgtctacttttttttttttggtcaaaatgaataggaatagcaggttcctttaaagtgcaagtataatggaaagagttggtaaattttaatatacttctgaaagaatcatcatccttgtgtcattatctttttcatgtattgaacaacagatttgcacatgtatttttaccatctttaacagctctttattaacggatagtatatggttttgcttttatgtagggggatgttgagttgtaagaagaccagatgcatctgctctgattttagaggcatgtataacctgtcaaagagcagcaaaagaaatgcatcatagctgtgtgatacataactttgccaggagagatctctctatttaagcacacagactgctatggcattgttaaccatttgctcagttgctcttaaatgcatttctgctggcagaagatggtagcatggtggaggttctgttgttaaacccggtatcaggacttgatcaagcaatttggtatgttcggtgaaaattcatgcacatttgagcgatcgtacagtactccgaagttggtgttttctatcctccggtaattgtggatcactggtataatgaggaaatcaacctaacgtataattgccatggtctatatttgtgtgtatgtggagactggtgtgtgtactaattttctggaatgtcatttagtcagaagagttgtttagaagaggcataggcaaattctcttgtaaggcttttgtagttccttgagagtttaacatggttataacattagtgcgccggccgtcctcggccaggatctggtcggcatagcttgtggttgttgggcacttggggtttggggtttgaaagacagtgtcgttgatgtgctttgagttcctgcttaattgagttatgctgactttgttagtatccacatcttcagatactattcccataatccctaaaaaaccagcagttgcgttgcgtggtagctaggttatgtaaagcgcattcctgtgatgaaaaatagaccctgggatgtatcaagcgatccacacactagctatgtcccccaatagggacaattaatagaaaaaggtggaaagatggtgatagggaaagacgacaaaatggaagtattaaccaaaagatcaaagaagtattagccaaaagatcaagacggggatagagaaatgtggaacatattagccaccaatcgcagtccacatttcgacgacgagagacctggctgcccttctaccaccagttcacattcccccaaagcatttccaggtcttttacctcctctgcttttggaatctttggaatcacaggcatggagtggttttaagaaatgaagctctgtctcttcatagattgttgacgaattgcattaaaaatgtgactctttgggcggaacgtattaagctcgatgatagagttgtaatttcttcctagaaagatcttttctcctcctcactcagaactctaaacatgtactccctccgtcccataaaaaacaaatcagtactgatatattctagtacgatgaatctacatatgtatgtccagattcgtaatagtactaggttggtttttatgggatggagagagtaataatgatctaagagttttactcccgtcggcgtccggcagcctgtaccagacggtactagtaccgggaggtacaagatcaaatctggccgtccatcttgaaatgatacgattgggaaacagaaaagagaagcggaacgattccagagtcacgccggccgtttcctccctagctgccctctttcttttctccctccccgcatcg

SEQ ID NO: 5676 - DNA, 2780 bp, Oryza sativa
aggccttctatataaaccaattgttgattttgttcacctgcaattgaaatttcattagttattttgtatgtatttctggaaatagatagcccgccgtgccaatgtgccatactgattaaaatgctgcaggtcaagatgcaaatgctgggcatccgtctcctcctagctgttccctcttaagtgctggaagagtaagtctttttgtgctgttatttggaacttgaccaaggatcgaatcttcttatcggtgttgtttatggaactgaccagaccatatgcttgtaccattctttcagtgttatgctggaacccagaatgtctctactatacaaaaagaagaagcttggaaagttaatgtgcggatcaatgactgtgatcttgaacagggttatttatgtggaacaatggaagcagttaatgttcccttagctgatacccctgtgagctactacttccttttccactttgactctgatctttatgttccaaattgttcattcgtatactaatttagtaggcaaacagtttgttccgataaaatgtaaaataatgctatgttttacttcttgttaccattatctgatttgcgtagcaatttgtaaataatttccataggtggtaacattctgggagggggagatagtggatgctaaaaattatacatttttcactggcaagtgggaggcatcgtgagtagttaactatttatgttttatccttgatactatcatctacttgttttattaattgatgccctagtttagggtaacagtccaaacttactcatcaaacattattcctgcttatgcttttgcagcccagaggatgatattagacactggtccaagttcccatcatttacacctcttctggtattctgttgcctatcttcgtgttgttagttgccacgatttgttaggatacatttctcacttatgtttctccacagagtcagatagagacagatggtggcaagtctgtggacttcagcaactatgcttacatattcatggtactgcaccatctgacctttcatgtatgtgccccatttattgaaatacaaagtcataacaacttagcattattctgatgctacatgtagagatggaaagagcagtactttgtcaatgttggagtggactgtgggttgaccatagctggtttctactatgtctgcttttcatgtagcgatggttccattagcgggtattattatgatccaaacagcaggtaatgtatatttcgctggcactttttattgcgatgtaacaactaaattctattgaggaattgaagtgatataaatatttcctgctctctcaatttacagtccgtttcagaagcttgaactgaagtgtaccaatgagaaagattctggatttaccttttcatcctacgagctgcagtgagagactgacaggcctgttgtcattatagtatttgcggatgttaatatacacaatgtgtgtactgaactcataattttgaatggcgtcccattaaaagagctgagatggcatgtttgtaacagtgattttgagcaagatgtattttattctctttgtaatatgattataagctggtaaaatttctaatttgaacctacctgtgtgttctttttgtgctaatcacggcatggttatgtccagaataaataagacaagaatgtgagggctagttgctcgttcaaagaaatatatatacttctttccagagtaattgtagttctgcagttggaggatttttgttttctttcaatatttctgtactgcctacattgtggaatttgtggtcactgattgtgaatctaatatctgatactgagctttatctgaagagacacttaagattgaaatcttgtacattagtttctggtacacagccacagaaacctccttttggtttcacatgcagccattgtaaggtatgatgtaattctatgaacaaagtatacttgggccgaacactctgtcttcgcctccggtcttcggacattgtaaggtaaacatctctctacttatcttgtttcatagagtcttgatctcatgcttcaagccgtagtcaattctctaatgagtaaaattcttctgcatctgcattgcacaggcttcaagttattgctaaaccctataataatattctgcagataggactacccttgcacacctggtgaagcttaccttcatacacacaaggatgggtggacagtggaacaggaggtaactcttctctcctttctggcagaaaccaagaatacactttctttgccctctgtaccaaaggcctctcaacattctcacaccaggcgtcaaacatatcgaggacagcctcagtaatgacttctgagagtactttatcaccttctccaggtgccagcttcagcatcatgtatctcttgaacgatacgatcttctctaacatttgccttctgtcaatattatatgatgacatcgcgccttggattatagagaccatcctgaggactgcctcacagactatagcatatgcatgactgaatatctcggttgctgtttctgacagttctttgctgtgccaatcattttttacaggttctggcccctgttctaagattggcgcaaatgttacagtcttcggtttggttgtgttgacacggagctgctttgattccctcagcatttcattggcttccttcatttctgactcaaacctgctgctgaccttgaagtatggttgctccttgtgtgcagttgggctcgggagtggggaattctgccttgatgatgcttccaagaaaacct

SEQ ID NO: 5677 - DNA, 2017 bp, Oryza sativa
ggtgctcagaagaatttcatatcactacggcgtatcaggatttgatagagcaatttggtatgttcggtgaaagtcatacacatttgagcgattgtacagtactcagaaattggtgttttatatcctctggtagttgtggatcactgtattgaggaatcaacctgacgtataattgccgggtctgtaattttgtatatgtggagactggtgtgtataccaattttctgctggaatgtcatgcaatgaggcatgggcaaattctcttgtagggctttcatcgttcattgagtttaacatagctataacagtactgttttatatgacaaaataacagtactattttctatgacaaaatttgtgattaaactgtgttcacgatttcttttggttgtgcagaaaacaatgaactgataaaacatcctagagttagtgaattttgtgctggtgtaactgattctgaaagcttggcagcaagagttgtcaattttgctaatcaagttaaacttgtgctcgggtgtacaaacctgacaagcattatgcttgtgattaactgataagtaatgtaggcatgtagctatgcatatagtttttcgggtgagttggtggtggtatgtttggtttagaactgactcggtggaacattttcagacgtcgcatcagctgtgcgtttgttgggccgtacattgacgtacttgggccgtgggccgtgggctgatctgtggagagaacatcctggtcacgtctatctcttccccctcggccaacaccgagtttttttaaagagaagggtattttttatccggtctctacatctaaccggatatatacgaccattgaaataggaaacttatccccacaaacaacccaatctgaaattcgcgggagctaacaacgagatgcaggggccggggttggagctcggtggtgacggggtacacgtccatggcgcaagctcaaattcagcggcaagcaactcgtcgttgatgatctggtacgtacgccacaccgcctcctttgagattgactgctccggtatccgggagggaggtgcggacgtagcagggggagaggcgaagaaggtggagtggactgagtcgtcattgcagcccgattgagccgccgtggtagagcagccatggcgatcgatcgccggccgggagcgatacatgcatgatagtccctccgtttctaaatattcgaccccgttgattttttttgaagtatgtttgaccgttcgtcttatttaaaaaatttaagtaagtattaattcttttctggaaagctatgttacttccttgctggaaattaaacagtgcccccgagcgaatacagagaaaggaaaacatgtggtccacttagtttctaataagtccaaactagctaagaagaatcaagggtgcagccctcgtcgctgggagaaaccacacgcggggtggatgaagctgaatgtggatggatcctttgacttgaattcaggttcaggtggtttaggtgtgatgctaaggaatagttctgtcaaatctattttttctgcttccggattcattgagcgctgcagcagcccattggaagctgaactgatagcctgcaaagagggcattattatggcccttcagtggaccttgttgcccatcattgtggagtctggttgcttggtggcggtgaatatgatccaggctgcgaaagaggagaggtctcagtttgctcatctgatccgggacatagggaatttgatctcaggagacagggaagtcttaatccagaaaatttatcgcactcagaactgcattagccatttcctagcaaataaggcccgtgctaaactctgtacagagttttggccggatgaaacttgtaatatcatctcacaatttgtttgtgaggaggctgcttctgagtaatatatttccctttccctgcaaaaaaaaatatacttatatgtatacatatagttttacatatttcacaaaaaaaatttgaataagacgaacggtcaaacatgtgctaaaaagtcaat

SEQ ID NO: 5678 - DNA, 2982 bp, Oryza sativa
ccttgtgcacaacattggcactggactgcccaccatggcccttagacgcggcatctttttcccgagctttctcctcaacatcaagagacgctatcaacccctcaacggagtattcctgtctcttgtgtttgagtgcagtaccgaacttctccaagatggaggtagttttgcaataatgcacccggccacaaatttgtcgggtaagacacacttaaggagttcgagttccttagccatggtttgtatctcatgagcctgttcgactacagaacggttgtcagccattttgtagtcatgaaactgctccatgatatacagatcattgctagcatcagtagcaccgaatttagtattcagtgcatcccacaactccttagcgtcggtcatatgcatatacacctcgaccagacgatcgccaagaacgctaagaatgcatcccacaaagagagtagtggctcctcgaattgcttctgctgttcagcagtaagaactccttcaggtttgccagtactcacccagaagcatttcatagctgtcagccacagagtgaccctgatctgccatctcttaaaatgcacaccggtgaatttatccggcctcagtgcatcggcaaaaccagccatagtaaaatcacagtacctataataaggtttttggattgttgagattatagacatataatgatttaatctattccataaataaatcatgacattacagatgaaaactagcatgaacgcaccattagatctacacatgtaaactacacagtataacaagaacagatcaaatatgcgcaacatattgaacacgtaccgaggtgacggaaagaccggctgcttggtcgaaacttttcgcaggtgtctacgaaggcacgaaacacgcgagcgaagaggaaggcgagccgtcgcgaacgaacaaggagcagtcgcgcgaagcgcttcccaaaaaccttattgccgccttctcccggtgcaggacgtcgaaggcagaggttccagagacctgctctcccgatcgccggtgcacgccggcaagcgggatggagtagtctacgagcgacggcgcagtacagagtaggaggcaaaccctagattgatttcgcgtgtgttgcgtgaagacggcaggtcggtttatatagagaagggtcgcttgatcagggcgcctgcacgatctctactgcgcgtaaccgaaccggataagtcgcgcgtaacttatccggactccacgccgtttgcacgcaccggatttttcggaacgtttccaaaacaaaaacgaatccgaatttgcagcaaaacaaaactgcaaaaggaggctgcatctgcgtaagggtgaggagccaatttttcggaccattcgacgcgtacgtcgtgcacgcgcgccgcctgcccggccaggcgaggcgagcgagcgcgcgcgtgtgtttcccctcttctctccaccacacatgcttcaagtgactaggagggcatcctcccttttaaggaggtccccctctcctagaataagcaaggtggtactaaactccacatgcatgccatcccatgaggtgggcttttgtgattttccaaagaattaatcttcgagtgggctaaggcccattcattaattccaacaatcccccaccaaatctcaaaatcccactgagatttgccttttccaatatactgtttatataccagcggttcgatggagaccaattaaggttgagcatccacctagaactccaagctacacttactcacaacttgaacaatggactacgccttgaattgcaagtcttgtgcaagcaagtttcactcaaagtcttacctggtactagaccgtctgtagactacccctcgggtggagcgtataagtcatactcctaggtctttagtaagcttcctagaagattcacccaaaatctttatagactgcgaccaacagtcaagctcacaaaggtgagttctttcaagaatgctctgcaggacaacatcttcgctaattaaaaccaacagaactcattaaggcatagccaacctgccttgcagctcacgagagtatatgcatcttcacttggagagggtatatatattggtactctcctctagtttattaatggtttgttcttcccaggatctaattcacgggatctccgatcacatagactgggttaccaccatagtataactcacatgggtctcaaacccatctccttcgatgcattgtctatcacatttcgtgatagtcccttcgtgaagggatctgccagatttctcgctgtttggatgtaatccaacgttataactcctgagtttcttaatttcctgacagacttcaatcgtcttttcacatgtctagacgatttcatattatccttagaactattcactttgacaattaccgtttgattgtcacagttcataaggatagccggcaccggtttttcaacaacaggcagatccattaatagatcacgcagccattctgcctcaacagtagcagtatccagtgccgttagctttgcttccatggttgacctcgtcaaaatggtctgtttgcaagacctccatgaaacagcaccaccacccagtgtgaaaacatatccactagtggctttgatctcatccacatcagagatccagttagaatcactataaccctccagtaccgcaggatacccagtatagtgaagccccaattccacagtacctttcagatagcgcattactcgctcaagcgcacgccagtgatcatctcccggattagaggtaaatcggctcaacttgcttacagcaaaggagatatcaggcctagttgcactagccaggtacatcaacgagccaatgatttgggagtattccagttgattcctagcaattctcttgttcttgcgaagcaacaagctaggatcataaggtgttggagaaggcttactatcaatgtagccaaagcgattcaagatcttctccacataatgggaccgcaagaggggaatcc

SEQ ID NO: 5679 - DNA, 3460 bp, Oryza sativa
catgtgtagatctaatggtgtgttcatgctagttttcatctgtaatgtcatgatttatttatggaatagattaaatcattatatgtctataatctcaacagaagaaaccattaatatcaccacggcagatcatacatacaacaacatcgccgaggattacaactgcaatgtgttcattcgaatatggccgatggcaggtgcagacctgcagtaccacgcttacatttttcagatgttttcagcaaatgaagttttatatcaacttgaatttgctttcgtgagatatagtgtgatggtaacacaaaaccttatgtagaagcaaccttacgtgctcagatgaaatcatttgtatcatgcgaagtgagtatagctcaactggttaggttccttgtggtggaaccagcccacctgggttcaaatcctagatttgacacgggtgctcgcatttacggctaattattctttcagtggtagacgacgtacccgtcgacagcctcctagttaggcgacgtacccgtcgacagcctcctagatttgacacgggtgctcgctgtggtgacttcgtcaatctcaagatatgccggcacgttgtgagcgcctgcgtttatactgtgtttctcaaaaaaaaaagaaatcatttgtatcatggagctcttcttattgcctccaaacaatggaaatgttttttttttttgaaacaaacaatggaaatgttttgcatagacaggggtcggagaattaaactccgaacctcaaccacgcgatttattcgtgctcaactggatcgccactttatggtccattaaagctttgggcatcgtttttggagatttttgtaagcccaagtcagcccatgaaaatatggatagctgcccaagtcagcccaagtttagttgggccgagctcactgtgataattggatcatgtccagactgcggggatatgcacaacatgatctatttgtcgggtgatttctttgaaaaaatcacctagattttttctacccttaaatttacatccaacagactacaaaagaaaataaaaatacatatttagttacacaatacttttatcataattacaatgcacttacatgtcatatcaactgaatttacaaatgtaattttagttatataggattgtaattatatatattaaagaaaataacaaatagatatttactcacacaacattgttatcgaaatttcagtgcgcttacatgtcatatcaattgaatttacaaatataattttagttagagtaaagtccatcaccggtccctaaacttgtaccgttgtgtcatcccggttcctaaactcgcaaatcgaccgttcaggtcctcaaacttattcgactgtgtcaccccggtccctaaacttgcagatcactcgtttaggtcctccaacttgttcagttgtgttaccccggtccctaaacttggatttgaatatcatctgggtcaaataagacagtctaaagactttatatttaaaaataattcataactttttcatgtgaactctaatgaagaaaaactttatatcaaacttgtagccctcgactcgatctacaactttgtagttgagtttttttattctaagtcattttttgtcccaaaatgtaattttaaaattaaaatttcaaaatatataaacatgcaacaatattttgggactaaaacagttttaattcaaaaacttttcaactacaaagttgtaagtcacgtcgaaggctacaattttgatataaagtttgtcttcattagagttcatatgaaaaagttataaattattttttgatataaagtttttagaccgtcctgtttagggaccggggtgacacaactgaacaagttggaggacctaaacaagtgatctacaagtttagggaccgggatgacacagtcaaacaagtttgaggacctgaacggtcgatttgcgagtttagggaccgggatgacacaacggtacaagtttagggaccggtgatggactttactcttttggttatataggactgtaattttatattttaaagaaaataacaaatagatatttacttatacaacattgttatcaaaattacagtgcacttacatgtcatatcaactgaatttacaaatataactttagttatataggactgtaattttatatattaaaaataacaaataaatatttacttacacaacattgttataaaaattacagtacgcacttacatgtcatatcaactgaatttacaaatgtaatttttattatataggactgtaattttgtattttatttttattttagtttcaattgagagagaacgagagagaacagcgtgcatatcaattttttagagcgcaaaaaaaaaagaaattagcgcctctaacccgcccgactgaatcctatgcggattcccagcgctatatgtgcacgaatcttgtcacttatcgaacagcctaaaaaagacaaatccaagagaaaaaatcacacgacaaatctatagcaaaatcggcacaacattacttgatattcattctcgctgccaaattttcagattcagtcacagcatcacaatgcactaaatcacgaatatttagtgcaatttagtcataaattttgatatacaaaatggtatggttataactagtctgaaaagggctgatggttgcacacaagcaacggtaaaagcctaatattagaaaggagattgagcatccctctcctaataacaaatcttccgattattacatgacatgccaggaaaactgtcatacacaccagtctctccacatgtgaaaaatacagaaactggcaaatatacaaaagttgggttcctcaatatatatgccagtgattcacaattaccagaagacagaaaatgatgcaccaaacaactgcacaattgtttaaagagctttcacacaacataccaaactgccctatcaaatcaaattctgataggttatcgctcacactgtgaaattcccttaagcacctgttgactgatgtctttctttcacaacatgaccacagccaccaaaatgcatgtaagtatgtaaccatatgtaattgtaagggcaagcagatgataacctgtatgaaccactaaaatcagaagaggtggctgccgtgttcttacaagtcaacggctgaacggcgcacggccatcatagcatccacaaatctgtttgcaataccacagccgcgatgccgaccagatcctggccgaggtccgccggcgcaggttcacggcgagggggtggccggaggacggcttccggcgacagtgatcggatcgtggccgagcaaaatttggcgcgccgtcgtttcctcaccgctgcacaagatctagcgaattgaggcagagaggaggtaagaggatgtagttaggaagccggagcagcgagatagagactttttgggcgagggcgagggcgaaggcgaggtcgccatggccgtggccctct

SEQ ID NO: 5680 - DNA, 2096 bp, Oryza sativa
gttacaagcaaaaactcaaaatctcttatattatgggacggagggggtagttgctatgcctatattttgtcgggtgagctggtggtggtacgtttggtttagggtttagagctgactctggtggagaccctttcgggacgttgcatcagctacagcctacagggttgcgcgtttgttgggccgaatattgaagtgcgtgggccgtgggccgtggccaggacggcggatggatcatcctcgtgacgtatctcttcccctcgaccaacaattaacgagttgcgggtggcggcgttgaagcagctggactttttttttttttttgctatatatagggcatgtttggcacaagcttcagctccacctctcttagagctggagctcagccaaacagttttagctccacctaaaatgggagcagagctgggtggagctctcacaaaataaactagagttgtggagctgggtttagacagctccacaactccactccagacccaactcctagagctaaatttaggagttggagctctatcaaacaggcccataaagtcaattttgctatatctcactcgaaagatttcttttatctctcactcaaatttacagtgtattttcttgtaatttatgaaatttacatggtaacttttgttttgaaatttatattggatttggtctttttctcgaagatatggtaatttagtatccattatgatgtttcttagttgctttttgctttttactatgtctattggattttaatctaaaaatttaaaatatgtgtgaaaagatttatagctactcccatataaagttctatttttctaacttgctgatcttgagattttttttcatcgaaatttatttttcaacatttgcttttagatcgctaagaacacatataaaagttttatttacaaattattttttgcttgcaaatatgtcgggccctttttttgtttttgtttttatctttataatattcgttgcagtttgcaaaacacgggaatttagatagttatgtaaaagatgtcaaagagacatgatgcggtctgacagtccaacgtaaggaagcttcgtagcgcaactatggggatgttcataaatctaggtgaaaagttttaccgtgtcacatcggatatatgagcacatatttaaattattaaacatagtctaataataaaacaacctatagattccgtccgtaaactgcgagacgaatttattaagcctaattaatccatcaatagtaaatgtttactgtagcactacattatcaaatcatggagcaattaagcttaaaagatttgtctcgtaaactagtcgcaatttgtgccattagttattttttagcctatatttaatattttatgcaggtatttaaacgttcgatgtgacagggcgaaaaattataaggcgggatctaaacatggcctatatcagttggcatcgcacgtttacatcctcgagcagtagcactgcatgtctgcatggcagctggagcatcactcgccggcatctacgtgcgcttgagcgaatgcgtccggcaatattatggagtaaaagattgcttatgttgcccctctttgatcaaaaaatagttgggtgtttggcttaggtaaagttggttttaaattttagaaataattttaaggacctttcggaaaacacaagtacacagaacaaccagaacacaagtagaaaaggccacatgaaccagcttttatagaaaaaaaccaaaacagggtcacaaccacttgaacgttcactggagaggagagattccccatctaaatttccattaaggtcctgtttagttttaaagttttttttttccaaactttcaatttttcatcgcatcaaacctttcatacaccactggtggacaaaccatctttggtcggtcgaccaaatcccacaatagccctggttccattaaaaccgggactaaaaacgatttttagtcccggttaaaaaaattttgatctttagtcccggttggtaacaccaaccggaattaaagatgatttttagtcccggttcatcccctgtcagatgtatgttagggggtcgaggatctttagtcccggtttatacta

SEQ ID NO: 5681 - DNA, 4196 bp, Oryza sativa
ggtcaacgtttgcgagatatggctgctgcaaaaaggtcgcagaagatagcagaacttgaaaaacagctttcttatttggaggaactaatggagcaacttgatggagctgaggaagaagaagcaacagccattttaggtagatctgggtatctttcccagcaggaaatcaaatctgctattttgaaagcaacacaatccttaaggaaggcaaagggggagtccaatggtaacgaagagaaagcagatgcttctggggttgataagtatccacttgtgtctgtccctgatgaaacattgacaccagaacaggtgtgtgtctgtccatttatcatctgtagcaaaggggtttgtttttgcttgtgttttggggagaccttttgcgactgtgtgacatgagcacatatctattataccaagtttagatattttccatgtttcaaatatttactattcttatttcactttcgtatactttcagttaaaagagaagaagaaacagatactacttaaaaccacaacagaaggtcgaatgcgtgccaagcagagacgtgctgaggaggaagcattgagggagaagcaagaagaagagaggcgtttgtaagttgcgatgtccccagtctgaaatttatcattcatacggccgtcataattagtttatctgcattcagcttaagatcctcttttttgaaattttaagtacactgggttagttaaccagttatttcagagccatctttttagtttttgttcttgtgatacgcttcgtgctgatataagccctggaaatcaagcatgcattctgcaattccaaacaatgttcaatttactattctattatcctcatatcaatgaaatatacactctatgaaaagggataaatttttctcgaatctgtcataaatatttgccatgcgctctatacgctgcttttatgatatgttttactttaatatccagggagaacccagagttataccttgaagagctccgtgctcgatactcggaactttctgatagggttgatcagaggaagcgacagaaactcaatggtggtaagaccaatggtaatcataattcatctggtggagtaggccgtggggaacgtcttaatgccgcccagaaagaaaggatgcggttgctcacatctgctgcatttgatcgggggaagggcgaggacacttttggtacgagagatgaagattggttagtctacaaaaagatgagcaaagataatgacgacgacgacgatgggaacgatgatgatgaatcagaacttgctcgaattgcttctaagatccaggtaagatctcacgttcaagcaatcttgcttgtgagccgtgatggccattttgtcttacttagatctcacacctcaatagtttcttttacaatcataaactatttgatgcttccatgtgcaggatatggaccctacatttgtgaacaaagctgaagctgtccaacagactcctgagcctcctaaggtccggactcttacagcagaagattacaggatttccatagggatcgagcggttccggtgccctgaaatattgttccagcctggtatgataggaattgaccaggctggtatcgatgagatggtcagcatctcacttaggcgactaatggaagacgaggctgtcaaggagcgcctttgccagtccatccttgtcactggaggctgttctttgatcccaggcatgatccctcggctggaatccggaatccggcagtttcggccctacctctcacccctgaagcttgttagagcagccgacccccttatagatgcatggaggggcgctgctgcctttgcagcttccagcaagtttgggaggcacaccttcagcttagcagattacagagagcatggagaaaacttgtttcatcggtacaacattgtttactccttgtagtatctttggcagcatgggctaacatggatatgctgacacccaatgttgttacatatttatgaacaaagaacacaagtcaatttattgacaggcaatagcagtaaccatttttgaagcaactcggtgttcggcgtaattttactgtggcatttatggttttattatgtatattggcctgttagctttagaaccttttaatgtaagacaatggtagcttgcatattatacagagagggtcttgagtttcgtcaagaattttggtttcggttacgttatatagtcagcgttttattgtcctgtataatttaccgtcgcgaagaattctacacacattattataaattgtcaataaaaccatatcgaaactgtcaagatggccgagttggtctaaggcgccagtttcaggtactggtccgaaagggcatgggttcgaatcccattcttgacaagaaatttttttttgttttttgggtaaaaaaattgaattttcggtcttcatccctctctctgcaactcaaatttcatgaaacttccctaaaaactcgaattttcggtcttcatccttctctctgcaactcaaatttcatgaaactcgaaccttctgtttttttttactcgaattttccataatctgggtcttcagcctcatgaaactcgaaccttctgtatctttatctagcgctaggaagcctaggatcgcttttttttttttcggtctacaaaaataacattacatttgatcaaaatatccctaaacctgctcagttcaaaacatcccgcacatgcatgatgtatgtccttacatttttcagctgctcgtggcaaaaacatatgaacctcgtttatgatctgggatggctccaagaaaagcatggccaccctccaaccaccaaacaccccctagaataggttggcaacttaaccgctccaccagaatttagcccttgtcaccactataactcagaaattggttccctcagggttgccaactttaggatagagtccattttttgcctgatcagctcctcccaaagctctaggatttggttccattcttgcacaaatcatgaatgaaatcagaaaattgaagcgcgggatcagcaccaaacgaggtgatcaccccgtccaaaatggtaatagatttgtcggtcttggttcttttcttctcatctcaaatttcaccattcctgcatgtttcataatttctcatgacatttcgatcttggaaaatgtatagcttgatcaatgtgttccaaattattcttctggaagtaatgatacagggatgttagtgcctcacctgcctagaaataaagaaatgatcatgcctgattgacatttccctcagcgtctctgaatattgcaggccaaaatccagtcgatgaatgggaggagcaacaacgatactggccttcgccacgggcaccgccggtgagtccgatgggatcgccgcggaccccaaatgggagccagaagaagccagttctcggcaaggtgaagagcaaggctaagaaatggatgcacctgctgcatcacaagaagaagccgcaagaagacatgatgtggaccccccgagcaggacccagtgcagacgacagcaaggagcacaacgatgcagactacggatccccaagcacagctcgacatccccattcctgtatgtctgccagacttcagaatattgcatgcattggacaatctccagttaaattcagtcaagatatcaattatagtataattttgttatgatgaagagtaatacttgtgttttccatgtaaatcgtagcgtgtgaatcagcatgtgcacctgaggttttcttggaagcatcatcaaggcagaattccccactcccgagcccaactgcacacaaggagcaaccatacttcaaggtcagcagcaggtttgagtcagaaatgaaggaagccaatgaaatgctgagggaatcaaagcagctccgtgtcaacacaaccaaaccgaagactgtaacatttgcgccaatcttagaacaggggccagaacctgtaaaaaatgattggcacagcaaagaactgtcagaaacagcaaccgagatattcagtcatgcatatgctatagtctgtgaggcagtcctcaggatggtctctataatccaaggcgcgatgtcatcatataatattgacagaaggcaaatgttagagaagatcgtatcgttcaagagatacatgatgctgaagctggcactggagaaggtgataaagtactctcagaagtcattactgaggctgtcctcgatatgt

SEQ ID NO: 5682 - DNA, 7158 bp, Oryza sativa
cattattatcacctctttgtttgaataatcttaactaatacaatgcatgcacccaatagaattaagcatcttgatttaaaaacaataatttagaagagagaatatgctattaattgtcatgcatacatgcacgccttatattatgaaacacctttaaaaagtagttgcgccctatattttagaacagagggagtaatattttagaataactttcatataaaaagttttcgcacaaaatacatcgtttagcaatttgaaaagcgtgccatgaaaatcttaatcttcggccaagtttagttctaaattttttcttcaaactttcaactttttcatcacaaacttccctacacacataaattttcaactttttcatcacatcgtttcaatttcaaccaaactttcaattttggcgtgaactaaacacaaccttcatctaactcttgttgaaggaaagaactgaagcttagtactaaacttgtcttgggaatgtaggaatcgatttttttaagggacggagggagtacgttcacacattacattattgcagctctgcctccactgtactcctccattgcacacctgccagaaatgcatgtctagcacgcagtcacgcacacatgtagtagtacaaccagacattccatgcaaagtataatccccaaactgccttcgttcgagattccagcgaccagcggtacagagcgcggaactggcgttgaccatattccgatccatttcgaatgcctaaagatctgaccacagggtgacaggggggacagagatcagttggccaggaaaccacggtgttaacttctcctgacgtggagttctcgggccttgtgcgatctcatgtgttcatctccgtttttgagcaagtttaatagtatagccaactagaatctctaatttatctatagtcaatttaatagttcattcatacaatagttacatactacactattaatacttgatcccacctatcatatacatactgtgttttgaagtccgtgctacagctggctacaaatctgtagccaactgctcttctctctccttatttactacctccgtcccaaaataagtgcagccgtggatatccgtacccaacgtttgaccgttcgtcttatttgaaaaatttgtgaaaaaattaaaaatatttagtcacacataaagtactattcatattttatcatttaatatcaataaaaatactaatcatagaaaatttcaaataagacgaacggtcaaacgttgaacgtgaatagtgcaaaactgcacttattttgggacggagggagtatcttcttagaatatgtttatagccggcttatagcctgctattgtacctactctaactagcaagtttatagtgtagctaactactgactttgaataatttatagtcaatttaatagccaattcataaaatagttacatataagtatatactacgtaattaatatttggtcacacctatcatatcatacacatgcatttaggagtttgttctgcagttggctacaatgtagccagctgctcttctcaccagccatcttcaaccctccatgtcatcaagtatccataacatttaatacattgacatataagaaaaatatgtgatgcactacaagaaaaatactctgtatagacatttttctagtactgtagaggcacttatcaaatgcctttacaacaatgtagaggcattttaaaaaatgtctaataagtgtcttatggtgaattgtctctacaaacgaagagacattttataaaatgtctataagatggtagaggcattttttagagacactaaattgtaccgcaaacatataaaaccagtccaaaaaagagaataaaatagtttccttgcttttgataagtcttgaactcatgatcttttggttaaatcattttaatcttcgatacactaaccaactcaactccatgtcattacttgtatacttgttcctttaattacttatatttagtcgtttagtacacattatcattctaaaaagtgtctctacatagtttaaaatgtctcaacaaaatgcctttacatattagacgcattttatagtgccgaaagaatgcctctacaagataaaatctaacaaactgatataaaaatgtctctagagtaaaagttttctaggcaatttttaaagtgtctctataaagtgtctctacactataaaacttctgattgtagaagcaatttacaaaatgcctctacaaaagtgcctctatacgaggtttttgttgtagtgatgagagttaataagaagagaggtaaaaagatgaagataccatttctcgtaaagaaacatctttacacgagaaccaagaataaaaacaaggggattagatgtgaatttaatttgaagacatcatccattggatatatagactctatatatagtgtctatatgacatggtaagtatggaatatagtttctgctattgtgtcttctctaactactttaccgaattattattgctggtcgccaacgcgcggatcattattattgatattgtatactactccatattttaaagtttaatatatgttgaatacataggctattttctatactatagcgatttagattactaactgttttcagtttttttttaaaaaaaaatcgtaattaaaataataaacatcatatttatttaatattgaattttgcagttgctacatttattaaaaaactatatgtaattaatacctaacacattattacgatctacagttgtgatattatgatttattagatcaatgactagatttttctgattaatgtgagagctcatagaaaatgttaggttagtataggtatagatatagatagatagatagatagatagatagatagagggttaaaagctatttttctttgtggtggagttacggactgcaaatccatgtcttagctaaatacaaaagacgcccatttttttttaaaacaacggcagagcttgccatttcactgaataaagaagggagcaatatttacatgtaaggagaaaagtaatatttacaaaggcgaccgggcactaaggcaacatctctgctgagcgtttggcttcccgccgtagcccaagcttttgcctcatcctttatctttgcgatgaggtcgcagtgcttaactctttgtttcggaagatttgtcggtttcactcgttccaaatttcccaggagattaggaggattaaggatataattccaagttttggtacagtgtggcatgtggcaagaaattcccaccattcatgaaccgtggtcgattgtgtccagcttaccggcgccatggatgcacaggttatccaactggcaatggcatcccatattttcttggtgtatctgcattgcattccaccaacaggtgtatagtaatctcgtcggtgtgccgacatagcgagcaaactccattcttctgtcagccccgggtcgctagtcggtccgccatccaaaccctattttgaatgattaaccacgcaaatgtccatatctttgattttgtgacgaacccgtgcaccatccaaccgtgtcggtgagaaaggtcgaatggagcccgtactgacgaccctgataggtgaacagttgcacggggttgcacccgcgcggtcagttccaaaccctctagttcaccttctcctctataagagtatatacacatgtatatatagtataagagcgcacgcgcctatatatataatttttttagggtgaatagctaatttagtccctcaagtttcagtgaaggcttaatttgatccttcacgtttcattttgtctatatagatccttcaaatatttgttttagcttgaaatcattcttgggtccacttaatatgccatatggctatttctagtcaatatttctattagaaaatgtcctttttgcccataatttatatacatctatacactagaaaatagaaagccaacatgaataaacaacattacagatctacttcccattatttcaacatgtgcacatgaaacttaagcaattgctatcgtatacacttgctagtacataatttttttcgttttacataatatactatgtattatctataaaaaattcaagcatgcaatttctctcttatatatgtgaatgatgaggggtataagtgtcatttatgaagagagttgttggttcaaggataagtttgaactaaaatgaaaacttgaaggactaatatggatagattgaaacatcaaggactaaactgagcctcagataaaacttgcaggaccactttggctattcaccctttatttatgtataaaaaatatacatctatacagaagtttatatacgacatatacaaactttgtatatgacgtagacaaaatttatatacatgcgcatttaaaaaatttaaaaaacatcacgtatacaaagttcgtatacatatataaaaagtttgtatacgagtgtaaacaaactttgtatacacatatataaactttgtatctcgtacgtatagaaaacaaaaaaaacccaaaaaaggaaaaaataaaaaaatactgaaaagaaaaaaaaccaaagaaaaccgaataaaacaaagaaaaaaagtgaaaaaaagtcccacgcgcggcgcggcgtccgccgccctcctctccgcgcgcgccacctgtccatccgcgcggagggaggcgcgcgcggacatccgcgaattagcaatctcttaacctggcagccatatcgcccgccggtcaaacccgccctctttgttcgtcgacggctcgacctcttgttgcttgtgtcacctccttttgtcttctacccgagattttccatagagaaaacggccctcacccacggccacagccacgggccgtaggtgtcagtcgtgtcacacacaaaaaaaaaaaaagttccacccacccgttgtcttcgcatttcaacccttaatatccgtttgcctataaatactctctctgtaggtacatctctctaccatctctgtcgtccaacctcttagtttcctgcttggttttgatcgattcaagctagtaaacgctgatcatggtgaacgttgctcgcttggatcaggctgacggcgctgcgtccaagatcgccacggcgcgggcgctgggggcgttcggcctcgccacagcctctctggccatcaatctggccgcgacacgcggggcaccgtcgtgcttcggtgacagcgcctggtactaccacctcgctctcgtgggttccttcctctccggagtggcccaggtggccgccgccgtctgggtcgccgacgaccctcgcggccgccatgccgtcggcaagaaaatcatgtacccctctattgcacccctcctcgtggccgtcggcctcaccggagcggctctgctctggtaatatttccagttttccaccttggttcatctacacgtaccaacaccgacatcgccgcctaccgcgccagcttctccccgcaggatcggcgcgaatgtatctgttaacaaccctctccttccaaactcggtaatctcaagaacaatccaattcaatacaatctcaggaaaatagaagaggaattgaaggagaagaagtagaggatgcttctagaagtggcagtgaggaggaccatggagagagagaaggatagagatcgacgaggttcaaccgaaccaagccgccgccgccgccgtggccgaagccgccgattcctgatctgttcgattcccctggtaagagttgtcctgttgttttgtagcttcaccttggactggcctgggccaacattaggagagttgatggactggcccatttggcagcccagccaggaccttaacagtatcttacctgtttgatttgtgtgatgttgctttcttgatgtttgctgtttgggtcatcgatcgtgcttttgtgtatcacctcgagtatctagtatctaccatcaatcaatcacgctgtttccctccactgcctgctgttgttgtgttgttgatcaatgcttggattgatgaatatgtgatgcaaattttgagtcactacggtatactcaaatcaaacaaaaaaatcagctaatttgcagaagagtgtatttggaatgttggagtaccccgcgaattgtgaagccggtggcggcgcggcgaccggcgattatggtgtttgtgatcactaattcaacatccacttcatcgctgccgctggcggggctccggcgacggtgcgcaccgtacggccggcccgccgccgccgccttgtcctcccttgccccttgccgctgtcatgtgatggccaaaagggttctttttggtgatttttctatccagttttttaatcaagattctgatccaattgtttcgattttggctgaaaggtgggccataagtggaccccacatggccataggagagtactactaatagtaggagattactggagaaagagaggagacatcacagggtccccgagactgggaaatttaactatttgtaactctcacaattaacgatttgccacatcctatctatcacatgtagactcttatgtgtctatgatatgtgggtctaatagtaaattgttaagctccactggtaagagtggcaaatatttaaaagccccgcggagacttgcggctgcggcggccgagagggccacggccatggcgacctcgccttcgccctcgccctcgcccaaaaagtctctatctcgctgctccggcttcctaactacatcctcttacctcctctctgcctcaattcgctagatcttgtgcagcggtgaggaaacgacggcgcgccaaattttgctcggccacgatccgatcactgtcgccggaagccgtcctccggccaccccctcgccgtgaacctgcgccggcggacctcggccaggatctggtcggcatcgcggctgtggtattgcaaacagatttgtggatgctatgatggccgtgcgccgttcagccgttgacttgtaagaacacggcagccacctcttctgattttagtggttcatacaggttatcatctgcttgccccttacaattacatatggttacatacttacatgcattttggtggctgtggtcatgttgtgaaagaaagacatcagtcaacaggtgcttaagggaatttcacagttgagcgataacctatcaaaatttgatctgatagggcagtttggtatg

SEQ ID NO: 5683 - DNA, 8799 bp, Oryza sativa
tatatatggacggcatggtactggaccccggacctcctagaacataaagtggtcctaactcatctaaaatggtcatagcacatacctgtaataacaacaaaagtggtcctaactcatctacctggtcgcgggacgtgttgtaacaaaaaaatacggcatggtactggatctcctcgaacagaacaaaaaaaaaagtgagaaagaaatcacattgagcacatggcatcgcggcgccaaatctactcccactgacacagcgggaccagagaccagaggccagaggccctaatcgtccgctagtggaaggaaattgctggtagtagtattgacgacgtctttatcaacgaagcttcgtgccaacccgctcttccttctccagtttgcttcaacccgattatttcccgtcgggcgtcgggccgtcggctacacgttggggacgccatttcaccggcttttttttttttttttgcggggggcatttcaccggcttttgtgtcagttggagcaaattcaacccagaaatcaatgaagcttcattctagaggtgatgcctaggcaaataagacaaaacagtttactaaagaataaaaattaatttataggtaaaatttttactgcctttattctaaaatatgtatagctgtcagttaccgtgtccaatgtttgaccatccgttttatttgaaaaatattgatgattagtatttttattgttattagatgataaaacatgtataatattttatatgtgaccaatttttttaaataagatagacggtcaaatattggacacggaaaccaacaattacgcttatattgggacagaggtagtatatatttatttgtaacaacctaaaactcaacgctaaaggcttggttttaagagctttcttcggatagcactacggctcggacgttcgatatctcaccaaatatcggacgcccagccaaacaccgagcgtatgtgcatgtgcatgttgccgcactttattcttcactcctcaatcatgaagaatcttctcatctgacgtcccatgtcctaaagaaaattggttggtcaaatgttctagttgaccattgagtgaaacatcaaattatatatggtgaaacaaaaaatcagcaactgaaacatttaaaaattttatgaaacatgatgaagatatacgttgaaacatatcgctatcacatatgaaacaatagtgttaacggattgaaacatatgtttttctttcatcaaaatataatcatgtgatatcttgttgtaaagatttaattacaacgaatacaacggtgtgaccgaatcatagattggataattagtttatgagaaaaattattttgaagctcgctaaaatgcatacatgcatgcatgtttgaggtggagagagagtagtgagatatagtttcatgaaatttgtgaaacatgcataagagacatattgaaacatatctatcactatcgcgtatgaaacaaagagtgttaatggattgaaacatatgattatttttaatcagaatataatcatgcgacatcttgttgtaaagatttaattacaacaaatacaacagtgtgatcggattgtagattggattagtaatttacgagaaaaaaaatgttttaaatatcgttaaaggtacatgtgtgtaggcttgaaaggatgtgtcagagtcagcccgtccaatttttctccttccgtccggacgtccgagttgaagcattaacggttttcttctcaaatcaacctatattcggacgatgttatcgttccgttgacttgtgtccttctcaaaggcttggttttaagagatttctcttgttagattgctatttttagatttagtgtatggttttgaccagttttccataattaataagattttaggtctgacttttcctataaactagataactctcttctccctacccgttccctcaaaaaaaaaaaaggggcggactaaggcttatttatatgccagtaaatcggtaatatggcgatgcagaggctgaacggtaggcgtgaaaaagtacactcacttgagacaactgtcgctaatccgagtactcgatcaatagggggagaaatagattttgtaaatcaccaatcagaaaaaacaacattccgagtagcaattctaaggcttacggaccttaagaaatgtgtaatacagcttagaaaccataagtttgtgttccttgcaattttatcgaattgtaaagagggatccaaactgcgggtgatgcacaacaaaacatagttctgaacataagttaggaagaacatggtacgaaaagatttcactagtcatcgtccttgattcttttcagcagcctagcggcccaccggcgtagtcttctcttcagtgtgaagcccaccacgacaccgactgcgaagctgacggcgctgatcttcgtgcaagttgatagagagacaacacgaccgcaatcccatatggatcatgaaaaacaaaagcttccacaaatctgttgcaataccacccacagccgcgacggctacgggcaaacggctcgccggcgcaggttggcggcgaggggaagatggcagcggaggacggattccggcgacggtgatcaggttgtgaccgagaaaattttggcgcgccgtttcaattcaccgcttcacgcgcgaattgagaggcaagcggatgagttagggcgcagaagctgcgagacagagatacttggagtgggtgggcagggcgaaggcgaagtcgccggcgccatggccgtggccctcggccgccgcagccgcaaatccgcgacccttaccctctcctcctccactaatattactcctactcctatcctacgtggcatgtgtggggtccactcatacaaccaaacattatagtagtaattcaatcagaatcttgattaaacatagatacaaaattcactaaaagaacccttttgacagcggctatcttcccaagggagaacaaggaggcgggccggccgtacggtgcggcgtgcggcgtggacgtacggacgccacaccgtcgccggagcggtagacaccccgccggcagcggcgaggaagtggacgttggattggtgatcacgagtgctccaaaattccaaatactccctaaattagataatttctacaattagttgatttgccttttctatatggacttaaaacttgcatcatcacatgttccatcggtccaagcattgatcaactaacacaacagctagcacagcagcaagcggtggaggaaacgaagtgatcgatttattgtagatatataggcgaggtgatacacaaaagctcgatcagtgacccaaacagcaagaaaggagcattacacaactgaaacaagtaagatcgatatagatacattcgcgccgatctagggagaagctggcgcgggaggcggcgatgtcggtgtagttgaacgaacctaggtgtaattaccagagcagagccgctccggtgaggccgacggcgacgacgagcggcgcgatggaggcgatcatgatcttcttgccgacggcggcacggcgaccgcgtgggtcgtcggagacccagatggccgcgccaacctggcccattccggcgaggaaggaacccacaagagcgaggtggtagtaggtgttaccaccgtaggccggcggtgggtcgcacgcggcggccaggttgatgatcagagagaccgtggcgacgccgaacagccccagcgccgccgcgatcttggaagaagcagcgccgtcgacctccgcttcccggcgagcaatgtcagccatcacctgtgatgtatggatcttcctattattcagaatcaaataaatctaggaaattgagaaggttggagcttggcaattagcagagatgctagaaagatcaagctagagaggagtgttgtgcctgcgtgccttcagttttgccctggtttatatagcggaggggaggtgaggagagatgacgggcatgtggcattctgtcccctgtcgttttctcagtctcatatcttttgactgtcgaatggtctcgctcgtttcttatgtaagaaccggataaaaatttagatactcgtggcacgttttttaaactgttgaacggtacgtttcgtacgaaaactttatatatgaaggttgttctaaaatattaaattaatcaattttttaagtttgtaataattaaaacacaattaatcatacgttatcaacaccttattttatgtgaaacacttaatatttatcttcatttcatcttctatccctacgagcggtttgtttctatctgggaatgatgtcatcggtttgtttctatctgggaatgatgtcattcagatggtacagacttccggacgtttcagatggtttttacataggagatcgtggttagtaccatagaaattgatagcgataggagcaccatattgactgggagactttcctcgaaaaaaggatatcttttataacagcgtgtgatgaattttcacatttcctcaaaaaaaaaaccgcactggactacgattggtgactaatatgttccacatttctctatccccgtcttgatcttttggctaatactccctctatcccaaaatatttgacgccgttgacttttttaaaaatgtttgaccgttcgttttattcaaaaaatttaagtaattattaattctttttctatcatttgatttattgttaaatatacttttatgtatacatatagttttacacatttcacaaaagtttttgaataaaacgaatggtcaaacatgtttaaaaaagtcaacggtgtctaacatttagagaatgagggagtacttccttttatcattttgttgtctttccctatcgccatctttccacctttttctattaattgtccccattgagggacctagctagcgtgtggatcgcttgatacatcccatcgccatctttccatctttttctattaattgtccctattgagggaccttagctagtgtgtggatcgcttgatacatcccagggtcaatttttcatcacaggaatgcgctttacatagcctaccatgcaacgcaactgctgggattttagggattatgggaatggtatctgaagatgtggatactgatagagtcagcagaactaaattaggcagcataacccactttctccggtcctttggatgaaccacacttagggttgaaaacggagcagatagtttctgtccgctccggaggaaaacgaaaacggatacctctcggatcggatatttctcggatagttcggatacggatacgaatacggatattttcttccggatgcgaatacaaatatggtatcggggtttccgtcggatacggataataattcggatgtccggtgaacagtgctattcagatatccgcagaagccatgagacatacctcatttctttataactttatgaccttcaatatacctttttacattttaatagtagttcatctcttaaatctagtccacactattaatattatttaaattttaaaaaatatttataaattatactatattttatataaaatgagctaactatatatgttgatatttttttatattagaagttaagttggttttcgtgttccgaaaaaaaattgttttcgtattcgtgtccgatcatattcgatacttatttgtattcgagataatccgtatttgtttccgtattcgagctatccgtattcatttccatatccagcaaaaaatatgaaaacgaatatggtatgagcattatccgtccgtatccgctccgttttcatccctaaccacactgggctgcaatgtcaaaaaaggaaaaaccacactggactgcgattggttttttttttaaaaaataataattcacccgggagggggagtttccccacctgtattcatttgaaaagggagagtccaaagggtttagatcgtgaggattgctcccatccagcaggtaccacggtactagcccagttccaaatctcagccattcattcagctcgatcggacggtggaaattatgcggtaactcagtacatatttgcccatgaggtggtaccagaatagttagaggggtggaagggtaatgttgtcttttcacgtagggatgcgttttgagtggtgaaactagggtttttacaatccatctcgattcagctctgatccgtgagaggtggcggcggtgctggacgggagcaacgctcggaggacagcggcgaggtggtccttgggaggtggcggcggctgatccgtaggcggcggcggcgaagtgggcggtggcgacagctgattcgtgggaggcggcgagtaggtggtccatgggaggcggcgaggaggtggtggctggtccgcgggctgcggtggtgaggtggtgttggcggcggtgtccggtgcttgggcccgtgtccgcgaggtggcggcggcgatggcgtcggcagcaggtggttcgtggcgggcatccttcttcaacctctggttattctgtagcactgcccacagctcaagcactcaactgttatgttgagaaaacgaaggcagaagagagaaaatgaagctagagctggaaatggctgaccggctttcagacatggaaaattcattcaagaagttgtccaagcagaaaaaagagactgatgacattagaaattggttcataggaatagtagttgtagctgtgttccttctcatgaagctatttgataatatgtactatgcttgccattgttgattttgtacatgtcaattaccagaattaatggatggggatcacccagcatgttgatgtctcagcaaccaatccatgtgaattttgtttatctatctcccattgtctgaaactctaaattacagctttttgagatgggttgtctaacttatccttcagttttagattcttgctaagtcctagttcgttctgtttggctgaaaatttgcagaactctgtttatctatctccctgttatgaaaatagatgcacaacggacacgaattttacatggaaaacccttgcgggaaaaaactacggacgccgaccggcaatgattactacagaggagatgattacaaacgtaggggaatcacaatgggaacgtcaccccttcctgtacggcttacaagagtatatataggggataaaagaaagacctaatagaaactcctactatgaaactaatccgaatatattgtgggcccaaaatttggatcacatatttaacaatctccaccttgagacgaatttcctcttgtagcataaaaacatcaatcaccaaaaatacctcatgtaggtaaaatcaccgcgcgccaaatagtctctaggactatactgtaacaccaaccaagcttgagcaaaactcaaacttagtagcaggaattgtctttgtcatcatatcagctgggttatcatgagtacttatcttgcataccttgacatcatcttcagcaatcacacctcgaataaagtgatatctcacatcaatgtgctttgttctctcatggaacatttgatcctttgtaaggcatattgcactttgactatcacaaaatatattaatgtaagacgtaactccacaaagctcagtgtacaaacctctaagctaaatagcttctttacaagcttcagaaatagccatatactctgcttcagtagtagataaggcatcagttgcttgcaaacttgccttccaactaacagcacatcctccaatagtgaaaacataacctgtgagcgatcttctcctatccaaatctccagcaaaatctgaatccacatagccaacaagtccatctctagatctcccaaactgcaaacaagcactagatgtaccacgtaggtatctgaaaatccattgaacagctttccaatgctctttgccaggattagccatgtatctactgacaacactcaatgcatgtgataagtcaggacgagaacataccatggcatacataagtgaaccaactgcacttgaataaggaactctagacatgtactcaatatcataatctgactgtggacataaatctgaagataatctaaaatgtgcagctaaaggaatactcactggttttgcatcatgcatattgaaacgacgaagaactttttcaatataacctttctgactaagatataaattgccagaatgtctttctctagtaatttccataccgagaattttcttcgctgcacccaaatccttcatctcaaattcactactcaattgtgccttcaactttgctatctctgatttgtcttttgcagcaatcaacatatcatcgacataaagaagcaaatatatagctgaaccatcaacaactttgagataaacacaactatcataattggatcttctaaacttctgagaaagcatgaaagagtcaaatctcttataccactgtctaggtgactgcttcaacccataaagagatttcttcaacctacaaactaggttctcttttccaggaacagcaaaaccttcaggttgctccatataaatgtcctcttctaactccccatgtaaaaatgcagtcttaacatccatttgctttagttcataatcatgcattgcaacaatactgagtacggtgcgaattgaactatgcttcacaacaggggaaaagacatcattgaaatcaatacctaaaatctggctataacctttaacaactaaccttactttgtatcttgcctcatcacttggagatatacattcctttcttttgaagatccacttgcaacggataggtttcttctcctttggcaacttcaccaattcccaagtatgattcttttcaagtgactccatctcatcatgcatagcagtt

SEQ ID NO: 5684 - DNA, 16198 bp, Oryza sativa
tgtatatacatgatagttattaattattttataatttcagattttagttatttataaattgtattccaatctagacctagactcatctttcaatatttcttattattttaattttgaattttcattattcataaattctattcctataaggaccttggactcctcttccaatattcattttacttatttgtaaattgtatttctatatatactctaaactcttcttttaatattctttttttaattttgtatttcctttattggtaaattgtattcctgtatggactctagacctttttatcaatatttattttttttaattttatttatttataaaatgtatttgtatatggactctatacctttttttaatattccttatttgttaattctaaatttcagttatttataaattttattcatatatagacgctagactcctctcccaatgttgcttattttttaaatttttaattttttttctaaattgtatttctatatagactctaaactctacttttaattattttttaatttcaactttcacttagttctatattcctatatggactatggactcttcttccaatatttttatttgtctaattcccaatcttttatttataattgtatttctatatagactctatttttttccaatatctgtattttttaattccgaatttcaattatttataaattgtattcctatatagactttagagttttttctaatattacttatttttaatttcgaatttcagttacttatgaattgtattcctatatatactatagactcttctccaaattctgcttatttttctaatttctaatcttagttatttctaatttgtatttctaaaagatatttaagttgattgtgtataccagtaaaacaaagtacactcgcttgagtcaactgtcacaaatctgaatactctatcaaaagggggataaatagaatttgtaaatcacccatcagaaaacaaacattctgagtagcaattctaaggcttacggacctacaaaatatgtgtaatacagcttagaaaccataagtttgtcttgcttgcgattttatctaactgtaaaaaggattccaatttgcgggcgatgcacaaccaaacatagttctcaacactcaacagaacttgagaacaacatggcatgaaaagatttcactagtcatcgtccttaattcttttcagcagcctagcagcccaccggcgtagtcttctcttcaatgtgaagcccaccacaacaccgactgcaaagctgacggcgctgatcttcgtacaagttgatagagagacaacacgactgcaatacagaatataacacaagtataactattgtcaggttctaaggtgttggacagttgagcacagggttcatgaataaaatggtatcagtgcctggaaatgatagcaaatgttgaaaagttgtgccaaataaattttcctgaggcagtgcaacttacttaataagctcttaaagctgcatgcagaatatatatatagggtatgcaaccatgtctagctcttgttgttaagctttcagatttagtaacagcagcaccaatgcacacaaactctaggctattttgcaactcaaacacagttatacaatcaatatattcactgttcatccaactgaaattctgaacacagctcaatcacaatcaagtactctcacggtcttaaacctcgtagcttttgatctagaaagacactaaaattttatctactctgaactcaatgagctgctaggatcacaatggaatctgctcatattcttctgaactcaccattgcctcttctggttgcatcttgtatgacacgagagctatacaaatacagaccccttgcaacatatcaatacactcaactttgagacgagcccttgcaatactcctgaattcaggaactcaatatgccagtgatgccaaaagttacttgaacactgcaccacctaattgcgaagagcacttctcaacttcgagctattgacctattttacaatccctcagtcggtatggcttttcataggacataccaaatcaccctatcaaactctgatcagtttttgtaaacacgcctaattgcagtttgcttatttcagatagtagctacatggcacaaatcgggagcaattggagtcattcgatactgcaaatccagcaccaaaccaattcaaggcaagcaagaaattgagctgaacctggagctccaatgtgcgaaaacattcaagctagagtaggtggagggcaagtgaggaggagaggagagtataccctgcggccctgggcacgaggacctggtgcgcctgctcggagaaggcggccgccgagcgcgacgaggagttcgccgcgtcctgcgccgccgcctgcagcttctccaccgccgacgcaaccgacgacgccggtggcatctccgggcttcctgccccctcccgccgccgccgccgccggggaaggagctagggtttaacggcgggcgtaacttggaagcgagagaaaaaaaaagaaagaaagaaaagcaagcagacaccttcaggacgatgcgtcgaccatattaaagccaatgacaggtgggaccagccagttcgagtccttgggttgagacttgagagagccttcccaaaggggagagattattcaggtggtaggcattatcatcaaccgatgtgatattaacgtatgattaattgagtttaattattacaaacgtgaaaaatagattaatttgataatttagagcaactttcatatagaaagttttcgtatgaaatttaccgttttgcaatttgaaaagtgtgccaagagtatccaaaattttatatccctttttagcatattcaaacgggacctttgtggatatctcgtgctttctcacgcagttcaattgcttccaattccaagtgtgaaatatacgcaagcaaatccactgtaaatcatacgagatcaaatgaaaccgtgggtgcaaaggaaggcaaggcaatcatatctcaatcaaatacacttccaacatatatccaggatgcagcattaaccactgtcaaaactgtaatttctcattgctgctgcagaaccttgttacagcaaagtaatgcagtaaacaacatatcaagaacaggggaacagttgaaaccaagattaggcaaggacaaacattttactgtaaataaactactggttaccagctttctagatataactcgcgaaacaggagaaaatgctaatcagatacagagtacaaatggggtacaagagcaaagttttggctacgctaactccggacttcattttgatttccgtggtctaagaagattccagtcaagcttttcacgcttgtttgacttgtgagacccacggccattgctttgggaagatgaatcaccatcgatactcttacctgtggtcttgggctgcctatgtgatggtggtgtttccatttcaagctcaggctgtttcctctttagttcattcagagatatgctttctgaactatcaatgttgaagtcactaaatcttgttcttgatacttcatccgttctgcatttccattgtaaaagggatcacgtgaaaattcattacatccacaagctattcaaagtgctcaaaattatatgtgccacataagaacttgtacaatgattttgagcggctcaaaattacatccacaagctattcaattgcctcacaatgattttgagcggctgtagttagcattttcataaaaagtacagatgaaagtgttctcctggtgaattgtgtccataaggctacacctttttgtgttgcatagtagtgatttgttaatttcttatctgaccgaactgaatcagaattctactaaagaatttcattaatttttttttgggtgccaaaaatgtatgcattctagatttttcatgccatttgtgcaaaaagcttcctcatttgtgaatatgcagtaactcataagcttcagaatagcattagttgtataagctttacttttagcaaataatgttaactatagcaatacatcaataatgtctgaactactcagagcaagctaccagtaatgacggatatagtgatatacagttatacactaacaatgaatggtaactctgcatccaacattagcgccacaacgagtgtattttttaacaaatcaatcacttcaagcttagatttctaccttacatgatgtcaaagctgcagtgaagttattaacaggtgattcatctttcacaaggctgaagtgcactaaatgaatgttaataatgtcaagtctggtaactatgtaagagcttcaggctcttctgctttggttatgtttccagttcaatgatcaaaagtccaaactaaataactcttagcacatactcacgacattaatccacatattgtgacaggtaatctatattttgtaacagataaattagctataggttaacaacagttacagcacagaaaagagctggtaaatagctaacctgctggaattcgaaccatcctgatgattattactaggtgatgctaactgtgattggcggccacccgttgcctcttgagttaatttctacagttctaggtttgggtgagggaacacgacaatattgcaaataacaagatataaaaaaataatcttgaaatctcacatcaatggatgggttgaaattcaggaatgacattcgaccctttgcagctccagggtgtggattaccctccatgataactacgctgaagaaagagttagtattggtttagtctgcattgacagatcaaagaaaggtattggtaatgaagtactgcgtgtccaaaactaaacccaaaaaatgaatttgcatgacaacatcaaatgcatgtttagctgattagtgtgaagcatatctgggaagaaaacgttaaaaaaaagtatccaattatggacatacacatgaatgttatagtttctgaagcacaaagtatcatttctactacctccgtcccacaaagacttcatttctagctatgaacttagacgagtacttgtccaggtgcatagccagaaatcccaaattctctgtaattaggtaagaagtaaattagatgggaggttttgccagatatctcatctaacaaacccaaaaaggcacaatcttcatctaacagattcagcttaactcaaacataatctccaattcttcatcgcaccttgttatatagcatacaaaacatcccatgctaccctagagtcaaaatctctaataccatgctaaaaacaccaactcagcataaacgattaaaaaaacgagcctttcaatccccataccacttccgagcgactttaaccgacgagccaacacctccgctaggcaccgtcaccacctcctcctccgccgccgccgccgccgcctcaaccttgggcttctcctcaaccttctgcgcaacagccgcccgctgcataaactgcatcccccccgcacacaaatacaaaaataaaaacatcagacgagatagcaacgcgtgcggatgtaataagaggcaacatttccaagggatttcctcctcgccttgaggttcctgagggtgctcgagagctcccgcttcgccgccatcgccaccttcctcctccgccgccgcctctgccgctgccgctgcttcgcttaccgatttagggttagggtttacgcggctcgcggaagccgtcgccgcggggaggaggcgcacgacgagaagagagagaggagaggagatcgggttcgagtcggactcgggcccatcaccacggcccggtgcgcgagtggcgtgcgggcccacatgtcagccagggaaggagaaccgcttgcctggctggtcctacctgcggtctgaccgacatgtgggcccggtatttgatgtggtggactcctacgcggtttattactgattcgtgtatacgagggcgattcgtataggcggtttatattggccctggatatctggaagcctcacctgaatacctgattttgatcttgttctattgatttgtcgtgtgttcttcgaattccatcggaagaagaagaggggatttgactaactcgatcggcagccaattaatttagtcgctgacttcatcagttcatcttaataatggtatgtcagtcaattgctctgaaatctttttaatccaagttgttgttttatccccttctcttccatcttttcgattctttggagcgcaaccaatctgtcattgttcttgcatatattaccatgctaattatgttcttgattcatgcatatactggagttgtttaggataccggttctgaacttctaatctaattgctggttcgttgaatgcgttgtgcaggatttcgaggagtatctcaacttgcaatcggcgacgttcgcgcagctgtaccgctgcttgccgatctcgcttctcaagaaggagaacgccgacgatggcaacaggggtaagttgctaattaacctgttattaatagtcagtagtcaatctatttttttttctaactgaatattacgaagttttgcttatgtttaatttgtttgcagtcttcatgcctgtatctgctcttgatcggctcggtaagttcctaacatcttcagtaaaaaaacgatctttccgtacatacttgatcatctggtaataaattagttggttaaattactgatgttattgcttgtggttaatttactttcaagggtatctgcacatcgagtacccgatgcagtttcagattcagaacgccaccacgctgcagacctcgtactgcggcgtgctcgagttcaccgccgacgagggcttcatccacatcccgaccatggttagtatactcttcatagaagaacatcaaattaactttgcccaaatacaaatttaatttaaacaactcttcagagcattaacataaactgatgctgatttatattttgttcctgaatattttcagatgatggagcacttgggcctgcgagagaacgatctcgtgctgctgcgaagcacgtcgatccccaaggccaccttcatcaagctgcagcctcacacctctgacttccacaagctttctgaaccaagatacctgtaagtaattctatcgaaagaagttttttttttctttagaaattaatctaaattgttcaccttttctaattcagattttttttactggaactaaaactcatagaacaacagttaggatcatcttctactgatggtaatattgacaaaataactttcaatactgactgaatacgatcattatgactaaattattgaaatttccgttcgaattttttgaaatttcaggccctctcggcaccgaactatttcgtccgaaattttcaattttttaatcaaaatttgatcaaattccataaaagttctgatcgaaatttcgatgccccgtcgtagatatgaacaacgaaattactaagcctggttattctttcctactataaagttaacttactaaattctaaagcttaacgtacagatatatcacattatcatccactaacaattattacatttaattatcataataaacattgctatattatctattattttattcgacattggttgacatatgttgtgttgatgtgcgtgtaggctggagtacaacttccgcaactacttctgccttacgaccggcgagacgatcgccgtggcggcgggggacaggttctactacctcgacgtcgtggagacgaggccggccgacgctgtctgcgtcatcgagaccgactgcgaggtcgagttcgaccaggccctcgaccaagcggagcccgccgccgccgccgccatgcaggtcgacggcgtcggcgccggcgagccggagccggcccggttcaccggcttcaggatgcggatggacggcaagccggtggaggaggagaagaagacgatgccgccgccggcgacggcggcggcgccgcccaaaagggggcttcggtttggctcgtcggctcctgccgccggtggtggcgtcaaggaggccaagtccggcgagaaagacgatgggaatcggttcaccggcaagaagtattctctgcagttttaaaagaacaaaaaatgggatttcttggtgcatcgatatttgaaaacgagagaatttgcatcgatgttgacgaattcgctgatattcgcgttcgcgaaaaaaaattcgctgatattcatacgatctcttttttttttttccttgtaagttttcgtaacgaggatcaaatatatgtgcatgtgtttgtgatgaaataggtacctgctcagtgacgtggctttcagattttgtttgctaatggtagagcagagtattgtgtccaactttccatggctatgttgttacttactatttctcttatcttatagcatcaatatgaatatgagaaatgctagaataaattgtatagtaaaattgagggagtatttgctactacacctaggaggaactccaggattttatattccactggcaaaagtgcccgtgcgttgcaacgggaagtgtatagaccagaaaataaaggaaaagttaagaaaaatttacattatgtagaaaggttatattccctcccttgtgtaaaaaattaatttacaagtaaagcaagtataataaataaaatgacaggttaaatttaattttattaaattctccatatttaattaagctctttagaattttattggaattttcagagcttaattgctaattttaataatacaaacctcatttaacaattatttaattggaaaaaggaatcaaaatcctccctttcaggtttgggccgaatatagaaagtttatattctctcccttacgtctattctatgtatctggcttgtttcctttctctgttaagtccattgcatcctcttgatatcgaccacacggtccattcggtggcccaataggccggcggcccgacgcgggagcagctggagctgtccgatcgaatggacggcccagattaatcctaacctaaataactacacccaaaacctaaccctaggattcattctcaccccctccccctcctttaccactctccctcccccgagcggcggcggctgcggcagcgcctctcgcccctcccttaagcggcggcgacggcgcctctccccgagcagcccccctccccgagcgacggcggcgccgcccgagcagcggcggcagtggcggcgcctctccccccgagcgacggcggcggcggtgccctccccctagcgacagcgccgctgcccgagcagtggcggcggtggcggtgcctctccccccgagtggtggcggtgtcagcgtcctcccccgcgagcggcgacggtggctctcccaccactggcagcgcggctgcgtcctccctcaccaccggcagcgcggctgcgtccttccccaccaccggcagcgcggcggcgtcctcccctaccaccggtggcagtggcggcgcccttccccatcaccagcaggcggcaacggtggcggcgcccaacccaatcccaagcaacggcgacggactcgatgtatttggagtttttggtcgatatatttggtgtttttgggtgttgaagtttgggtttctattttttttttcaattttttcgatcattcacaaaatcgaaatcagattaggatttgatggagggacgaaaaatacgaatcttttaattagttaagatagagaagagatatttacggactattaaaacgaatagaaatcgaattttttgccgcgcttttttccgccctttttattttttttttgttcgttttttactttttactaaccttttttttttgccacggaatcgaacagacctctgtagatgtgaattttttaagtagggacaggagtagagatacatatgtatacaaagtttatatacaaaacgtataaaaatataaacgtatacaaagtttgtatacgtgtatataaaatttgtatatatacatagtattaagaaataaaaaaaccaaaaaaacaaaaaaaggaaagaaaaaaactgaaaagaaacgaaaaaaggaagaaaaacagaacaaccgtgcgtgggccggaataggatttttttcccctttttaagggatcggatctatttttttcgccactttttgtgtttttcgaatttgactttttttttcccgtttctaggggaatcggattacagtttttttccctattttttcctccgattttttttgtttttcttttttaagggaatcagacttcttttttttgttttttttcgctattttttatttgtgacggacgaaggaaacgtctcttattttttaagtagtagtagaagaagtagaggtagatagatagataccggtcaaaaacgaacgaatttaaaaaccgatccatacacggatgacgtaccaaagtaccgacaaaaatatcctcaatttttcgagaagtctttttcgagggagtcggactttttttaaggagtcggacgttttttttcttttttaggtagaagtttttttcctttttttgtcgcctttattttctccacagggagtcggatttttaagagtcgaacgcctttttttttgcgacagattttttttctcttctttttttgtttttttctctcctttttattttccaccgggggagtcagacttttaggagtcggacttctttttttttcgtttttttatttaaacggtgttttttctcggacttttttttttccttttaacggatccgatctttttttttcaggggaatcggactctttttgttttgtttttttttcgctttttttatttattaaacggacgaaggaaacgtttcttttttttaagtagtagtagattataaaaagaacagctaggaagaactctgttgtcaaaatttgcttagcatatgtagtactccctccgatcattgacgcacaatgtttttacactaaaattagtattaaaaatctcatatattaatgacgagacagagtgacaccttactactctgcatagtaaaaaaaaaaccatccacaatgcaaatagcaaaaatttgaaatccgtgcaatttcatgccattgaaatcttgaatgaaatgatatgatagcacccttagggtccctttaaatcgcatgattgaaaaaacataataatagaaaaaacatagaattttgataggaatgtatatataaaacagatattgcaaaaacgcagggaaaacataagaagggtagtttgattgaactgaaaaaaaaaacgcaggaattgaataagagagatagacccaaagaaaagttaccaagatgttgaagctctttctaaatttcctccaaattctctataggattgtccatttcataggaatttcaaaggattagataggattcaatcatttgtttcaaagggcttcatagaaaattttttcataggatttaaatcctccaaaattcctatgttttccctctaaatcaaaggggctcttaatatcaaaataagttcattttttattcatccacccatactaattagaaaagactttctcaaatcccaaagcaattatttttctctttatttatttattctcaatacatttattttataattttacaaatttcgatgcaacgatcactttaaaaataaatttatttttgataaacaagaagaaccaaaaataaacatttattctggatagagagagtatgtgcctcatgttgaattacgagtagaatgcagggggttttgcgttaatatccctctcctcttctcccctccccctctcaaagcaccgcgagctcgcgacgaggacgacgcagcgagacgagacgacaaaatttaccaaagtgcccctcaaacccctcaccccctccgcctccgcctccggcgagcccgtcgccgccggccggcatgccgtcggggtaccgcccggaccgggagaccgacttcgccggcttcccgagcaccacccccatcgtcatcgacaacggcgcctccaccttccgcatcgggtacgacctcccacccgccgccgcccggaaactccccccccccccaaaccctaaccctagcagggcttccgttccgtacgtggattctgtgaagtgacgtggtggtttggtgccgtgcaggtgggccggcgaggcggagccccgcgtcgccttccgcaacatcgtgcagcggccgcgccaccgcagctctggtacgccgcattgcgcgctttggaaagcttggctgtgatatctgtttggtgattggggtttttctttggatatactgcgagaagtttgatttctgcttcttccgttaatccttagcgtgcgttttcagaatgttcagtgaataggtatggcgtttcgttggtaattgggtgctgtttgtgtaatttgttttgttttgatgcacagaaattgggtgctgcattttaattatgtctatcagcagccacttattaggcccattttgaaactctactcaattcaagtgggagttgaactgttacttgtcagattccaatgggctttatttatttttatcgtttgcgatgttttgatacaacttgattcattttcttcgtaagtgatactagtaattctgaaaacagatcaagttcagatgttttagtgctctctttgtgtttgttcaattacactgtatggttcatgcttgtctgaatataccattactgaactgaacctcttatgggtatggcttgagtcaggctaataataacagagtttgacaaaatatgataattcaactgattggaattcgttttctgtgatgcaggtgaaactgtcacagttgttggggacactgatccagctttgatgaagtatttcgattgcacacgatcagcaattcgctcaccatttgatgatgatgttgtctaccagttcgagtacatggaatatgttagtttgcttagttattcctatgaaaccatcttaactttttttttgtttgagttggtagcaagatctatagatggtttgctatatgtttagcttgaactgatcagtctggtctgtcatctttgattctgaatgcaatcttaatgtgtgtgttaatttttaggctcaccagaataatgcatatgaaacattttaagaataagatacgtgtcttaactgtggttgagatgtatattaactgatattaagaaaagctttatctgaagttagaaattcatattctaacttgcttctatgagtatgctctattctatagctattaatgataatatctttcatagttcacatatcctttatgacattagataccaatacatattgttatgtttcacaaatttagagtgcagcacatgattgcttacttcagagtgttgatatttgcactccaacctttattgcttgtgtaacaaacattttttaagtatttctttgatctggtattattactgtctgggttgcagattcttgactttggttttgatcgactaggtgccacttcagaggtaaattgcactctgccatcatctgtactatgaatatattctgaatgtagttgacttatgtactgtttccttggtttgacagctttgctttaccttgcactagtaaatgtggggtagtccctctcaaataaaaatgatgaaatttgggggttcttttgtatgccagttctatgtataagtgaagtgtgtgcaatgattgggactatgtagtgtttattaaaacttgaatttagcatgtgagttctaaaatggtcagttggtttcgggttcagaattaagtttcttatgaatatattgcatagtgacacagttgacgttcacaagttgaacgtaatgcttcaaagtctttgggaaactttagtatcaggctctcagcctctaaaacaggcaagttaaatgacaagtgaatgtcatattcagcatatccatcctagacatatgacagacatggacaattatcttcatcagtgagctttctcctctcaagtgtatggtgggtgacagtgaaaaaataacccaggcatagcaggcatttctgaacagatttttctcattagtatcatatagttctaatagaaagtgttatgtgcctttggttatatagtaatatatttgtatgcatccttttaccttagaattttctggttcccacatgagctatttgtttggtttcatgctgctggaagtaacagtaatgctgggcaggtgggccatcccattcttatgacagagtgtgaatgcaatccatccttttctcgagccagaatgtcagaactactttttgagacatatggcgtgccatccattggtaatgatacttatctttttgtgccattgttatcaattgtgcatggtagttttgaagtaagaattgtcgatgctaaagatgtttcttcctatgtgagtttcagcttttggcattgacgatgtgtttagttacaagtacaatcagaaacttgggaattgtggagaagatggactggccatttcgtgtgaacatggaacatgccatgttgttccagtaagtttggtccttccacatgccttcctcttaactttgtgcaacatacaaatcctttgccattgcatttccattaccttgtcagatgttcggaaaattaatgcattgcatgcttgaagaacacagtattgttgaatgcattgtagattctaaaactctgattggataatctgtagtgggtaatgctatataacatgctcatggaaagagagagagagagaaagagtgcccctattcttagctaaatcattttgctcatggaagtcgggatgtattttcttgatctccagacacagcatgttgttttctttccatctaatctatgatgcttccggacaactacattggtaaaagttgctttgtattttgagccctgtgtgtttgaatttctgcttacttttccatggtaggctgcatactaactcatccaatccaagttagactattcttctctgtagtgtatttttcacaatttgtttattgttgtcatgatcctgaaacaatcaataaacaaaaatattatgttgtactcatcaaagtggttctgtgaaataaaatcttctttctttgtccacatatgcattctgattaatgctttgctgtgtatatgcattcagtttttaaagggagaacctgtgttgggggcatgctgcagaaccaacgttggtggctttcacatcacagattttctgaggcagctcctctctctaaagtatccctatcacaggtaggtgcccgcagcatatttctgaagtgctccatgcatttttttttcctaccatgtctaatcgttgccactttacattgagtagtgcaagcattacatgggaaaaggctgaagagctgaagaaggaacattgttacgtagctcttgattatatgtcagagttgcagatatttaaggtgagaaacttttatttaccgtttgttttcttaccaatgtaaattccaaatccagttcatctatagaatgcacagggcttttctaccgtgttacatttctagctctttctttcaacactatgaatttattgatccacttggcagaacaataaggaagaagctgaagaaaaaactaggtattggcagctaccatgggtcccgcctcctgtagaagaaccaccatctgaggaagaacttgcaagaaaagcagctttgaaggaaaaggctggtcaacgtttgcgagatatggctgctgcaaaaaggtcgcagaagatagcagaacttgaaaaacagctttcttatttggaggaactaatggagcaacttgatggagctgaggaagaagaagcaacagccattttaggtagatctgggtatctttcccagcaggaaatcaaatctgctattttgaaagcaacacaatccttaaggaaggcaaagggggagtccaatggtaacgaagagaaagcagatgcttctggggttgataagtatccacttgtgtctgtccctgatgaaacattgacaccagaacaggtgtgtgtctgtccatttatcatctgtagcaaaggggtttgtttttgcttgtgttttggggagaccttttgcgactgtgtgacatgagcacatatctattataccaagtttagatattttccatgtttcaaatatttactattcttatttcactttcgtatactttcagttaaaagagaagaagaacagatactacttaaaaccacaacagaaggtggaatgcgtgccaagcagagacgtgctgaggaggaagcattgagggagaagcaagaagaagagaggcgtttg

SEQ ID NO: 5685 - DNA, 21918 bp, Oryza sativa
acccttcgacacccccctcctcctcttcagatctctctctccttgctagcaagctcgatttcttagaccatggaagattaagatcgaattctcaataagctaatcattcatggcggcagaagccagaaccctggtgggtgctgatcgcccggaacccgaaggccgccggggcccccccccctttggtgccggccggattaccaccggcttcgtaaccaacaattttggccgaatggtccaacccgcggccggtgggcttctcgccgacaccttctaccggctcgcgctctccgggaccttccttggcgggatgaccctggtcggcgcttcggtctgggtggccgacaacccggctgcccgccgtgccgccggcaagaagctgttatacaccgccatcccgccgctcctcgccgccatgggtttatcggtggtggcgctgctctggtaagtatggttctcgaacaggctccggtccggccgcaccgctgtccgcatatccatgatcggagcaaacaataataattgccggcgtctctctctagcttgctggtcgatcgtgtttgtgtgattgaaaatgaatatcatattcttcttccatttggtttgctcgtttgctgcgtcgtggttgtgtcttgtcgtcgtagcatgttctgttgttgcaagtagttagagagtccactgttctgttcttatttactctgtctcgtgtgcttcgattgatgaccggcttaatcgaccagtgttctatggagtgttcatcatatctctcgatttcaatttcaagtatatatggtgcttcattttttttaatgagatgataaagttatggtgattgtactcctaattttcatcttacttgcattctgcgaatattggatttggaatactccatggatccatgcatatcggcaccgccgccggcgagcatggcgccgtttctcctcaccaattaattcatcatcaattcaatcgcgccaccgctgccgcccgctggtagtaccactgtttcggtggcggtaggggactcgttcgttgccatggaggcggcgtcgtcgccggcgtggcgtctctctgcgccgctcgccgtcgacgccgacgccgaattgttctatttggaagcttctggcgcttctccttctagaagccatcctttcctctcttttttttcggtttttttgggtgatacaagtggggaagggtgggccatacaagtggggcccacatgccccctgaccttgttgtgttgcgggcggcggaagaaaattacacaggacctcagtccttcgctcatctggaaagacttcattttgtgaatgacacgtgttcgcacgaatcttgaggcagacaacagtcgtcttctacctcagactaaagtaccaaaataattcccccatctctctctcctctccctttccacttcccagtccggcagtccctacctcccctggctcccttctctatggccggaggcccaatctccagcacggaaacatggttcgtcgcctcttcctcctcctcattgtcacgtcgcgggatgcaacatgatgctgtacacaatgcgacgaaaaagttcagcgagctcgccgcctcctgcaagtggaaccttccctggctaagaaggaggaaggaaggtgggaagtggagaggagagagaaagggaaagtttggcactctgcacttgagctcaggtagaagatgactacgttaaaattcgtgtggagacgtgtcactcaagatgacaagtctttctggatgagcgaaggaccgaggtcttgtataattttcttccgcgggcggcggctacggccatggagatctcgcgactcgcgggtcgcggccatgtgccggtgaggtcggctgcttcgccggcgtctccgcctccgcatctacgcctgattgatcccccccaacctatctccactgtgctatcgcgtttcttgcggacttgcggaggttgtggttgaggcagtagcctgtggggcggtgatgcggcgccgagatcccgctcgtccacggatttccggtcgccatcgccgggattcgtcttctccggccaacccctcgccgcgccgcccgtcctcggccaggatctggtcgggatcgcttgtggtaggtgttgggcacttggggtttgaaagacagcatcgttgatgtgctttgagttcctgcctaattgacttacgctgactctgtcaatatcaacatcttcagttactattcccataatccctaaaatcccagcagttgcgtggtaggttatgtaaagcgcattcctgtgatgaaaaatagaccctaggagacatataatcaattgtatcaagtgatccaacacactaggtccccaaatattgtcgtagataccattttctcttcagtattctgtttaaagactgatattggtctttggatgatgtgcttgttcatcgcaccagttgatctttactattggtgcatatttagttccaaggcgtcgttttagttaagctgctgaagcgttgagcatcttgtcatgctgatattcttatgagtggttcaagatggtttgttctgttttagtggaagtgaaagaaggggctgtcccctgcttatgggaagagaaaaagagatgtattttagcaaccatgtgtttacagtacaatccaattagttcactaagctattatttatggctgttatatcctgttctgagtatttatttgttatactgtaatggtattaaatttctggcattgttatacatgattatattcgatcatatacagctattagtaattcatgtagttagagctgaatgggagttttgctagaaagacattgcttctttcaacgacccttattcaaacaaaattaaagtacctttttctctgttgtgctgattcccattgttacatagctgaaacttaagtaattgcaaaatttgatggaactcatatattcttctactcttataataagggaggtttgtatgtagctacactcatgctatatgcatgcgctctgtctatctgacttttgtatttacatttgtattcaagacattgaggtcaactaaattctatgcccaatggtgcagccatatttcatacatgaatatggctatctctttgcctggtaggttatgaaatatgaactctatgtgtttattttgatgtgaaatggcctcagggcaactcattttgatgtatgagtatacatgtcaatccacacagtaggtcctgagatattttattaatgaccttttcacttttcaccatccttcacttgagaatatgctctggttgatagtagttagtttccgtgctttgacttattgccgaacccttgagagcatcttgtaatgttcaactcttatgaattgttgatgatgaccttatctcttttgatgaataggatgaatagcggcatggcaacccaagggccaaggccagagcactagggcctagagccgcaggagtggagctagagcgaaacagagggtggtgccacttgcttaatttactctactttagatcaagtttaagctgatacgggtgcttaagtttgtattgaggagggtgcatacatggtgaaaataggtaaggtatagctaaaaaaatttcttgatcgggttcctgggcacccccctaatatatactagctccgcccctgcctagaggcattcctagaaacttaggagcaaacgaagaaaggtagcagaaccagtgtagaggaggcattaggagaaatcttaaggacatttggtaactttgaaataccataatgcgtctcataaaaaatattctaattttaaaatttgtactatgtaataggtggttaaatgctgttcttctgagtgatggagttgcagattgtaaatcaatctttacttatacaaacgatgggccaatcattggcttgttctcgtctcttttttttttgggtcaaaatgaattggaatagcaggtgcctttgaagtgtaaatataacagaacaagtgggtaaattttaatataattccgaaagaatcatcatccatgtgtcattttctttttcatgcaatgaacaacagatttgtatatatgtatttttaccatcagtaacagtcctttattaatgcatagtatgtggttctgcttttctgtagggggacgttgagttgtaagaactaagaagaccagatgcatctgctcagattttacaggcctgtataaccagttaacgagtggcaaaaaaaatgtctcgcggccgtgtctgatacataactttgccaggagatctatctgttgatgcacacaggctgccatggcattgttacccagttgctcttacatgcatttctgctggcataagatggtggaggttctgttgttgaacctggaacacaaccggtgctcagaagaattttgtatcactacaacctatcaggatttgatcgaacaatttggtatgttcatacacatttgagcaattgtacagtactccgaagttggtgttttctatcatctggtaattgtggatcactggcatatcgaggaattgtggatcactgacatatggaggaattgtggatcactggcatattgaggaatcaacctgacatataatattcagggtgtcttttgtatacgtggagactgttgtgtatgccatttttctggaatgtcatgtaatatcaacgtatccgtatcgccgtaccagtatcacgtatccgtgcatcacaaatagccatattattttctatatcgatatttatgattaaattgagttaagaatttcttttgttgtgcggataactgcactgattgcaaatctgccaatgagtactacctccgtcccaaaataattgtatttctatgattcaaactttgtcccaaattaattataattctagagcactaattgccccatcaatcatctctcattcaaatttcttcctattataccctcaaccatctttccactctcacataaacaccatttaatgaggggcaccatagtcttttttctcaaaccttaatatatgctaaacaacatagaattacaattattttgggacggaggtagtaccaaaatattcgtgatttagtgcattgtgttcctgtgactgaatctgaaagtttggcagctagaatgaataccaagtattgttgtgcatatccccgtggaataagtctatttacctccatcattgaatggtttcccttaaccacaaggctgggtattacgtcatcttcacaaaccagtgcaaattaccttcttcagtggtttgacaatcggtttttgttgacgtggctgcttgattgcagttgactcgccgagttggcaggtgggatccacatgtcagcgacatccacctcatatcatgcttttctccccttctctttcctttctttaatctcccttctctctcttaccttccagcagcaacagaggccatgagggctacggtggtagtgagccggattcgggggtggcgacgacgaaggaggagggaaaggaggatgtggagacgaagtagcaatagcagcaggaagcgactgcagcagcgagagagagaggaggttgtggtggcggcgtcgaagcggaagcagcaggtggctgctgtggtggtgagggagaggaggctgcgagacgacggcgtggaagcaacaacagcagcaggcggtggcgttgaagtggaaataataggtgattgcagtggcggtgatggagatgaggttgctacgacggcaagggagaggaagtggcggcatcgaagcaacagtagtaggcaacgacgaggaagaggaagtggcgacatcgaatcagcagtagcaggcgatggtagtgacaacatcgacgcagaggaatccgcggatactcttgatggcttcctcatctccctcctctcttcctcgccggccatcgaccgtgctactgccttgcttgacgatcactagctgttgtcgtcggcttcgtctccggctaccaccactgcagcaacctaggaccaacctgtgactagtgtaaatggagtggtatatgtaagtgggcccatctatcggatgggctaggctacgcggttgtagaggtagggctgttacacgaccggccgtcttcctcgttgggagaacaagattgggaaaaaaaaaaggaaagaaaggatagagaaggaggatcaaatgtttcactgataggtgggtcccacctatcatgttgataaaacccgttttccaaaccaccgaagtagtcgatttgcactggtttttaaagatgagggagatgctatatctagttttgtggttgaggaagatgattcaatcgggagtaagagatgagagaggaaaagtagacttgcttatctccgtagcccggacatgatccaactactaagctcggacaaattacgtggtccgactaaggtgggtctagttctcgaacgttcgcatctcgcaaaacagttcaataggttttatcgttatcagttctaacgacgtgtttaagctcgtactatatagtattttgttatttcagttagaagaccaaccaatcactttttcctattatcaagttgttcagattggattttatttcttgaaaaaaaaatccagtgatgcttaaattttttttatttatactgaaatttatacactaataattaaacttctaattgcaaattataattcatactataaagtttataaataaaaagtccataatataaagtgtatatacttaaaggctctatgcatagaaagtttatatacataaaatctatatatggaaagtttatacacataaattccatatatatagaaagcgtacatgtaaaaaagtaatacatgtaaaaaagtttgtactaaaaaaagctataaaaatgactataaagagaaaaaagtaatttaacaaaaagaaggggaaaaaatgatatgtaccgttaggagaattaacgtaaaaaaaaggaccacggtaaattgaaaagaatcacgtagaaaagaaaaaaggaaaattaggaatgtaaagacgacgccgtaacgacgcaacacacctgtcacgcatcgccacgtttccttttgtctccccaccctgacctgtccgcgcgatggacaagtagcgcacgtcgcccaatagtcaatccgcctactacggttggaataagtcaatttgctgtccctcgaatttacgttgagtccgatagattaccagatttgccctttgtactgcttagacctccccagaaaacgtgtcacccccggttcgcggcggctcggccgagtccagtcccgcaggggcaaaaccgtccttcagactctcctcccgataaccggcgccgcccagcccatcagtccgtccgccccagaggccccaactccccaggtccgtaattttgataatttgaccctttgaaaaaacttattttgatattgatccatgtcaaaacctattttcaaaaatagaccttttttcgtgccattcgctgagctacaacatcatagcgccacttactttggcgctgagataccgtccgacatgtcactggtgtcacacatcatacgatgtcagcgccaaattctttggcgctaacctccgtggcttgctatgtataaatactatgcatgtactaccgtgatacatggaagatttggcctagtggtgaaagcccgcctctcttaactagaggtcaggcgtaccacgaagatgttagcatgaagagctctccaccaagctatctcgttttttttttcagttgtggtagcttgtagcttgataatatttgtagactggagagaggtgacctcggataacgtgtaaaatccgtgacacctcggatggcatctcagcgtcaatgatagttgcgccaagacgttatagctcagcgccaaccacaatggcgctgagaaaacggcctatttttcaaattagtttttggtacagttcaattttgaaataagttttctgaaagggtcaaattgtcaaaattacgggaggtcttccccttcgcatccataaaagcagcccgagccgcgcgtgatcccgacgtttctgtagcttgatctttctagcatctctgctactgctagtactccaaccttctcaattccctagctttgattctgaataataggaagacccacacatcggagatgatggttgacaatattgctcgccgggaagcggaggccgacggcggtgcttccaagatcgcggcggcgctggggctgttcggcgtcgccacggcctctctgatcatcaacctggtcgccgcgttcgacccaccgcagggcttcgctgaaagcgcctgctacgacctcgctcttgtggggtccttcctcgccggaatgggccaggttggcgcggccatctgggtcgccgacgacccacgcggccaccgtgccgccgtcggcaagaagatcatgatcgcctccatcgcgccgctcgtcgtcgccatcggcctcaccggagaggcactgctctggtaattccactacacgtaccaacaccatggatcggagcgagtgtatcttgtactactatcttacttagtggagtcgcgtgatagtgtgatgatgctttttacttgatgtttttgtctactggctactgctgtttgtgttagttgatcaatgcttggattgatgaatatttcatgtaaattttaagtccatactattgtgtactacaatcaatgaaaaatttctcaaaaaaaaaaaactgctaatgaggggaacagagtatatggaattttggagtactccaattttcactgacgccggcgagcatgcgcttcctgatcaccaattcaaggtgcacttcccgccgccgccggcgggggtatttaccgctccggcgacggtggtgcggccggcatgccgccgccttgtcctccctggggaagcagccgctgtgagcctgtgactcatgcaacggccaaaagggcactctgttttttttttttaaagattctgatggaattgttggaagggggagtaggccatatttaagtgggccccacatgctaaaaattttccccaaaaagggaagggaggagtaggagatatcataggagcggcggccatggcgccttcgcctgtcccgcccactccatgtctctgtctcgctgctgcggcgccttttctacaccagcttgcccccacctctccgtctcaattcgcgcgtgcggcggtgacacggcgcgcgagatttcgctccggctcggccacgatctgacctcgtcggcgccggcggaatcctccgtcttccgcggccaccccctcgccgcgaacctgcgccgggaggacctggttggcatcgccgttggccgtcgcgtctgtgctattgcaacagatctgtggatagtactccctccgtttcaaaatatttgaaaccgttgactttttagcatatatttgaccgttcgtcttattcaaatacttttatgaaatatgtaaaattatatgcctacataaaaatatatttaacaatgaatcaaatgataggaaaagaattaataattacttaaattttttgaataagacgaacggtcaaacatgtgctaaaaagtcaacggcgtcaaatatttcgaaacggagggagtatgtgattttttgtttttttttccattggaggcgttgacttggaagaacatcagagtaccagagccatatctgttccgattttggaggttcatacattacaggtatctgcttgcccttacatagttacgtacatgcatttttcattggcaaataataatccttgggtgatgatgatcctgttgttgaacccttgaactgaaagacaacaggttcttaggggaatttcgtagggtgtgatagcctatcttacaatttgatagggcaatttggtatgttcggtgaaaattctgtagacatttgaacaattgtttggtgctgcgttttctgtcctctggtaattgtgaatcactggcatattcaggaaccaagcttttgtatatttgtcatgctcttgtatttgtgcacatgtggatgtggaggctggtgtgtgtatgacaatttcctggcatgtcatgtaatcggaagcattgtttcggagagggaagggcaatctcctttctaataggcatttacaggtttgcttgtgttcagacttcagactagttactagaaaatggtgcgccagttggcgcacctagtacttttatagcctgtatataacacttgtatgtaacagttacgacttagttacgacttatttagaacatatatttattagttttcaaggtatcctataatttttaattctgtcaattttatccgtttttaagaactcatgaaaaatagactatatattttctatggtttgtttagaacacaataatttggcacagtcaactgctagttcaattatcgtaaaatttatttgggatagagagtttagttttgtactaacttctcgaaggtcaaaatatttctaaatatcttaaggaaatttgatgtattttggtaaaaaaaaaacccacaaatctgatttttattttctttacctctgcataatgtttagtgtctctctgggaggggtatgtgtaaaaacatcttaatttacccaaccgagtttcatatgcacaccacatagcaaattttagtttgatatatgcacatgaattacatagcaaaattacttgtccaacttataaacaaaagcctacttattaataagttttatcttagggccatttataaatactacaaaccgagggcctatttgtacatttaaattttgagaggaaaaaaagaccagagtcacaccctttataaatgaccctcggtaggcctatttgtacatttaaaattttgagaggaaaaaaggatcagtcacgccctttataaatagctctcggccaaaacgaagtattatcaaatcggagggagtagtgttgaacaaatcattcttcctaataaagcttattgtttttctccaccattctctgtctcttatttttgtttcctccccgctgcccaagctactatattgttcggaaggctgatatgcggctgcggctgtacaaccaaccttgtctttgcttcttcgaacatgcatgttgacagccatagcacatgctgcattgctgccaaacaggtctattgtactaaaccaagcctatatgacacatgccggcgaactccccctctaaaaagttaccgaggcaaaaagaaacgaaaaaagaaaactaaatagagagacatattgtttcgcttgcaccaccggtacaccgctactttgatctaaacaactgaacacactctaacacccaataggggaaacctgtccaattttaatgagggtgaaatgttaaccaatcagcttgtgcggagtgcgatcagctttagattaactgataatagcttatattgaaaaatatagtttgtttttacttcaacattttttaagtgtaaatatgatactatctaccaattggcaacgtctagagtcgtatttttaaacatttaacaccgttttcatattaaattattattttcctattcttttttaatttttatcatgagattttgtattttattaagtttattatagcgtgaaatctgttaataactaacaatttattttatttcttctctcaccaactactgatattccctactgccctggcagggagcaccactgggaatagagcagcagccagctcctttttatttttttttatcagcccagatgaataaaaacggcacaggcctaggcatggcccaaatcgcatgcgtggctgccctggaataccgctcgaaggggcgagaagatgtgcgctagcgcgttagaaagcgattttttaccatcgtaatttgcatatttatcttaaccttttttaatcaagtagaaccgtagaaggattaggaggccacatggcacgattttagaggaggtaatcctggaaccaggtagtgccacgtggccctataagaggcccgagatcgcaccctgaaatcgtatataaagataaccatatgctattttctatatcgatgtttatggttaaattgatctaagaatttgtcttgttgtgcggataactgcactgattgctaatctgccaatgagtgccaaaaatattcttgattcagtgcattgtgctgctgtgactgaatctgaaagtttggcagctagaatgaatatcgatcaatgttatgcatatcccgcggcccggacatggtccaactaccgcagtcaggtcaggcccaactaaacttggatggcaactaactgtagcgatccagattcacggtcaccaatggaaaaagtccaatttgtctcccttaattgttcaccgaatctaattcgtgactcttaactggaaaaccgggtaagatgacttcccgaattattgaaactaatgtaatttgactcctccagcggttttggagggcggtttttgctaacgtggcagcgctgacgtggttttcattccacatggcgtttatgtggcattagaattaaaaaaatatctatgggactcacacataaatatattgtgggacccaccgacatgtggggcccacatgtcatcctttctccttcccctcttcctcttccctctcttcctctctcttttctttcccccttttctcttcccccttcgaacgcatcaccgtcacatcggccacctcctctcctctcccattgttgccgtcgcgccggctgcctctctccccctctcctgccgccaccgccagccgccgcttccctatctgccgccgcacctgcttgactgctcgagagaatcaaggagagaagaggaaaaaaaaagaaaggagagatgtgggatccacaccattttctctcacttacatgtgggctcgacatatttattttaatttttttgttgactaggctgccacgtcagcgaaactaggcatctatactgtctcgggacttttttttggatggttttacatagtttaggggtatacatttctggtattgcggttaggggacctcaaacagactcggcgtaaagctgagagatggctgatgaacttatttctctcccgggtgcctggcccaagcgggcgctgaatcatgtgtagcttgtgcagttctttttcttccggttatttgtttgcctcttgatgcgatatactgcactactcggtatacactagtttgctctatattttgaattttccatgtttctgcatttcaaatgtgcaatggaataattaaaaatgattcatcgaatggaaactattgactgtgagattttgctacatgattatgggttttctgctgcttctttttttttttccgctgatgccttatagttttttcatgggagagaattagggaaggcaatttcccccgcggggacccgaccctatgggggcggggggcggggacgggttaagtttttgacccgcgggggaggcgggggcgggccccgcatttttacgaggaggggacgggggagacagttcacccgcggggcccgcgggtgtatattaacccttaaaatgtagcacatagaagacccaaaagagcccaacccaataaaataaagataaaatgaaaaggaaccctagccttatcctcaccagtgtcttcccaactcccctcctggctcccgtacgcatcatccaccggtggaggcggtgctaggggccagggcgcacgagcacacgacgcacttctttggatctcgccggcgccggtcgccctctcccctcccctccggccttccgagtcccatcctctccaatatccctctccggctctccctcaggtctgccaatgaggcgacgacgcacaggcgcacgggcgcggcgaggacgccgtcgagaggcgagggtgtggcgcacaggcgtggcagccggcaaggggaccgacgtggcgtccggcgagcagcgaggggataggtgcgcatgaatcgaatgatggatcaatgtgttcttggcttcttgctgaattttttgatgctatttatttttatggtgttaattatgtacaatatttgttcttgccgaattgatgattgtcttgtaatttttgtgctgattggatggagatgctacctaatgcagggccccggtcgggttgcggggccccggaggggtccgggatgggggatgatgtcgggggtcgggtgcggggccgtttcagcccaacccggccccgccctgccccgttgccatccctagagagaatatgataggtgagcccactaatttttaaaatataatcgttgaatgttgcgcgtacgtcatgtagaacaaaaaccacttcagattgagaggggtgaggggtaatttggtttgagtagttgggtgtatcaaaatgtctggtattcgagatcatgggttagttaggtcgactgcaataattcaagggttaattcgaacttcttcctcttataatattattttgggagttcaacaatcaatttaccatgttttcacggttcgcttaatcccataagggattagggggattaattccatgttgcaatagcagttgggtgaaggattaaacaaacaagacctaagtggctaggtgggtactacattttgcagttatggctagttctatgtgtcggttgattttatcagcccaattattgggaggagataatactacctagcggtttttaccaatcaagaaaggaagatataattattggtataaaaactaatttgaatcctactccctccgtttcaaaatatttgacaccgttgactttttagtacgtgtttgaccattcgttttatttaaaaaatttaagtaattatttattcttttcatatcatttgattcattgttaaatatactttcatgtgcacatatagttttacatatttcacaattttttttaataagacgaatagtcaaatatgtgctaaaaagtcaatggtgtcaaacattttgaaacggagggagtatttgaggatacgccctcgtgaaaatgaaagaaaaaggagagatagagaggaagttctaagtctcgacaaatcctaaaaccctaatatactcatccgatcaggagatgtttggaagatgttcgtgtgtggtggtctccagatagtgccattggcgccccgagggacttcgcttcaccaactaaaaacattcggcgcgacggcgacctcaagcatgttaaatcggcgtctatgcatgcttcccttgtagcagaaccgaagaaagaagaaaacaaggaagaacaacaaacggaataaatcaaagttgttggaatataaactgaattacccacattttctcattagtttaagcttttggattaaattggtcggcgtatacaacttaatgtataagtgattgcgattgactataatggctttactaaatacaagtgattgcgattgacttatcggttagataaattttcgcattgaacaaaagatgatcgtatatagactaaggctgtgttcattgtgggaggttgggaacaaatctcctatacatgaaaaacggagcgttctattaacgcgtgattaattaagttttttttttcaaaaatgaatcaatattaattttaagcaactttcatatataaacttttttaaaaaaacgtattgtttagaagtttaaaaaacatgcgcgcggaaaacgagaaagagaggttgggaactagtagaaggaacgcagtctaagacttaagtgaataagtaaactaaggctgtgtttagttggatccaaagtttggattttggttgaaattgaagatgatgtgattgaaaggttgtgtgtgtatgacatgtgatgaaaaaggactgaagtttggatccaaactttgggtctaaacacagcctaataaactacaaaagtatatgcagttgttgctgtggtgcagtggacctgctaattttgcccgttaaaatttcttcccgtcttcatgtatgatctctcagctgattggtcgagatgaaaaagtgatgacgtcaccaacgtgtcatgctaccagtggtggacgaaacgagttgagagaaccgaagtaaaataaatatagaaaaaaatacccgtgcattgcaacggaaaaaaacatgagaaatttacgtaaaggttaagaaatatttatattatgtaattaatttaaatataaaatcgcaactatacgtgtatatgatgttgaagaaaaaaagctcttaaaaataagttaaatgtggaaaataaaattttccaaataaactatagctggatttaatttttattaaactctccatgattaataacactatgtgaaatttcttcggtattttcagagcagtagagcaccattgctaatctatctatctatctatctatctatctattatattattaaaacagccttgaaaggaggcaccacgttcgctgtggaggctataaattctcacattaatcggagaaaaagaaaagaagagtccaagtagaaatacaatctaaaaataacagaaattcggaattaaaaatatgcaatatggaaagaggagtccatataggaacccaatacgagattaatcaaaagttggaataatgataaaataaaatccaaaattagaaaaggaaaggagagtccaagtagaaatacaatttaaaaatagctgaaattcggaattaaaaataagcaatattgaaagaagtttccatataagaacccaatacgagattaaaccaaattcgaaataaaaaaataaaatccaaaaatagaaaaggaaatgagagtcaagtaggaatacaattttaaaatagctgaaatttgaaattaaaaataaggaatattaaaagaagagtccatatatgaacccaatacgagattaattaaaattcggaataaaaataaataaatccgaaattagcaaaagaaaataaaagaagagttcaagtaggaatacaaattaaaattagctgaaattcggaattaaaaataagcaatattgaaagaagactccatataaaaacccaatacgagattaattaaaatttggaatacaaaataaaacaatatccaaaattagaaaaactaaaagaaagttcaagtagaaatataattttgaaacaattgaaattgaaaataaaaaaaaatattaaaagaacccaatacggtattaactattttttttaaaaaaaattctgaaattagaaaaaggaaaataagatttcaattaggaatacaatttataaataaccaaattttttgataaaaataaagatttttgaaagaaaagaccatctaaaataaaacacatgacgagataaattaagtaacatgcatataaaggaatagagtggtggcggttgatacgacatataaaaattattaataaagcaccaaatagaatcctaatgacaattaaaaggagggatgttaggcaggccgtgaagcaaacgagtaaggcggttgccggagcttctagaaagtaaaaaaaaaaacccattgataatcatattcgatttttaaaatctcaatgacaattatattattaaaaatagttttgaaaggaggcactacgttcgctatgtgagctagaaattcccacattaatcggataaaaagaaaaaaagaaaatgagagtccatgtagaagtacaatttaaaaatagctgaaattcggaattaaaaataagcaatattgaaagaagtttccatataagaacccaatatgaggttaatcaaaattaaaaataaaaataaaataaaatccaaaattagaataggaaaggagagtcaagtagaaatacaatttaaaaatagctaaactttggaattaaatataagcaatattgacgggacttctagaaaataaaaaactacaatttcaatttttaaaggttcggaacttctaaaaagtaaaaaaaaaataatgataatcatattcgattttaaaatctcaatgacaacaaagaagggaagcagcgggtgagccataaaggagtacaatggcaaagccactcacggtttggcggtacttctagaaagtaaaaatgaacctaaacgataattatgttcgatttttaaaatctcaataacaataaagagaagagacagtggacgggctgtagaggtgtataatggcaacgtttgacgggacatttagaaattataaaaatgaaacccaacgtgacaataaactctaaaaactataaaatccaatttttaaaggttccacgaagaatgaatagaaatagtggtagatcgagcaagcaaataaagaaggagatgacatgagggatagcaactggtgtgatttttaaaaactatatgattaaaaacacgatgatgataaggtttggtctttcaaagtcttaagacaatgagatagctagtaaaatcatactaaaaaatatattattttgtttgggtgctagccgtgcaattgcgcgggcaacccaactagttttgataatacaaacatcattttatcatttatttaaatgagaaccctcctttctccctgggccattttgagcccattctttctttagcccgtagcaaagccagcccattaacctgacttctcctcccttccacctcgacctgcaagcgcgcatccagcccatcaagcaaccacaaagtctaattagtgtcccttctcctcctctagctgtcgcgtgggtcccagtgctacatggtcgtcccctacctccgtccaactccgcagcttcccaacactgtcggaaaccatccccttcgtgaaatccctccacatccacggagataaaacaaaattgattgagggattttaatccttatctccttctctttccgttttttcaataattagagcaaaatcgcatcgtatcgaccttagaattaagccatatagcaaaccatagagttgtctgttttgcgtacgggagggaatcgaaccgcgcgcccaggtacaacgtacgaaaaaaagttggaaaaaacatcttaaacttttataataggtaaagataaagatatatatatttatggaaaatttgtgggctgaaaatcagattgctaaggggcgatcgatcgccctgagcgatcaccccctcctccacgtggtttgcttttttggcaccacattactttcttattttagtaaatttatacacctcaagtttacacatgtaaagtttagagacccaaagtttataagtcaaaaatttatatttccgattcaaatttgaatttgaattcaaatattttttatatatagtatttctatacatctaaggtttatacacctaaagtttattaacccaaagtttataagtcaaaagtttacatacccgtttcaaatttgaatttgaattcaaatattagtttatagatccaaagtttataagtcaaaagtttacatacccgttttaaatttaaatttgaattcaaatattttttatatataatatttctatacataaactttttcaactttattttttatttttttagtggtgtaataggaagagaagaagggggagaggagggagcatacaggggggaggggggtgcccctaatgcgcgatcagtcgcgcggtcacgcgggcgcgcgaccaccaggtccaccactactactcatacgctactgctactactactacaaatctacaactcatacactactactgctactactacatgtatatatgaatatgtatatattgtatattaaactttgtattattgtatatatacatataaattttgtattaaataatataaagtttatgcatatatatataaagtatatacatacgtgtatatataatttttatgtgtaccaaaaaatcgatgtataaaaaatatgcacatatacaaactttatatacgcgtgtataaactttgcatacgcgtatacaaactttgcatatgcgtatataaactttgcatacgtgtatataaactttgtatatctacatattaaaaaccgagagaaaaaaatacgaatacaaagattgtatacgtatgaatacaaacttggtatacacacaaatacaaactttgtaatacgtacattaaaaaaagaaaaaaccaaaaacagaagagaaacgaaaaaacaaaaaagaaaaacagaagagaaacgaaaatggaaaaaggaaaaacaggagaaacgaaaaaaacccggaaaaatcgctcagtcgcgccggggcggggggcggcggaccccgtcccgaacgtgtgccccgaacaaaataaaaagagcacgggacgggtcgacgtgtacccgaaggccgaacgtaaactgcagggttatctatgtgcgttcgcccttcgcagaagcttctctaatctctctccaccgtagcgcagaacgtaaactgaagggttattagtaccttggaatgactggatgacaagtgggcccagtacagaaggtcccattatgtcagtggcactagatcgagcactcgcgccgcgagcccgcgattggaatgccatgtgggtctttctcttgactactccatccgttgaatgtcgttttcagttttatgtcaggtttggtaggtcgtgatctttttactattttgcccattgtgcaaaattttctactacatgcaaaatccgtcgaatgtcgtcgtttcgtttgcgtccgcggggttatcactatatattcctctctctctccaggaaaccaagccttccccacaggatcgagtcgggcagccacgaatcgatcgagagatctaatggcggcggcaaagctactgctgggtgatgctcgccgcgaaccggaggcctcagctttgggcgcgctcggcgtcgccgccatctccacggccaccactttggccaccgcggcgttcgagccgccgccgggcggcttcggcaccaccacctacaaccatctcgccgtcgccgggctcgcagggaccttccttggcggggtggccctggtcggcacttcagtgtgggtctctgacaacccagctgcccgccgtggcaccggcaagaagctcctctacgccgccgtcccgccgctcctcgccgccgtcgttctatcggtggcggcgctgctctggtaagcatgtacaagcccctgtccgaccgcattactatccgccatgatcggagccaagccggccgtccctagcgtgctccttgtgtcaatcaaatgcaatcttaattattccatttgtattgttcatttgtttgttttgttggtcgatcgctccgtcatgtgttatgtctcgtggagttgtagtatcatcatgtaatagtgcttgcttcttcttcttctagtccattgtgtgtatcacatatgtatgatcacgtctcctgttcttggtctgtcaaagtgttattcgattgatggccggcttaatcgacgagtgttttgttaattatgagttcatatctcccaatttgaagtatggtgattcaaaggggagctatgcagtactagtttttggcttaattacatttagggaagagtggatttggagtactccatgcatatcggcgccgctcgccgtcgccgccgacgctgaatagttctggaagtttgccttgtcggccgtcgtgtccttctggtgctaaaagcccatctttttctcctttttttttcttttctttttttttggaggcaactgttagaagagagggaatggtgggccatattaagtggggcccacatgccgtatcatatccatgacctttgtccttgcgttgccggcggcggcggcggctacggccatggagatctcacgcgaccatttgccggtgaggtcggctgctccgcctccgcctccgcatctacgcctgattgatccccacccctctctccactgactgtgctatcgcgtttccggcggtggttgatcgaggcggtagcccgtgcggcgcgcgagattccgcccgtccacggatttccggtcgccatcgccggggttcgtcttctccggccagcccctcgcgcgcgaactgcgccgcccgtcctcggccaggatctggtcggggatcgcttgtggtaggtgttagggggcacttgggtttggaggacagcatcgt

SEQ ID NO: 5686 - DNA, 39056 bp, Oryza sativa
aatgtgatttctttctcacttttttttttgttctgttcgaggagatccagtaccatgccgtatttttttgttacaacacgtcccgcgaccaggtagatgagttaggaccacttttgttgttattacagtatgtgctatgaccattttagatgagttaggaccactttatgttctaggaggtccggggtccagtaccatgccgtccatatatagcgcatttgagttgcacatctccagcaaccaactccctcccaaccgatcgatctctctcttctacttcatccaggtccaaggagcggctcaatcagtcgagagattaaatggcggcacagtatgaggtgagtgacgcattaggcgcgctcggcgtcgccgccatctccacggccaccactttggccaccgcagcgttccagccgccgccggcgccgggcggcctccgcaccaccaccacctacaaccacctcgccgtcgccgggctcgcagggaccttccttggcggggtggtcctggtcggcgcttcagtctgggtgtccgacaacccagctgcccgccgtggcaccggcaagaagctcctctacgccgccgtcccgatgctcctcgccgcggtcgttctatcggtggcggcgctgctctggtaagcctctcaaattaacgctcatgtacaagcccctgtccgaccgcattactatccgccatgatcggagccaagccggccgtccctagcgttctccttatgtcaatcaaatgtaaccttaattcttcatattgtttgttttattggtcgatcgctgcgtcgtggttgtgtctcgtggagctgtagtatcatcatgtaatagtgtttgcttcttattctagtccattgtgtgtatcacctatgtatgatcacgtctccttctgttcttggtctgtcaaagtgttattcgattgatggccggcttaatcgacgagtgttttgttaattatgagttcatataatctcggcgtggaaatctcggcgtgggctgagagacttaagttagatgacagacatgtaatctcggcgtggaaatctctcttctccttttctatccgctccctcgatatataattggactctctgtactttctttgctattaatggattcaggtggggaagctctcccccccgggtgaattttcaaaaaaattatgagttcatatctcccaatttgaagtatggtgattcaaaggggagctatgcagtactagtttttggcttaattacatttagggaagagtggatttggagtactccatgcatatcggcgccgctcgccgtcgccgccgacgctgaatagttctggaagtttgccttgtcggccgtcgtgtccttctggtgctaaaagcccatctttttctccttttttttttcttttcctttttttttggggggcaactgttagaagagagggaagggtgggccatattaagtggggcccacatgccgtatcatatccatgacctttgtccttgcgttgccggcggcggcggcggcggcctacggccatggagatctcacgcgaccatttgccggtgaggtcggctgctccgcctccgcctccgcatctacgcctgattgatccccacccctctctccactgactgtgctatcgcgtttccggcggtggttgatcgaggcggtagcccgtgcggcgcgcgagattccgcccgtccacggatttccggtcgccatcgccggggttcgtcttctccggccagcccctcgccgcgcgaacctgcgccgcccgtcctcggccaggatctggtcggggatcgcttgtggtaggtgttagggggcacttgggtttggaggacagcatcgttgatgtgctttgactttgagttccttgctaatttagttatgctgattgttcccataatccctaaaatctcagcagttgcgttgcgtggtaggttatgtaaagcgcattcctgtgatgaaaaatagaccctgggagacatattatcaattgtatcaagcgatccaacacactaggtccccaaatattgtcgtagataccattttctcttcagtatgctgcttaaaatgcaaattgtaagcttttctctgtgctgtccagttacgtctagtaattccttatgtttaaagactgatattggtctttggttgtgtgtgatgtgcttcttgttaatcgcaatacttgatctttactatcggtgcatatttagtcccaatatgcccttttagttaagttgctgaaacattgagcatcttgtcatgttgatcttcttgtgagtggttcaagatgatttgttctgttttaatggaagtaaaaaacgagggctgtcccctcctaatgggaagagaaaaagagatgtattccagcaaccatgtgttatagtacaatccaattagttcgctaagctattatggcctttatatcctgctctgagtatttatttgatttgctgtaaagttattaaatttatggcattgttatacgtgatttgtacttgattatatgctgctattggtgattcatgtaattagagctgaatgggatttttgctagatacacattgcttctttcaacaacccttatgcgaacaaaattaatgggctggtttctcttctgtgctgatttccattgttccatagctgaagcttaagtaattgcaaaatttgtaggaactcatctgttcttttgctgaaccaatagacttttgtaaatacatttgcacaagacattgaggtcaactaaaattcttctatgcccaatggtgcagccatatttcatacatgaatatggctatcgctttgcctgataggttatggactgtgaactctgtgtttattttgatgtgaaaatggcctcaggggaacgcaggataactcatacatgtcaatccatacactaggtcctgagatattttcttaatgcccttttctcttttcactatactctacttgttaaacttctaagaaaagtcttatccctctactgttctattatatctataattcctttgttttgatgtcaaaagcagtgtattcagctgtatattttgttgtgatatgctctggttgatagtagttagtgtccgtgttttgacttgttgctgaacccttgagagcatctcgtaatgtttaactcttatgaattgctcgagatgaccttttttgtcttgatgaatagtggcatggcaacccaaggcaagagcactagggcctagaggtattcctagaaacttaggagcaaacggagaaagacgtagcaggaccagagcagaggacatttggcacctttgaaacaccataaatcatctcgtaaaatatattcaactttaaaatttgtactatgtaataggtggttaaattctgttcttctgagtgatggaattgcatattgtaaatcaatctctacttgtacaaaagatgagtaaatcttttgcttattcttatctacttttttttgtcaaaatgaataggaatatcaggtgcctttaaagtgcaagtataatggaaagagttggtaaattttaatatacttctgaaagaatcatcatccttgtgccattatctttttcatgtattgaacaacagatttgcacatgtatttttgccatctctaacagctctttattaacggatagtatatggctcttcttttatgtagggggatgttgagttgtaagaagaccagatgcatcagctctgatttagtgattttagaggcatgtataacctgtcaaagagcagcaaaagaaatgcgtcatagctgtgtgatacataactttgccaggagatctctctatttaagcacacagactgctatggcattgttaaacatttgctcagtttctcttaaatgcatttctgctggcataagatggtagcatggtggaggttctgttgttaaaccctggtatcaggacttgatcaagcagtttggtacgttcggtgaaaattcatgcacatttgagcgatcgtacagtagtctgaagttggtgttttctatcctccggtaattatggatcactggtataacgaggaatcaacctaacgtataattgccatggtctgtatttttgtatatgtggagactggtgtgtgtactaattttctggaatgtcatgtaatcagaagagttgtttagaagaggcataggcaaattctcttgtaaggcttttgtagttccttgatagtttaacatggttataacagtagtgttttctatgacgacatttatgattaaactgtgtctacaattcctgtcttttgtgcagaaaaaaaaaaagcactgataaaacaccctagagttgaatgcattgcgctgttgcgactgattctgaaagcttggcagcaagggcaatgttcagcatttttttcctgcagctgtgaattttgctactcttgttaaacccagggttcgaaactccccgcccccccccccccccaaccgaaatgctcacatatcgcccaaaattttggttttttgcttttttttttccgaatttggtcaaatttattcaaaatcagtcaaaaattcaaaaaaaattgtacgaaaaaaataaaaaaaaactcagaaatttcggttctatcacccacctgcggcagaaattttagtttcaaaattaaaaaccttggaacttaaacctgtgcccgggtgtgcaaacctgacagccattatggttgtgataactgataggtgctatgcctatagtttttcaggtgagctggtgatggtatgtttggtttagagctgattctgtggtggagacgcaaattaaaccgagatactaagggaatcgagacacaggagtctcaaatggcccaattttttcaatactcttctcactaaacaaatacgagtacctctcaaaaagagaagaacaaatacgagtactttatacaaaaatgaaatagggactaaatgatgattctttgtcaacccatttgtgctgatgacctgcatctttgatgtgatgtttctaatgtttctttaccaattaattttacacaaaacacattgtttaggagcttggaacttggaaaccatgcccgcgacaatccagaatcctgaattagaaaagaaattaattacaggcccttcgttgtggcaatcacaggaaccaggagtactactgcatactttaacgacccgcctaatttattaaacatcacagggacatgaatacatgaaaaaacagtagattacacgaaaccaccatggatcatacacaaagaacattagattagatattatagtattaaacatcaccatcataatcacagcagtaacgacacataccacgaatagagggagggacataaatggagggtgacgtcaccgacgctttggcagtgtttggcaaatgtctaagggaaataatttcccacccatttttaaatcctaaccattcattatccatcatccatttaatcttaacccttcgtcaaagttcagaacggagaacttccatgaaattatttgcgcgcatcccgcgtacacacaggaagctggaagccgcagggggcgcgcatcgcacaatatatatacttccacgttcatagttgggaactcggaagctagcccaccccgtcccgtccctgattcaccgcagatccctctaattcatagctagatccattaaggagaggatcgaatcattgatcagctaggaaccggtcgggagattgtccattttggggagggattagcgaaagagatggcgccacagcttccggcgggtgctgatcgccgggaaccggaggccacgttgggggcagtcggcatcgccaccgtctccgcggccaccgccgctctggccgcagcgctcgagccgccgccgggtagcctcgtcgccgacaccttctaccgcctcacgctcaccggggccttccttggcggggtcgccctggtcggcgcttcaatctgggtggccgacaacccggccgcccgccgtgccgccggcaagaagctgctatacaccgccgtcccgccgctcctcgccgccgtcgggatatcggtggcggcgctgctgtggtaagtccgtcaaatgttcatgcacaagcccctgtccgaccgcatcaccgtccgctggcgtcgatctctagcttgttgctcgtgtttgtgtccctggaaattgtgtgcactactacttcttgtagagtttgtgtgtatcacccaggctttgaaggtatcaccttacgtatgatcatatcagtgtctgagtgtctcgttctgtatgttttgtttggctgtcgtgtttgttcgattaatggccggttggtttaatataaaagagatccacaaaagtttttccacttcaaatattcccagttaaaagccttgtgcgctgtaatggcgggcggtcgccaaggaaaaaaccagcaggttaatttgttgtaattttcagagtgaggacgtcgtaggaaccctgggtatgtccctggtgccttgccacatcagcgccacataggatcatagagggaatgtgtcaatttgggacctagatgatacattttgacaagttctggaacctggatatgcattttgagagtttatgaatttatatgacacaacctacaagtttaagtaccgccaatgcactttactttttttttttgtttttttggggggtgattttctctctcaatgctgaactgctacatgggccatagaagtggggcccaaatgccgcatgatatcctttgaccttgcgttgccggcggcggttattacggccatggagatctcgcgcggccatttgccggtgaggtcggctgcttcgccggcgcctccgcctccgcatctacgcctggttgatcccccaacgctatctccactgtgctatcgcgtttccggcggtggttgatcgaggcggtagcccgtgcggcgcgcgagattccgctcgtccatggatttccggtcgccgtcgccgggattcgtcttctccggccagcccctcgccgcgcgaacctgcgccgcccgtcctcggcaaggatctgatcgggatcgcttgtggtaggttttgggggcacttgggtttggaggacagaatcgttgatgtgtttttgagttactgctaattgagttatgctgattccgtcagtatccacatcttcagttgctattcccataaaatcctacattgcctgccgatgcttttcgagcccgcagattatactagacttgtttggtagcacgctatgtacttcacaagtgcgcattccggtcatgaaaactgcactcagggagacatataatcatttgtatcgcacattaggtcccttgatattgtctttgataccttgtcaaaatgctgagagtaagtttttctctgtgctgtcagttacatataatcccttatgtttagactaaaaaagaaaaggtatagactgatattggtatttggcagtatgtgatgtgcttcttgttcatcgcaccagttgatctttacgatcggtgcatatttagttccaagatgtctttttagttaaattgccgaaccattgagcatcttgttatgttgagtggttcaagatgatttgttctcttttaatgtataagtgaaaaaaaaggggtttaatgtaaagaaaaaagagatgcatttcagcaagcttgtgccacagtacaatccaattagttcgctaaggtaagctattgtttatggctgttatatcctgttatgagtatttgtttgatttgctataacgttattaaatttctggcattgtcatacatgatttgtgttctgttacatgctgctattggcaattcatgtaactagagctgaatgggagttgtgctagaaacacattgcttctttcaacaacccttatgcaaacaaaattgaaatgatggtttctctgctgtgctaatttccattgttccataactgaaacttaagtaattgcaaaaaaaattttggaactcatctattctcttactcttataataagtctgggttttgtaggtagctacgctcatgctatgtgcttgcgctctgtctatctgaaccaatagacttttgaaaatccatttttacaagacattgagatcaactaaaattctatacccaatgatgcagcactgcagccatatttcgtacatgaatatggttatctgtttgcctgataggtttatgaaatgtgaactgtatgtgtttattttgatgtgaaatggcctcggggcaacacgtgataactcatacatgtcaatccacacactatactctaattgttaaacttctaagaataggcttatctccctactgttgtattacatctataattgtttttgttttgatgtaaaaaagctgtgtattcagctgtatattttgttgtgatatgctgtggttgatagtagttagtgtccacgttttgacttattgctgaacgcttgagaacatctcgtaatgttgaattgttcaagatgacctttttttgtctcgatgaatagcggcatggcaacccaaggccaggaactagggcctagaggcattcctacaaacttaggactttaggagcaaacaaagaaatagcagaaccagagcagaggaggtgttaggagaaatataaagggcatttggtaccttcgaaataccataatgcgtctcggaaaaaacattcaacttttaaaatttgtactgtgtaataggtggtaatgctgttcttctgagtgatggaagtgcagattataaatcattctctacttgtacaaaagacaagcaaatcttttgcttgttctcgtctctttttttttggtcaaaatgaataggaatagcaggtgcctttaaagtgtaagtataacagaaagagttggtaaattttaacatacttcttaaagaatcatcatccttgtgcctatctgtttcatgtactgaacaacagatttttaattgtgtatttttaccatcaggaacagttctttattaacggatagtatgtggttctgcttttccatagggggaacgttgacttgtaagaagaccagagccatctgttctgatttgagaggcctgtatattaacctgtcaaagactcaaagagcagcgaaggaaatgtttcatagccttgttagacataactttgccaggagatctgtctgttttgatgcccacaggctgttatgggggttgctagtcacttgctcttacatgcccttctgctggcataagatgatagtctggtgtaggttctgttgttgaaccctggaagtctggaacacaaccggtgctcagaagactttcatatcactgcagcctaccaggatttgatagagcaatttgatatgtttggtgaaaattcatacacatttgagttattgtacaatactcagaaattggtgttttctatcctctggtaattgtggatcactggcatattgaagaatcaaacctgacatataattgccagggtctgtaatttttatacatgtggagattggtgtgcataccaaatgttctgcatcatgtaatcagaagagttgtttaggagaggcataggcaaattcccttgtaaggcttttgtagttccttgagtgaacgtagttataacagttctgttttctacgacaaaatttgtgattaaggttcacaatttgtgttggttgggcagaaaacaatgagctgatagaacatcctagaattaggccttgtttagatactaattttttttttgccataaacgtcacattaaatatttggacacatgcatggggcattaaatgttggaaaaaaccaattgcacagtttgcatgtaaattgcgagacgaatcttttgagcttaattacgccatgatttgacaatgtgatgctacaataaacatttgttaatgatgaattaattaggcttaataaattcgtctcacagtttacatgcagaatctgtaatttttttttgttattagtctacgtttaatacttcaaatttgtgtccgtatataaaaaactttacacccaacgtactaaacacacccttagtgcattttgtgctggtgtgaccgattctgaaagcttggcagcaaagagttgtgaaatttgttaatcatgtcaacttgtgctcggggtgtgcaaacctgacaagcattatgcttgtgataaccgataagtaatgtaggagtagttttttgtggtgagttgttggtggtggtattaaaagtcattgaaccgacataacaaggggcattgggacacatgagtatcaaatggtccaatttggccttattctatactcttctcactaaacaaacgcgagtactgtatacaaaatgaactaggaataaaaattgatgttttacttattttgtcaacccatatttgtgctctgctagctgacctgggtgtgaaattgaagcttgtttgacaacgaccattattctgatcgatctctttgtgatggggtaacattgatgtgatgctttctaatgtccctttaccaatcgtgatagcgctctcaacagtatgcaacagtattcctgaagtttttcgccaatcaggtggtgatgaccttgatctggtgtcccttgcaggcttgcattgtgttggtctaacaatccatttggaccatttgtcgtatccaaaggctcgtaagtttgtcaactcggctttgtatatctttatgcatgagatgtgtttccaggcgtgcatttgcattgtacttgatgtaatagatctcccggcctgatttatatttgtttacgtactactgatgcactctcgcacaggtagttgcgatgtcgtatgatgagagaagcagatctacgtgatgtttgccatttagtccttttaaagaacatattttataaacagattgcgagaaaacttgttgcgtatatgcaccctatatcggcgccaaatacaatcgcgctgaacctaaccatcaatcattttagtgtcgacctctctgacataagaaaatctcattttccattcaaatactattaatttgctatcaaatttggaaactaacaaatcgtcctaattggtttctgatagttcattttttatcgagtggttggttaaatgtgtgtgattgctgggaggcttagcatttatcttgtgacatagagatattatgggtcagctaagtttttttcaagaattagacagtataacgcagacacttataacgcacgcgcactcactcctatgaatacacgcacgcaaaccctacccctatgagtatcttcgaagactgggccgctgtcgacgggtacgtcgcttaccactgaaagcacaacgctgttaaatcctgaaaaattcgctctcatgggtagtcgaatctaagaccttaagtgctactgaggctcttgtaaccattaggctacagactcttttgctatgggtcagctaagtttaaccacatttaaggaaggtttttgcgttggtactatttgcatgtagattgagaggtgaagacctgtgcagttggttgccggcaaaaatttgctgccgttggggagcttttggggctgatgatcatatacgtgcgtgctgctgcttgacttttcccttattcgcttgcgtgcgccatattagcatggcatttttttccctaatctacttgacttctcccttaatcgcttgcgtgcgcgagagccgtattagcatggcattggtgtgcggctgcgtgaaggatatgcagttgtggcgtcggtttgtaaacgatgcgatatgattagcgtgtgcagctgctaggaagatatgcggcctcatctcttgtttacgtatgcttatacttatcagccaaaatttaaatttttaaccttcaatttgaagctgattttaatgtttttttatcaaaatttatttatcaacatttgcttttagatcactaagaacacgtatataaaagttttattcacaaaattatttttcatttgtgaatatgccgaataagccaaacactagagccgatagattttccatcttaacagtttgtttcctttttgtttgaaccttgctatttttgtgttggaccgatgaccatgctacctgcgtatatatgcgggtgtacggttaattgaaaagcctcgaacaatttatggatatactatttctctcgttctttactttttcgttattttctattttactttcatggatgagttctagtaaccctagaatttggttaatatttgccgttttgtgctgaaaaatggtcgtgcttttccataaaagagacgaggttatcctttgctagtttgctcggaaattagtagttcgtcgtcacataagtacgatatttaccttctttgctaatttgctcttaaattagccgtgtgattatacgaaagtgaattaatctcaaaatcggtttagtcggctagttttgatctatcgattttgacgactccgtcgattaaatcacaaatcgttaggtgatcttgtgttggccataaaaaaagtgtcaacaatttctatctctactacttaaaaagtaggttcaaaacataaatctctatctctactacttaaaaagtagatctataatttctaaatcttaaaaagtaaatctctatctctactacttagaaagtggcgaaaaaaacgtagatccaattcccccttaaaatggggaaaaaatctgagaaaaaatagcgaagaaaacaacaaaaataaaagaggtctgtgtcgacgtttgatgtcgcgattccggtatttacatggtatggggatcgttggtattaggatatatgcgagattgaggtaaaagagatggagacgatgatttttatacaggttcggacccctgaattgtcaggtaataaccctactcctattggttgaagtcggtcgttactcttattcaccataatcacaccagtaccatatttggggtagcctatctaactgttgtcaacttggcggtttgaagttctgactcgtagtcgacaatagggtagccttcctcctcgaatctgcatccggcgagatcaaagacagtgctgtctctcctgacaatatccgtagataccgtgggggactagtcatgcttatctctgaagtcgatatccggcgtcttatcttggcacatgttggcttgtatgttgatcttgtgtcttgatctattgttctgtgtcccctctcctcctagagggccttgtatttatacccataggtgtcctattgtccaagtagaactagggaaaccaatatgaatataatccaagtagtccttgtcgtttccatgtataactctattcatcattccttatgcggaactcctcctatattcgaaggttgtttccgtataagacatggtatgtggtgggtcctgccgagatttagtcaactactattaggtatgtggtatccataaccctgacagtctgtttcacctaagtggcgaaaaatatccgtagatccgaactggaaaaaatccgattcctaaagaaggcgaaaaacaaaaaaaagtggcaagaaaaaggctagatcggattcctttaaaaagagggaaaatattcctataaaggcaaaaaaaacccaaaaaaaaataaaaaaagtccgtccgattccctaagaaagtagagaaaaaagttcgtataaaataaaaaaaacgcgtgagaaaaaaaaataaaaagacgggaaaaaagtccaatttgtattcatttccgtatgtatctcttctctatctttaatctaacctaactatttaaaaggagaagtttttatcgtacaactaaaaacaaaaagtgcacgagagaataaaaacgcgtgagaaaaaagttagaaaaaaggaaaaaaaacacgctataaaaggtttcccatctttcgtaaaaaataaaaaaacatgcgagaaaaaatatttccatcgtccgtaaatttttttaaaaaaaacatgcgaggaaaaaattatcagaaaaaaatgcgccatttctaaaaaatggtttgaaaaaactgcgcaagaaaaaacaccgtctatatataaaaaaacaagctgctttggaaaaactgtcagaaaaatgctaaattcatgtacgcttgagttggataggatccattgattttttttccatctactacaccattcataaaaaacaacccgctctggaaaaactatcagaaaaaacaccgtttataaaaaacgagtaaaaaaaacaattggattcaacacgagaaaaaaatcgctatttctaaaaacagttcgagaaaaccgtctaacttaacatgagaaaaaaaactatcatttctaaaaaaaaattagagaaaatcatccaactcaacacgagaaaaaaaactagcgattatagtaggcaccgccccgaaaacccgcatgactcacgggagataagactgatggacgcatgggttggataggatccatcaattttttttccatttcctacacaacttttgttttctcatctattctcatgtattggagaccctgcacgtctctgtatgcaattgttagactatttttgttaagtataactactattcttaataacatatgatatagaaataatattaaaaaataaacatattttaattgctatttagagaagagtgcacagtaactctattttgtgttgacttgaccatgcaaggcagtgtatgatttgattgattctattattggttgcaagaatgagattgaaagagtatttttagattatagatgtatgttctcgcatgattaatctaattattttaagtaaagcacgcatcagtcaggttgccaccgtcgatgttttttttagagaagggtattttttacccggcctctaccaagcagatcgaaaatgttttaccaattaattaatgtccaccgtcgatgttggaccattacattgaagatgtttcaattttttgattgtattaattacaaacgatccatacaaacattgtcattgatatggttatgcatgaaaaatatatattttgattagaattttttcacccgtcacaacacatggttattttttatagtgtaagttataagtataagacttccggtgaaaatttggttccatcacgagtccatcaggagaattaattgtcgattttgctatatatttgtcgataaattttttctcaaaaatttgacacatgtaattacagtacaatcgtagtgtaattacactgtaacttgcatgtaattacactataactatagtgtaacttgtatgtaactttcaaaaatctctccgtaacatgttatttcggtaaaatttaggtcatgggaacaaattctttcacatatgtgtgtgctatgatttgtttttttcctcaccaaaacaaatcttgtaatagatctaacgattcaaaattatgtgaaacttacatataagttacagtgtagttacatgcaagttacagtgtaattacatataagttacagtgtaattacattacgattgtactataattacatctgtcaaatttttgaggaaaaatttgttgacaaatgtataggtagtcccttaattgttcggccttgacccaaactctctctgaatcaatctatcggcatttatgaattgggatgttctcattatgggctggctaggcctgttttgtaccgtgctattacactatatttcctatttctgagccccaatatgtgattataatacttaatcttccaggcctaaggttgattgggtaattattatttcataacctaattttggttcgatgtatccatataggggcatattcaaggccctggtatagcagagactattagtatcttataaacagttaagacgataaaagacttaaatatataattaacatgaaggttaaatggcagtcgaacgatttttgatatctaaattatttgtgtttcaatatattcagaattattgttttatacgttgtagcaaaatatttcatgaggtgatttaattgtgtttcagttatttagaagattgaaactttttcgatctacttggtgaaatattttcgatccacttagcgaaacagcgcttgattggcatcaaaatgtgcatgatggaagcttaaaaaatcatgcgaatcacatatagactttttctcgatgtacttggatttgtttcatgtttcaatattttcggaaccgttatttcatacattgttacaaaatgtttcatggggtgacttgattgtgttctagctttttttaaaatattggaacattttcgatctacttggtaaaacatttccgatctacttggtgaaacactgcatgatggaagcataaaaaatcatgtgaatcccattttgatagccccattaattaatacagtaaaacaatatttttgttatttttctttccttttcttcattcttatacaacgaaaattccttttataaccgctaagagtcaatgttaagatgttgtcatgcgtaacaacatgttgtttctctgtttaccctctttcgtagtaaatgttagcaaagttaccttgttaacaactctaacaatatgttattaattgatattatacatgtcctaactcctaagtctatgtattgatcgggttaattaacctgctgttatggtaatcaagcatcccatacatacttaggtggtgtttgaatcttctgaagatgaagatgaagattaagtgtttcacgtaaaacgaagtggtaataatatataattaattaagttttaattattacaaacttgaaaaatagattaatctgatattttagaacaactttcatatagaaagttttcgcacgaaacacaccgtttaacagtttgaaaaacgtgccattttaatccaaaattttatccacccttttaagtagattcaaacagggccttaaaagaaataacaggaaattattcatatcacgtttcttcttttcttttccaccaagtatgatggatcccccacgagtcatggatttcacctgttgcaatgcacgggcatatttttctagtgatatataaaaatgcttgttaaattaaattgataaaaggctgtaagcattcttttaaaacggaacccaaacatttatagagtaataggcacggccaggctcgcaagaggtcaaattgtaggcgtcctttagaaatagttgaaattcggaattagaaaataaagaatattagaagaggagactagagtccatataaaaatacaattaggaaataattgaaattcggaattaaaaataaggaatattagaagtagagtatagagtccatatagaaatactattaggaaataatagaaattcggaattaaaaataaggaatattagaaatagagtatagagtccgtatagaaatacaattaagaaaaaaaaaagaaattcagaattaaaaaaataaggaatattagatgtagagtatagagtccatactaaaattcggaataaacataataaaattaaaagtagtgtttagagtccgtataaaaatacaatttacaaataactaatattcaaaattaagaaaaacatgggaagaagagtttaaagtcaatataggaatacaatttagaagtaactgaaatttgaaattaaaaattaaagaatattgaaagatgagtttagagtccacatagaaatacaattagaaataataaaaattcagaattaaaaaaagaaatattaaaagatgagtcgaatatatataatttataaataactaaaatttgataataaaaataattaataactaacacgtatataaaatacaatatgaatattgcacattagtagtttcgtaaagttattgcaaaatttaaaattatgttatcattttaatatatttgaataatataatgagaaaacatatatgctattatatgagagaaaatataatgttgctagctgcgcaatttgcgcgggccaccatgctagttttaaaggatggaatttctaaggattatatttttaatatgattagctattaacttattaaagtaacagaaaaatgatcatccatgttcgttctcagagcctagaaattctcgtattaatcggagaaaaagaaaaaagaaagtttatatatatggtaataaaatttaaaaataactaaaattcataattaaaaataaggattattaggagaagagagtctagaggccatataacaatacaatttagaaataactgaaattcagaattaaaaaaatacagaaaaattaaaaatagtttagagtccatataacaagtaaattcaaaattttaaaaaataaataatattggaagagaagtatagagttcatatagcaacataatttatgaataattaaaaaatcagaattaaaaaaataaagaacatttgaagagaagtatatatagagttcatatagaaatacaatttaaaaataagtgaaattcgaaattgaaaaataaaaatattgaaagaaggatttagagtctatatatgaacaaaatttataaataacggaaatttggaactaaaggtaaggaaatttggaatcaagatcgcatgcaccatccgaatgacggatgacaaggtcagcgagatcgaatggagcccgtattgtcagccagtcaaaccccacactttgttcattgacagttcgacactcgaccttgttgcttgtgcaacttcggagtgttctacccgagattttcttcttcttctttttgcgatagttctacccgagattttcgtgaaaattaaacgaccctcacccacgggctatagtcgctttcaagttcgtaaggtgcgggtgcgggccgcattcccgtcgaatttgtgttttttgggtggagaacggatccatacaggccaagttccggatgaatataggggctgtttggtaaacgtcctgaggcttgtatgccgcgtggacagctcagccagtagtctaccgcatttttcaagtcgctttcacgccggtgggccacaacacccaacaccgtttgcctatatatactctcatttttatctctctaccatctctgtccaaccttctaattccctagtcggttttgatcgatctattatattattaaaggaatagaaaaaagagcctccacgttcgctctcatgggctagaattctcacattaatcggagaaaaagaaaaggcagagtccatatagaaatacaatttagaaatagttgaaattcggaattaaaaaataaggaatattagaagaggaaactagagtccatatagaaatacaattaggaaataactgaaattcgtaattaaaaataagaaatattggaagtagagtatagagtccatatagaaatacaattagaaaataactgaaattcggaattaaaaataaagaatattagaagtagagtataaagtccatatagaaatacaattaggaaataactagaaattttatcaatacgaaacaaagtctactcaatacatgatagttacccctaatctttcacgtacataatgagcatacatttatgttggatttctaatagtactctttgatcaaggatgttttccgattgggtgtggaataaaagggaaaaaaaacagatgcacagtccatggaagagtccatctggactcaagttcacttagcccaaataatcttgccgtcccgctaaagccacgtgcattaattcatcttgatatcaacacctacacgacatattactgggaaaaaaaagaaataatcggagaaaaagaaaaggacagtccatgtagaaatacaatttaaaaataactgaaatttgaaatttaaaaaaagcactattgaaaaaagagtccttataagaacctaatacgagattaattaatattcagaataaaaaaataaaataaaataaaatccgaaattagcaaaaaaaaaggaaaaagaagagttcgagtagaaatacaatttaaaaataactaaaattcggaattaaaattaagcaatattgaaagaagagtccatataaaacccaatacaagattattaaatttcggaataaaaaataaaacaaatcaaaattaggaaaaaaacagaaaagaagagttcaagtaataatacaatttaaaattaactaaaattcggaattaagtacaagcaatattgaaataaaagtacatataagaacccaatacgagattaattaaaattcagaataaaataaaatccaaaattagacaaattaaaaagagagttcaagtaggaatacaattttgaaaaactgaaattgaaaacaaaaataaaaaattaaaagaacccaaacgatagtagttaaaattcgaaaaataagtaaataaaatctgaaattagaaaaaggaaaataagatttcaactaggaatacaatttatatataactaaaattggtgtaaaaaataaagactattaaaagaaaagaccatctaaaacacatgacgagattaattaagtaacagacttataaaggagtagagtggtggcggttgatgggacatctaaaaactattaataaaacaccaaatagaatactaaagatgattaaaaggaaggacgataggcaggtcatgaaacaatcggtcaaggcggttgccgggacttttagaaagtaaaagaaaaaccaatgataatcatatttgatttttaaaatctcaatgacaataaaaattagaggcaatgggcagatcgtataggagtacaatggcagtgccgtcgatggttggtgggacttctagaaagtaaaaaatgaattccaacgatagttatgttcaactttgacaatcctaatgataataaagagtaggcggcggatgggtcatagaggagtatagtggcagcgtttgacgggatttctcaaattatataaaatgaaacccaacgagacaataaactctaaaaactataatgtccaatttttaaaggttcgagcttctaaaaagtgaaaagataaacaccaacgataatcatttttattttaaaatctcaatgataataacaaagggaggcagcaggcgagtcgcagaggagtacagtgacaaagtcgctgacgttttagcggaacttctaaaaagtaaaaaaaataaacctaaacgataattatgtttgatttttaaaatatcaatgaaaagagaagaggcagtggacgaccatagaggagtataatggtagtatttgacgggacttctagaaattataaaaacgaaaccaaataggacaataaactctaaaaactataagatcaaaattttaaaggttccaagaagaatgaatagaaacagtagtagaccgagcaagcaaataaataaggatatgacagaagtaaggggtagtagttggtgtaactttttaaaactataaaattagaattacaaggatggtaaggtttggtatttcaaaatcttaagacaacgagataactaattaataaattttaagtaaagtcatattaaaaatatatataattttgtatgggtgctagccacgcaattgtatttttatatggactctatactctacttctaatattccttatttttaattctgaatttctattgtttcctaattgtatttctatatggactctatactctacttctaatattccttatttttaattttgaatttcagttatttcctaattgtatttctatatggactctagtctcttcttctaatatttcttatatttttaattccgaatttcaattatttctaaattgtatttctatatgaactctagtggcaagctgcgatactacgccggaaggaaggatgccgaggcgaggaggaaacggaagatttcgccatgttttgcccgcctccgcccacgcgtcccttgttgccacgcactacccgagtactccgcctatttaggccccaccaccaccaccaccccccaactctccccctccgacggcgtccaccacccgaccacctcccgcaccgtataatcgctgatcatggtgaacgttgctcgcttggatcaggccgacggcgcagtcggcgctgcgtccaagatcgccgcggcgcgcgcgctgggggcgttcggcctcgccacagcctctctggccatcaatctggccgcgacacgggggccaccgtcgtgctttggtgacagcgccttactaccacctcgctctcgtgggatccttcctctccggagtggcacaggtggcggccgccgtctgggtcgccgacgaccctcgcggccgccatgccgtcggcaagaaaatcatgtacgcctctattgcacccctcctcgtcgccgccggcctcaccggagcggctctgctctggtaatcccattccaccttggttcatctacacgtaccaacaccgacatcgccgccgccgcctcctaccgcgccagcttctccctggataggcgcgaatgtatcttctcttatatgtatcttacttgtttcagttgtgtgatgctgctttcttgctgtttgctgtttgggtcattattctaccatcaatcgatcacgctgtttccctccatttcctgatgctgttgtgttattgatcagtgctcgtattgatgaatatgagatgaaagtttgagtccccaaatcaaccccaaaaaaatcagctcatttacagaagagtgtatttggaattttggagtaccccgcgaattgcgaagccggcggaggcgcgccgaccggcgattatggtgttcgtgatcaccaattcgacatccacttcgtcgctgccgctggcggggctccggcgacggtgcgcaccgtacggccggcccgccgccgccttgttctcccttgggaagaagtagccgctgtcatgtgatggccaaaaggattctttttgtgatttttctatccagtttttaatcaaagattatgattgaattgtttggattttggaggaaaggtggggcatattaagtggaccccacatgccacataggagggtatgaggattagtggaggaggagacatcacagggtcgcggtctcgcggacttgcgactgcggcggcccgagagggccacggccatggcgacttcgcctttgccctcgccctcgccctgcacactccaaaaaagtctccgtctcgctgctccgtcttcctaactacatccgcttgcctcctctctgcctcaattcgctaaatcttgtcgccggaattttgctcggccacgatccgatcactgtcgccggaagccgtcctccggccaccccctcgccgtgaaactgcgccggcggatcttggccaggatctggtcggcatcgcggatgcggtattaattgcaacagatttgtggatgctatgatggccgtgcgccgttcagctgttgacttgtaagaacaccgcagccacctcttctgatttgagtggttcatacaggtatcgtgacttcctcaaaaattttatgcaaatatgaaaatatttatgtcatgcttaaagaatatttgatgatgaatcaagtcacgataaaataaataataattacataaattttttgaataagacgaatggtcaaacgttggataaaaagttaacggcgtcatacattaaaatatggagggagtatattgaggagcccaacttttgtatatttgccattgtctgtatttttcacatgtgggagactggtgagtatgacagttttcctggcatgtcatgtaataatcggaattcggaagatttgttattaggagagggatgctcaatctcctttctaatattaggcttttaccgttgtttgtgtgcaatcttcagcctttttcagactagttataaccataccattttgtatatcaaaatttatgactaaattgcactaaatattcgtgatttagtgcattgtgatgctgtgactgaatctgaaaatttggcagcgagaatgaatatcaagtaatgttgtgcatatccccgcagcctggacatgatccaactatcacagtgagctcggcccaactaaacttgggctgacttgggcagctatccatattttcatgggttgacttgggcttacaaatttctcccaaaacgatgcccaaagctttaatgggccataaagtggcgatccagttgagcacgaataaatcgcgtggttgaggttcggagtttaattcgccaacccctgtctatgcaaaacttttccattgtttgtttcaaaaaaaaaaaaaacatttccattgtttggaggcaataagaagagctccatgatacaaatgatttcatctgagcacgtaaggttgcttctacataaggttttgttcccatcacactatctcacgaaagcaaattcaagctgatataaaacttcatttgctgaaaacatctgaaaaatgtaagcgtggtactgcaggtctgcacctgccatcggccatattcgaatgaacgcattgcagttgtaatcctcggcgatgttgttgtatgcatgatctgccgtggtgatattaatggtttcttctaccttatctatgatgttcagcacagcagcagtcaacagttgatgacggagatgatgaagcctcccctagccgtcgccacccactagagctcagctatctcggggccttacaggagagagagaaaactgtggtggcggccgtgttttttttttaccttttccacatgactaatatgagggccctatggtttttctgatttcttcctagaatatataattatcacgtaaacgtcacgtcagtatgtgtgtggaccgagtcaaaatgataagttaaacaaaaccgctcaaaaagaccaccgagagagagttgatttgtactgattttgataattagggaatgcttttatactcagttttgtaattgagggatactaatcgatcacagcatataagtcgagggatgcaaacacacttatgcccatcgttgtggtcatatatattgcgctctcttgatacttaataaacacgttagtttcttaattatttcgttggcaactttttgtgacaagtcgacaaacatgattgtaacatctaaacgtcttgcggtgatatagagtcaccaatcacctcgatttagccaaactttagcagttttcccctatttcatccctaggtgctaaatttaggtgtaaatacatttgtcatgaattataaaacccactaagaacataaatgctcttggaacttgaaagaaagaataccacttggctctttttttcgcccccatgtagttaagctggcaattaatcgtcttttttgttcgtacttcatttgaaataatgtgtaggatcaacaaaacacacatacataagataaattcatttatccagacagtaattgacaacatgacgctgatacacacaccgagactgaatcgacaaacgcaacctgcaggtgctaggcatgcaccgtgaattattgtctgcataatatttggctctggtcgatcgatcgatggccgggcgatgagatatgctatatttatatggggcaactgaatgaacaatctagccagctctgtcgtcaataagccacgcttacctatcaaagcacggcgagcgcgctgacggcgacgacgagcgaggcgacagaggcgtagacgaagaaccagttgccggcggcgccggcacggcgggggtcgtcggagacccagacgaaagcgataacctgggccacgccggcgaggaaggtcaccactgcaagtgcaagtgcaaggtaggagtaataggcagcgccgttattacccaagtcagcttgcagcggcgtggtggtggtagccaaggtgattgccgcggaaatggtggctaagccgagcacccacagcgccgcgtccacgttggcctccgcttcgtcccgccgagtaacagccaccaccatatcttgattaatttcgaagactaatttgagatcgaagctagaattaaggcccaaagaaataaatactagagtttgcttctatcaaatttgctagagtttcccccttcttcaagtattgcatcgatcttcctcgaagagatatgtatatatataatcacgtattactactagctgccatgagttttctgtgggtcgtcgttgcacaaaatcacggtgcgtttgactgactcggtatcggggtgtacccgggctctactcgactcatctgaccgacacggcggggcccaccagacgtgggcccgcttgtcattcggatggtgcataacatacaccgcagcgacaccggcggttgggacatgaagacagctgcgtataggcgtcgtgagtggtgtttctgtggacggggaggggtggaggtttactgtacagctagcatccgctaagggcaggtacgcggcgaaacgcagcctgcagatattttatgtacttcgttgggcagacaggatcgagtaggaccgtatgcagtgacgcagccaaaaagaaccgccttcggccgcgttcagactgctcatctcatatgtatagttggaccggaacggaggctatgtttagattccaatttttttctttaaacttttaacttttctgtcatatcgaacttttctacatacataaattttcaacttttccgttacatcgttccaattttagcgtggaactaaacacagccggagtgtcggagtcaccaattaaccacgtgaagcccataataatttggccacgttagggatcgcaatatacatgttagggtgaatcagggctgcggtccaatatcgcgtgaacagtcgagggttccattttccccaaattctagtggcacgcaggctatatcgtaaattgtaatggtatttatctaaaatgattaacccagacaaaaacatttagttgggctagaatggatctagttgcaaactacgtggaccccataaggaataagttcacttgaggtccattaactttacactgaatttaatttttatccttgaaccgaaaaaccagatataacaggtccctaacttacaaaaccagtgcaaacgagtttcctcggcagtattgtcctcgattttagctgacgcggcgcctacgtggctcttttgactaggtcttcgttccacatgacgctaatgtggcagtatgacctaaataaaaaaataaaaagtgggcccacatgttagttacatcataagattaaaaaatggtgggacccacatgtcaataatacaacgttatcttccacctcccccacactctcccctctgttccccgagagggagaagaagaggagtgcctcgatcgcatccccaccctattagctaggtttctgttccgcctctgcctttgcctctacttctcctcctcctcaccgtcgccgccgcagaatcgatggagtggcaggcgcagctgacaaggagaaggacaacagccggcaatcgacagggagcagcgcgactggcggtaggcaggagctatgtgacggctgtgacgtccgagctcaaccgccgctgggaggtctaggagcctctgctcccacatcgccgctgcgggcctcctccgtttttggacttggacttggaagagctcgtcggcctctcagccctcctcgctgcctcctcgtcccccttgccggcctcccaacctcctccctctctgtgcgtgcttgccggcttccctgccgcctcctctcagcgcgctctcactggcatcctcatcccccagccagtctgcgccattgctccctctctgcgagtgctgagaagatagagagggtgagctggagaaagtgggatccactgacatgtgggtcccactatttattttatccttttgtttgactgacatgtgggtcccatatattttggtttaatttttaaaattttactcctagtgccacgtgggtgccacgtcagccaaaaccgatgacaatataatactgttaagggaccttgttcgcactggttttgtacgttaggggggccattgtatctggtttttgggctcaaggatgaaaatcgaattcggtataaagttaaggggcctcaattgaacttattgcaccccataataattgccgttagggatcgcaacacaggttcgggccagcagagggtgaaccatcgcgtgggccgcagcccaatatatatacaggtcgtgtactcactgggggtggttttcatgggtttgtatttctgtacattagaagagttgttacgagtggcatgggcaaattccattgtaaggtgtttatagttccttgcacgtgcacgatatctagtagttataaattactaatttctatgccaacatttatattaaaccgagttcacaaatttctgttggttgcgctgaaaaatgtactggttgcattgcaaaactgccgatgtgtagcaaaacatccaggagttgatgctttatgctgccgtgatcgattctgaaagcttggcagcaagagatagggtaaatgttgtgcgtattttttcctgcagctgtgtactagtaggctcttaagagttaagttcggggctaatctctaatatcgaattctatgcggattcccgtgcaaatagcacctccacgtggcgcggccagattcacggattcgctcccacgcacagccgtccgattgcatttcaacggtgagagatcgttgtggtggagcctgttgtaatatacgagaatcgaggggttttcttacaaaagcactcaatccccccatcatccgtctcctctccagcgtcaccgccgcctgattcagcacatccgccgcgtcaccgccgctgaccttcgccctgacctcctccccgctgcaccgaagcctctctatcccctgcgcctccacatgtcgcggctacgcgggcatctcgttggatctatcatcggcggcgaggaggcgtggcgatggtgccgaggttcatcggccggtggaggaacatcgtcgacttgaggaccgtgcccaggttccgcatggtccccaactactgccaccccgtgggagccgccgaggggggcaacaactatggctttcagatgatagtttgatcatgcacacaatgcgttcgacgaaatgtccatgggcattcatgggtgtggctggcgccctgatgatgctcaatcctaccttcctcgttggattactttggtgttggtcgaagcattggccgaccaaggaatgtgctgccaggagttacaatggtggactcacgtcttagagggcagttcccttctgactcatatggtgacataccgtggcgtgccgtgaaaacctgagattggcaaatggcttactaagtgtgatgccggcgtgtctttgtcactgaccaattcggattgcttgagctttccctggattaatttggttgttcttctgaaacggtttataggtgcaaaggggtgcgagcaagactacaatggacaaggtgtgtgcaactatgagctgggataatggagatgctttcatggatatgttggtaagtactactttgtcagctcaattaatgtgttaatcttgttcacacttgattaatgaaattgcgatttcacatggaatttaacaaggttgggttttaatcacactccattttttagcaccatccaaaaaatctttaagattgttttagtaatttatctactccgtacataatatcaagataaataggcatagtttatgaacctttgaattctgcacctgttccatactaagaagcaaataagaaagaaacaaataaatactccagttggttagtgtgtttgctcatatatgccattcttaagaaaaacatcagtttatatatttatttatgtcctatttagtttgctgtctatcaactcttcaaaaattatggataaactgtgctacttcaattctttgcttttgatcaaatgacagcccttgctctttccaacaactctattgacaaagatgttaaacatattttgcccaacactacaacttttgctccttagttctggaaatgatattgtatactctataaaccaagctaattcttcatttgacttatggatataccatcatagaaatagtataaggagacagttgcatattattactacacttattttttgaatatatatttcatcattgtacatatatatatttagacagctcaattatatatctttctgacaattgctaacacaatatttattataacaaagtttgcttggaaataacataataaaggatataatgaggcaataagaactgtgcgtggagggccggaagatgatgtctgtcatggccggcaagatggacgagctctggatagggcgtatggagtggtgcgtgctggaatgtaacaagaacgccatcaacttctacgagggaatgggcgagccacgcaggtgtgctcccgtaatggcacatatacagactcactggcgctgcacactggaaagtacaatgggactaagagaagggcaatggggcgaaatagatcggtggttgattcttagttgtccagtctcaagtaataaagaaaccggagatgtgtgatttagggtattggataagttcgtgatgtcttagcttgatgttctttcaaatgtagtacacaatctttgcagaaggttaagggaaaataaacaaattcttaaattataggaaaaggcaaaaaaagataattcaggagagtcacaagccccattgcataacaagcccaaaactgaatgttggagacactctagatcaaaacgttagcaagcggaaatggtatactgttatacctaattttataaaattattttatctctaacctttttacatttcctttttaccttgttgcaattactgacaatcacccaattactggactttgcagatgacatcgaaaaaatcctaggaaacactaacaagcatccattcaggacaatacattttttttcatgctagcaatggtgttgtttttttcttgcacaattttcatctcaagtcccaacgactatttatttaattcgttattaaggaaaaaattgatggatgctttatctagacctctatgtacactaatatcaaacaaatctaagctatagataaattagaattagattggcctaatatcaattgggcgtggcaaagacgcgccattatttctagtactcatgttaacctgtgcaaagctgacaaccattatggttgggaataagttcactttaggtccctaaatttgtacctagtctgattttcatcctcagtatagaaaatcggatacaacgcatccctcaacttacaaaaccgtgcagaaaaggtccctcagcagtattatgcccggttttaaacgatgtggcgcctacgtggctccctttgactaggtcctcgtcccacgtggcattgacgtggcgctcatgtggcaattggatcccgggaaaataataaaaaaccgtgggacccacatgtcagccacataaaaacaataagaaaaggtggggcccatgtggtcccacatgtcagccccctctcctctctatccccccccactctctcggtctcgtacagaacggcgagcggtggtgcagaggggagcggtgggcggacgacggcaggcgacggacgaggaaggaggcggcgggtggccaggcgaggagggaggcggcgcggcggccggaagaggaaggaggcgacacgcggcggccgggcaaggaggggcggtgcgcggcggctgggcatcgcgggcggagcggccgacggcgtggagctgccgcgctcgctagaaaagggatggcaggctccggttcctggtgcggagcccgcaatcgtgctcatcttcaacgcctccgctcgtctgccgtcagcgtcctctccgtcttcgccttcgatgtcgagggcgtagatgtccgccttcgacggttgtcatcgttgccgtcaggaggaggaagaggcagaggaaaaggtcgccgtcagcggttgtcgtcgttgccgcgatgtccagccaccgcgtgccgtccctcctcgcccggccgccgcgcgccgcctccctcctcgcccggctgccacgagctgcccctcctcggggcggagctagcacaaaatgaaggggggttccacttgtttgctttactctagtttgaatcaaatttagcttaatacgagtgcctaactttgaactgacagagtatatatatggtgaaaatagacaaactatagctaaaattttgtttgaaccgggttcctgggcacccccctagctatacatagctccgccccctgcctcctcgctcggccttcgcccactgctcccctctacgccgccgctcgccgctctgtacgagactgggagagagagagaggggggggatagagaggagagggggctgacatgtgggaccacatgggccccaccttttcttattgtttttgtgtggctgacatgtgggtcccatggtttactattatttttctgggattcaattgccacataagcaccacgtcaatgccacgtgggacgaggacatagtcaaagggagccacgtaggcgccacgtcatccaaaaccgggcatagtactgccgagggaccttttctgtacggttttgtaagttgaggaatgcgttgtattcggttttttagactgagtatgaaaattagactgggggacaaattgagggacccaaagtgattccttatggttgtgataggctgacagaaatgacgctgtggggaaggccggagaaacccacaacttgaagcccagcattgggccctggacacggccatacagtccacgcaggcccatcgaaaattctagtttcaagtcagtcgcaaccattggttgcgatccaattttatgtgggctgcgacgtctcccggatgcctggcccaagcgagcgcggaatcatttgggtagctttgtgcagttctttttcttccggtgatctgtttgcgtcttgatgcgatattctccacaatctccactactcagtataagctagtttgctctatattttgaattttccatgtttcagcatttcaaatgtgcaatagaataattaaaaatgtttcatcgaatggaagctgttgcctgtgaaattgtcatattgtgcttcatgattatggtttttctgcaatattttttttccggatatgccttatacgtttgcatgggaggagaaaatatgataggtaggcctaccaatttttaaaatataattgttgaatgttgtgcgcaagttatgtaggaccaaaaccactttggattgagagggggtggaggcttatttggtttgagcagttgggtgtgtcaatgtgtcttgtattcaagttcatggcttaattaggtcgatcgcagtagtttaggggttaattcaggcttttctcttataataaaataatatgttgggtgttcagtagttaattgttatgtttttgtggttcgcttaatctccataagaaagtattagagggattaattccacatcataatagcagttgggtgaaggattgaacaaacaagaccaattcttggaaggaaacaataccacaggcaatcttattggtcaagaaagaaagagataattatcggtataaaaactaatttgaatcctatttaaagatacgccctcgagctctaccaaagtcaaaaataaaaggaggagagaaagagagagcgtgtgttaatttattcccgtcttcacgtacaatctctcagctgatcggtcgatcagaagaaaaaggaggccggcagaaaagcccccggccggggatgacgtcaccaacgtgtcatcctaccggtggtggactgtggagtgtggacgaaacgatttgagagaaccgaagtggagtaaaatactatgtgggccatgtatttatgggaaattcgcggtcagaaaagccggggaaatggcgaccccaacgtgtgccccgaacgaaaaaggaaaaacacgggacgggtcgacgtgtgcccgaaggccgaacgtataaaaaaagccggtgttgaatcaaacggcagaattatgcgagttcgcagaagcttccttgtttaaagacatgatcgtcatttgggcttttcggttaaggccatgtttacttccaaaaactttttcccaaaaacatcattttaaatctttagacacatatatggagtattaaatatagataaattaaaaaactaattacacagttaagagaaaaatcataagatgaatcttttgagcctaattagtccatgattagccataagtgctacagtaatccacatgtgctagtgacggattaattaaactcaaaagatgcgttttgcggtttacttatgaaattagttttttcattcgtgtcaaaaccccttccgacatccggtcaaacgtccgacttgacacccaaaaattttcttttcgcgaactaaacagaccctaagagcaagtttagggggtgtttgggagagaagggctaaaccccttaatagtatactccaaatcttatataaccaatctatcgcgttcaaacttgcagtcgaatggctgacctgtacatgaagcacagtccagtgacagacagactaccgaaacagcccataattagttatcctacgtgcggcagagtactaagagtatctggaatgaccgaatgacaagtgggcccagaacagaaaggtcccgccgtgtcagtgggagactgggaggcccatgcccatgtgcgactttcgtctgactttcttctgaccttttttttaagtgtgtgcacgctcgcgtcctcaagcaaaattttctactgacatttcttgtttgtgtttgcgttgtcatctatatatatttcttcctccgcctatcttctgagcatatgttttgcacctccagctccagcaaccaagccaccccaactccgacggtccctcccacaggtctctctctctccccctcttctgtagttcacgaggagaagatcgggcagccacgaatcggtcgagagatttaatggcggcggcaaagctactgttgggtgatgctcgccgcgaaccggaggctaagatcgcctccgctctgggcgcgctcggcgtcgccgccatctccatggccaccactttggccgcagagttcgagccgtcgccgggcggcctccgcacaaccacctacaaccacctcgctgtcgcggggctcgcagggaccttccttggcggggtggccctggtcggtgcttcagtctgggtgtccgacaacccagctgcccgccgtgcagccggaaagaagttgctctacttcgccgccccgccgctcctcgccgcggtcgttctatcggtggcggcgctgctctggtaagtgccgcaaaggctcatgtactacaagccccccctgtccggccgcatcactatcttgttggagctgtattgtcatcgtgtaatagtgcgtgtttcttctagttctagtccattgtgtgtatcaccaatgtatgatcacgtctccttctgttcttggtctgtcaaagtgttgttcgtatgatggccggcttaatcgacgagtgttttgttaattatgagttcatatctcgcaatttcaagcaaatggggagctatttagtactagttttcagcttaattacatttagggaagagtggattcggagtactccatgcatatcggcgccgccgccggcgacagcatggcgggcgtttctcatcaattgcgccaccgctgccgcccccatagcagtactactactgtctcggtggcgctgggggactgcgttgccctggaggcggcagagtggtggcgtctctccacgccgctcgccgtcgccgccgacgccgacgctgaatagttctggaagtttgccttgtcggccgtcgtgtccttctgccgctaaaagcccatctttttctcctttttcttttcttttctttttttttttggggcaactgttagaagagagggaagggtgggccatatttaagtggggcccacatgccgtatcatatccatgacctttgtccttgcgttgccgccggcggcggcggctacggccatggagatctcacgcgaccatttgccggtgaggtcggctgctccgcctccgcctcggcatctacgcctgattggatccccacccctatctccactgactgtgctatcgcgtttccggcggtggttgatcgaggcggtagcccgtgcggcgcgcgagattccgcccgtccacggatttccggtcgccatcgcggggattcgtcttctccggccaacccctcgctgcgcgatcctgcgccgcccgtcctcgggcaggatctggtcggggtcgcttgtggtaggtgttgggggggcacttgggtttggaggacagcatcgttgatgtgctttgactttgagttccttgctaatttagttatgctgactgttcccataatccctaaaatcccagcagttgcgttgtgtggtaggttatgtaaagcgcattcctgtgatgaaaaatagaccctgggagacatataatcacttgtatcaagcgatccacacactaggcccccaaatattgtcgtagataccattttctcttcagtatgctgcttaaaatgcaaattgtaagcttttcgctgtgctgtccagctacatctagttccttatgtttaaagactgatattggtctttgcctctttggttgtgtgtgatgtgcttctttttaatcgcaacacttgatctttactatcggtgcatatttagttccagtatgtccttttagttaagttgctgaagcattgagcatcttgtcatgttgatcttcttatgagtggttcaagatggtttgttctgttttaatggaagtaaaaaatggggcctgtcccctcctaatgggaagagaaaaggagatgtatttcagcaaccatgtgttatagtataatccaaatagttcgctaagctacgttatatcctgttctgagtatttatttgatttgctgcaaagttattaaatttatggcattgttatacatgatttgtacttgattatatgttgctattggtgattcatgtaattagagctgaatgggatttttgctacatacacattgcttctttcaacaacccttatgcaaacaaaattaaaggactggtttctctgctgtgctgatttccattgttccctagctgaagcttaagtaattgcaaaatttgtaggaactcatctgttcttttgctcttacaataaatgtgaggtttgtattcgagctacactcatgctatgtgcatgcgctctgtctatctgaaccaatagacttttgtaaatacatttgcacaaggcattgaggtcaactaaaattctactatgcccaatggtgcagccatatttcatacatgaatatggctatcgctttgtctgataggttatggactgtgaactctatgtgtttattttgatgtggaatggcctcagggcaacgcaggataactcatacatgcaatccatacactaggtcctgaaatattttcttaatgcccttttctcttttcactatactctacttgttaaacttctaagaaaaggcttatccctctaccgttctattacatctataattcatttgttttgatgtcaaaagcagtgtattgagctgtatatcttgttggagcaattttacattccttgaggaggtaccatggggtaccaaaaaatttaatgtaaaatttggtacctgatagtacctaggtatcaagagatactaaatttacaatagaaaaaatagtacctcatggtacctcctcaaggactgtaaaattactcattttgttgtgatatactctagctcattgtagttagtgttttgacttattgctaaacccttgggagcatctcataatgtttaactctgatgaattgtttgagatgacttttttttttgtctagatgaatagtggcatcgcaaccccaggcaagagcactagggcctagaggtattcctagaaacttaggagcaaatggacaaagatgtagcaggaccagagcagaggacatttggcagctttgaaataccataatgcatctcgtaaaaaatattcaacttttaaaatttgtactatgtaatagactaataggtggttaaattctgttcttctgagtgatagaattgcagattgtaaatcaatatctacttgtacaaaagatgagtaaatcttttgctcattcttatctactccttttttatttgtcaaaatgaataggaatagcagggtgcctttaaagtataatcgaaagagttggtaaattttaatatacttctgaaagaatcatcatccttttgtcattatctttttcatgtattgaacaacagatttgcacatatgtatttttaccatcagtaacagctctttattaacggatagtatattgttctgcttttatgtagggggatgttgagttgtaagaagaccagatgcatctgctctgattttagtggcatgtataactataacctgtcaaagagcagcaaaagaaatgcctcgtagctgtgtgatacataactttgccaggatatctctctgtttatgcacacagactgctatggcatttttaaccgtttgctcagttgctcttacgtgcatttctgctggcataagatggtggcatggtggaggttctgttgttaaaccctggtatcaggacttgatcgagcaatttggtatgttcggtgaaaattcatgctcatttgagtgattgtacagtactccgaagttggtgttttctatgctccggtaattgtggatcactggtataatgaggaaatcaacctaacgtataattgccatggtctgtatttgtgtgtatgtggagactggtgtgtgtactaattttctggaatgtcatttaatcagaagagttgtttagaagaggcataggcaaattctcttgtaaggcttatgtagttcgagtgtttaacatggttataacagtagtgttttctatgacgacatttatgattaaactgtgtctacaattcctgccttttgtgcagaaaaagaaaagcactgataaaacatcctagagttgagtgcattgcgctgctgcgactgattctaaaagcttgacagcaagagttagaatagagcaatattctgcataattttcctgcatctgtgaattttgctactcttgtactccctccgtcccaaaatataacaatttttacttagatgggatgtatcatattactacgaatctagatatgagacatgtccaaattcatagtagtaggatatgtcccatcttaaaaaaatatatattatattttgggagggagagagtaaaacatgtgctcgggtgtgcaaacctgacagccattatggctctgataactcatgctccctccgtctcacgatataagggattttcagtttttgcttgtaacgtttgaccactcgtct

SEQ ID NO: 5687 - DNA, 41976 bp, Oryza sativa
agtctatttatgcaagccaatttatttagaaaagtgttgagcgtataacatctttttttcagaaaaaaaataaaaaaaagaatttgaaacctatttaattactaccaaaacctaccaccatacccacaaatgcatgatcaaaatgtgcctataatctggtgaagggaggtgtaggtgccaacaacattgacgcacactcctatgaccagtatcccgacaatcatcgtcctctcgaagcagccaactcctcctcgggacatgtagatcttgagatagctcaggcacgggaccagcacagcaacggtgacgttcagcgaggacccgatgaacaacatgagatagccgaagaagggcaccgtgcatgccagcaccactgtgctgatgacgacggctatgctggtgagcaccctggtcaaccagttattctcaacgtccgtcgtcgctgacaacttctcctctatcgctgttgtgactggctggatcacaagcgtgtagttcgccagcggggtgatcagtgtcgtcaggatggcaaacctggtgtacagcttccctgtgggtaagttctgtgtcacctgcgactgcacatcctcaccatagatcagatatctcaacactactgtcactgcgtagtttaggctacacaacaccgacgagatcaacaaaacctgcacattaattggagagtaatagaacattattggagtactgatccatcatcatcatcatcatcatcatcatggtttcataaaccaaattatgataattggaactgataatccatgatcaattatcattggttgccaaatccctccaagtgaaagggaaaacttaaaaatgcaacatcattgagcaacatcatctgaagatatggataattgaatgcaacgtttgatcaatatctatcgttagatcatggatatgtatcagtaaaagaatggtgaaaggtccaagattgttcaagaaacttccatgagttaatggagcaatagtcaatctcctaccacttttgcatcttatccctaaaaattctcatacctattggttgagtctaaacttagtacaaaaatatatacaacacaatagatctctattttaacttggcatagaaaagtttatgatgcagcacatcttccaaatttagatatgttgccttttaatttatctaaaattgtattggactatacataaaattacttaaaaacaaattttgtaaactatgtattcaaatagctaatataattctttcgttttaagtgctagacacatcttctaactttaggtttaacatacaaactaaataacattaggcggcacatgattagctttatatttaagctacattgcttttacatgggtgtgtatgagtggtaaccaaatatagttgagaggcgaccctaattgcctccagtcaccggtttattccgctggagtgataggctgtactgtagcacagtacaccttcatgtcaccgcacacgttaaactggtcgaaaggccaacccaacattacccaaaatttacgtcattatgcaaaaaaaatattaatgctaaattgtgaatattgcacttgcaattaatttcatattgcacccgccattctatatcagtgtaaattaacattacgaaattgataactagtacaacattttttttagggatggaacaactttttttaataaatcattttaatgttgatttcatttgatcttaattcttaattttaattggatggtcaaaataaacttattggcttaacttttatttgcatgatgtatatacacctgctatatgatgggagtgccaacaaaatatattaagtatgatgagaacgtagcaactatgatgattaagaggtgtgcaagtatagtatgcatgattattgatgtatgagttctaaaaaataattatgagtgtgcgcgtcttccatgcatacatgtaataaaaaaacaatatgtttgtattcttactaaacctgttgctaatttatttcaccatttactattcaattttcattaacgataattctaaatttacattgttagttgttatcataaattttaccaaacttactatcaagttcaacacataaatacattttaaagtgtaccttaggaaaatccttcttggacttcattgaggagtacacggtcgggaagacgccatggccggcgaagcaaacgaagtagagggtgagggcggtgggcaacccactcagattcaagaggttgttgcccgccatgtggaagcccttgtcgggcacgccggcccagaccccgtcagcgccactgacgagatgagcccgactaccgagacataggtgagcatgctgaggttcttgagccacgtcatcgggaggatgacggcggccgtcgcgagcacgaacagctgcttcccgtgcacttggtaccctaggatctccaccaccgtgctggggaggagcttatcgaggttgtcgccctcgaggatgaggaagctgatggcgacgaggtagagctcgacgtacatgacgaggccgatggtcgtccagccgtaggcgccgaaggcgaggtagccgatgtctgggtagctccgtacacagcggtcggcgcacatgcagcggtcgataaggttgccggtgtagaagcagatggcgccgaccatggcaaagagcgccaggctaagccacccaccctgcaacggcataaccagaaatcacattgctaaagttgaggcagctcctcctgaaggaagcaccggtgatgcagaacgagacgccgtcggtagggaagagttgctgctccatgtcggtagggaggaggagctgctgctccatgtcgcaaatcatatcttcttctcgtgtttgctatggaggagagcctcatcgatagggctcttatccgccaccataatccccatgtctgtgtgtacacctattaaaccaaaaatcacccgacagatttttaaatcaaaaacacttagatttttaatagttacataatacacatatggaaatagcatgtataacttatcatatgtatcataacacataattcattattaaagataaccttatagttaaaaataaagtgcaacttacactcagtgaaaaatagaaaaaaataaattacatacaaatctaatagagattacattgtaatttaggcctggtttagttcccaattttttcttcaaacttccaacttttccatcacatcaaaacttttctacacacacaaacttccaacttttccatcacatcgttccaatttcaatcaaacttccaattttagcgtgaactaaacacacccttacaatgagtgaaaatgtaattattacaaattacactgtaaaagtactatatttacactgtaatttttttcctcgacttaactcctctctctctcatcattaccaggctttcatgccctgtatgcttttgggcaaagtgaagttgacaggaatgagtacactagacgattaaaaacaactttaaaatatttaattagtgagagacaaagataatcagtcatatgcatggttgtacaataccacgtagtccagcacacgcgagttaagagtttcgtgggagcgctgacacaaagaggtcacggatctaaagtttcgattaacggttgaaaaatcgacaaatcttaacggaaaaatttgtcgaggtatttttagcttaattgattattaattgagagttgagatgagatctaatttagaatgggcagaatatgtgagattagttatatgttgatatatcttgagtcgataattcatgagcgtaactaactggggcgctagatcaagctccaactcttctgtgctcatttgcacttcgtggactcgtacaattggtaataaattcgctttttcttctcctattttgtgtccacggttcaccattacgtccacaaccggtagagacttacatatgtaatcttgggacttacattgtaaatacactaaaattacatatgtaattttgagacttacaatgtaaatacatgttgactattttttcatgaaaaatatggcggaataaatatagatactctcaattaataatcactttaacgcgcggcagcatactgctggactgagagagcaaacaaaataataatctatctattattcccatgctggttgttttgccgcctgcctattggtccaggtggcacaacgcttttctgatgcgtgtacgatgctgcctatacacagttgtgcatggctcatgtagcatcatgggccaagtgccatgcacgattgaatggactaggtaggcccacgtgtgaagaaagaaaaaaaagaaaaagattgatctatcactgtacgtattgatttggttgcttctgtttacaccgtaattttgacaaattaatccttatattaaaactttaaaaataaaccatgtcaaaaactaattaaaaaaacagaccgtgaccttagcgccaaccctaatgacactaaactaaaacatctcagcaccacccaacatggcacaaattagccatgtaaaaggaactcaacgtcactatacattacgatgacctcttaataggtttaaaatatatagcatgtgctgaaatcctgagtagtgtttaactttattcgttttatcaaaaaaaagtgcctataagtaataaaaatagacaaaacaattttaaaattaagtagtgaatttaaatttatacaagtaattcatagcacatactacgaatgcatatgtaattttcaattattaaataaataaaccaagattagtattgctatgtcttaaacatatggtaaaggttaacatatatactttagagaagtgctctcacgaattgtgcttatcgttgggtattcttgcaaaacgctgttaatcctagaatgaattcatactggtacatgtatgtcttcctgaaaataggaaaggaacgtgcatttttttcaaaaaaaaaatatatgttcaatgtgttcaaatacaaaacatgcaatttcattaaaaaaaattacttattaacccaataaaacatagctagcatatgttaccactctttctgcaacctttttacaaacacaaaagtaagaaaaaatatttaagagttttgtggacatgagactgtctatatgacagccagctgaatttttgggtagtatcagccgaattttggatggtggaatctttcctaatctgacacgtgttaaaaatcctaatgccgcccaaatctccaaccactggttgacgtgtgtcacgatgagttctattttgagcagttaattaatgggtctgtcattgtcaatatcagttcaataaaactctgttgctcaactaaaatggcacgtcaactattcttaggttatgcggttctgctatacattacttcttctgctacacatcatacatccttttcgttcaagttgaccagctttatatataaaaaaacatagtaaaacttttgacatgaaataaatattatttaaaaatatataaaatgatggatttaacaaaaaaatatatgttttatcaaacttaaaaaagttggcttaacccaaaacgtccaaacaactttaagtttggccaaatatatagaataatatagtaatattttcaacataatataagtatattgaatggtatatttagtggaaccaatttgttgttgtaaatgtcactatgttttttataaactttgacaaacttgaaaaggtttaaacaaggacaaacccaaaatgactgaaaacacatagggagtagtacttaccgaaaaattatagttttattgcttttcactatctatcagccattaagtccattaagtaaaaattaaatttttttctattaatttcctactgtatagtcctcttcagtgcacacatcgcaattatcttcacctgcacgtgcttccaatctcaaaattataataaaataagagaagggcaaaacaaaaggaaattaaccctcgggcaagagatacgtatggaggtagagtcacaatgaaggaaatgaaagaaattaggttgttaaccaatttttcttatggaaacataatttttaaataaagcatgtttctctaaattttacaatgaaacaagcgatgggcagattaagaaaaaactagtgttcccaagtcagtgacggtctggcggattcagcatgggtggccccgctcaaacccctcctacctagttggatcaccatggagagcaaggagagtgggggagaaaaagaagagtagagggggctagagaaaggaggcacagatccccctctaattcaaagctagatcatacaaaacacatggtcctaatctacatatatacggcattagaatttgcagacaaaacaaagagtatggtgaatggagacaaataacaaaaaagggatataaaacgagcatactggtagggttaggagaaggcgcacacatgcagggaggaggcgccattggacggaagaaagggatatatacacctttcgttttgtaattatatgttgagttccgttccgaacttatatcagtatatcagtcaggtacttcgaacttaaaaattggtagttgttttcgttggattactctatatacctaataaaaaaattagtaaggcttccgtgagtttttttgtccgtcgtttttttcgctctttcttccttcttttttcccgtatttcttttttttccgtccggccttttttcgttttttttcttttttttccatgcgtcccttttttccgccgttttcctcttttttttctatccacttttttttcgacgtcgcttcttcgggttttttccgtccgctttttttgtcctttttcttcttttttttttgcacgttttttccttcttctggttttttcatctgcttttttccatctctattttttgtcactttttttggcacgcggtgaggattcggtttctaatccacttggtttttttttcccattgccaggatttaatctcaagctgttgtcctggccaaaccctagcgccaccgccacagtgatatgcctcccgtgcgtttcctactataactgattgcaaaaattgattccccaatactccctcattatttgatttcctcttaaaattcggctttacatcactagatttaatctccatttaacagtcatcattttcccataatttccccttttcaatttggatttaattcactagatttaatcttcgtaagccggtgatcttccccttatcgtttttatcccaagttttgtggattcgctctgatttgggaaaatctgaaaaaagagatactgatgtttctgctgttgtatcactaaaagatgtcttttcccgttgcaacgcacgaccatttttttcttgtcccatccaaattacaggagcaaggaaattacgaaaaaaacaagtatagaaggatatagcagaacattcagggtaactggccaaataacaacaatagggaaaaaagagaagaaattatagcaacgtagctaatttctcacctctcccaccaatttgtagatcgatggcggccacggcgcgcgcaccgcctacaccacaaccgcacgcacgggagagatataccggtggagacgcgcgtgacaacaatgacacggcgagctgtggtcaggagctctcactagcgggggttatggaagaaggttaaaagaaaatagcgggagaggattagatctatatatggaagaaggttaaaagaaaaaagaaaggaaggtagggttatgtcacgtcccaaaacgactctaaaatacatcctctaaattatgcctagaataattaaaaaccgtgtgaaagcctccaacaattaaaatgtgcaaagttaaaagtcaaacaaggcttagaggatttttgtatatttcctaaaaagcctaaaatatgtaaataaattttagtggaattttcagagcacaaataataattgttaagaaataaacaaagttaaaaaggttttataaaaagaaaaaccctaaaatccctccttctctctaatgggccaacttcggcccatctccctccccctctctctcctctccccgcggcccactcggcctctccccgcgcgcgcgccgctgacgggtggggcccacccgtcatccccgtcctcccgccgctcccgccgctccgcctgcgccaagcgccaccgccgccgccaaatccgccgcatcccgccgtccccgcgtgcaataaagtgggggaaatcactccccgtgatcccctctccctttccccccatctttccctctctctctcgcgttcaaatgggcggatttgcccccgcaaatctcgccggcgccattgatggcggccggacctcccgcgccggtttccttcccctccggccgctctctcccccttccaaccctatttaaaccctccctgcacctcctccgtccgtttccgcctctcgccgcccttcctccttgccggattcgagctcgcgacgtcgctctctctctccgccgtcgccgccgagctccggtccgccgccgtcgtcgccccggaccgcctcccacctcggcgccgcctccttcgggttcgccgcatcttcgccgacctcgtccacctctccgtttcggtcgccgacagccggaacgccgtcaaccccgtcgacccgagccgcgccgccgcctccctccgctccggccgcctcctccgtcgccgccgtcgcccaggggtgagccgtggaccgtcgcctcctttcctccttccctcccctctctcggccgccgctccgccgcgccagtggtcgccggcggcaaccatcgggacacgggcgcgccgcctcccgccgaccgcgccagcgtggccgccctcgggcgcgccgagtggctgccgcgtggggcccggccgtcagccgcccacgccctcgggtgcggctgacgtgtggggcccacggcgccggccggtgtgagcccgggtgcacccggtccaccgtggaccgtaaggctgccgcgtgggccccactcccgtggacccggtccccgcgccccttcccctcggctgacccaataaaccctttttaaattaaaatttaaatgaagaaattcgtaaatattcatttaaagagcatataaacttcaaatggccataacttggccatttgaactcgaaattggaccattcaagtctctaatttttccttaagaagtcaagaacccatttttgtgctttgttcttgctggttatatggagtttattagagtaaaagccttttcttttccgttggtcgtgtagacgctgcagctttggaagatccgctcttcgtggaggttgaagccgacgtttgggaaagcgagcaaggcaagtcacatcatccttgaacatattgaatcccagtttataaaattattttgatttaaattattgcattatcgctttatttaaattcccgcgttatcattgttttatctagtcatgcctatttacttttgttatgaccttattattgttattgttattattaccttgttcaccctagaataaacaaaaccccaactagtggacactctactcatggtaccactagtatgaatttagttagatgcttcgccgcttaattaggtaacattaggtggttttacaactctagactttgggatattcatatcacctggacactacggaatggttggattattgtggaattggattcacacctccccctctattcaaaatcctcaaaatggttttaggctgggctcggggtgcatggttttgatagtagcacctcggccatataaggaccggtcttcgggcctctattgcaaagcactaccgtactttcacatgtctagtgggtaaggcttagtttgtggctcagtctggttataaacaaaagtacacggatggagatggacgaagtcgggggtcgatggacatctctaggacaaatgaatgctacacgagctgcggcctggtagttgagatgtcatggcacagggccggtgtcctgctgctaggggctcagtcctgcctacctgtcccgggggttccggccgtaggtggggttgggtcggtactcttgtctatggctaggatgggttggaaactatgtcacgtcttccgtccgtataccgtggtggtatgtggcacgtggttacacgtgaggaagatgtgtcttgtgggtaaagatgtacacctctgatcagagtataacctattcgaatagccgcgccctcggttatgggcaagccgagcaatgtacccaagttagtgttttttaattcttaaaacctgcttaacaactaaaatgtggaatggttggcctgggttggcttgggacgagctgggacccagggtcgggtttccagttcggtctgaatcatagtaggccttacgttaaggcaggttcgtgtgggttcacggccttgattaataatcttgtatagctctaggatcgtatttacaaaatagctttgagcaactaagtgtcttttaatgctgtttactgcaaaccctaacccttcatactataaccccccttgtactcccttgcatttattctgcacttgtgggtgtgtcttgttgagtacggtggttgtactcagtcttgctcaatttttcccaaactcagaagaggagttcctggaagatcaaggctttggtgtctagctcatgcctgccgtcaagcgcctgtggtcgtcgccctagtcttccgctgtttcccgtttgtctttgtgtgtgctgggccttcgccgcccatgtaataaattaattatttacgcttccgcttgataaactctgaaatatatcaacttttgggtgtaccttgcttcctgggacaaggaataatacacgcacgtaaggaacgcccgttgggttattttcggtcgtgacaggttaggagaaggcgcgcgcgtgcgggtaggaggcaccatcggacggaagaaagatgatatatacgactttcgttttgttattatacattgagttccgttccgaatttctatcagtcaggtacttggaacttaaaaataaattggtagttgttttcgtcggattactctatatacctaataaaaaaatttgtaaggattccgtgagttttttcgtccgtcgttattttcgctctttcttccttttttttcccttctttctttttttccatccggccttttttctcttttttttctttttttccgtccgtccattttttccgtctttttcccattttctttgcgtccagttttttttcaacggcgtttcttcggtttttttttccattcacttttttttctgtctattttttagtcagattttttgacatgcggtgtggattcggtttttaatccacttggttttttctgtcgccgggatttaatctcaagctgtaccgccgccacattgatctgcctcccgtgcgtctcccgtgcgtttcctgctctaattgattgcaaaaattcattccctactactccctcatcatttgatttcctcttacagttcggctttacttcaccacatttaatctccatttaacattcggcgtttccccataatttaccatttcaatttggatttaattcactagatttaatcttcgtcagccggcgatcttcccctagtcgtttttatcccgacctttttggattcgctccgatttgggaaaaactaaaagaagatatactgatgtttctactgttgtatcactcaaaaaacgtctttacccgttgcaacacacgggtatttttttctagtcccatacaaattagagaaacagggaaattacgaaaaaaaaaaacaagtacataaggatatagctgaacatgcagggtaactagtctaataacaacaatagggaaaaaatcggaacgtagctaatttctcacctctcccaccaatttgtagatcgatggcggccacggcgcgtgcaccgcctataccgccgccgcacacccgggagagatataccggtggagacacgcgtgacaacgatgacgcggcgagctgtggtcaagagctctcaccagcgggagttatggaagaaggttaaaagaaaatagcgggagaggattagatctatatatggaagagggttaaaataaaaaaaaggaaggtagggttaggagaaggcacgcgagtgcgcggacgaggtgccgttggatggaagaaataggatatatatgcctttcgttttgatattatatgttgagttccgtttcgaaatcagtcatgtacttggaacttaaaaattggtagttgttttagttggattactctatatacctaataaaaaaaatttgtaaggattccatgagttttttcgtccgtcgtttttttagctcttcttcctttttttttctcttatttctttttttccgtccggccttttttcgcttttttttcttttttccgtccatccgttttttcgccgttttccccttttttttccgtgcactttttttcgacggcgtttcttcggtttttttccgtccgcttttttcgtcttttctttctttttttgcacgttttttccttttttccatttttttcatctgctttttgtccgtctctgtttttttagtcacgtttttttggcacgcggtgaggattcggtttttaatccacctggtttttttccgtcgccaggatttaatctcaagctgttgccctggccaaaccctagcgtcgccgccagattgatctgcctcccgtgcgtttcctactataattgattgcaaaaagtgattccccactactccctcatcatttgatttcctcttactattcggctttacatcactagatttaatctccatttaatagtcatcgtttccccataagtttcccttttaattcggatttaatttactagatttaatcttcgttagctggtgatcttcccctagttgtttttatcccaagttttgtggattcgctccgatttgggaaaaactgaaagaagagatactaatgtttattctgttgtatcactaaaaaaacgtctagacccgttgcaacacacgggtattttttctagtcccatccaaattggaggagcacaagtatagaaggatatagcacaatatgccgggtaactggcctaataacaacaatagggaaaaaagagtagaaattataggaacgtagctaatttctcacctctcccaccaatttgtagaccaatggcagccgcggcgtgcgcaccgcctacaccgccgccgcacgcccgggagagatataccggtggagacgccgtgacaatgatgatgcggcgagctgtggtcgagagctctcaccagccgggattatggaagaaggttaaaagaaaatagcgggagaggattagatctatatatggaagaaggttaaaagaaaaagaaaggaaggtagggttaggacgtacggggagtaggcaccgtcggacggaagaaacatgatatatacgccttttgttttgttattatatgttgagttccgttccgaacttttattagtcaagtacttggaacttaaaaattggtagttattttcgtcggattactctatatacctaataaaattattgtaaggattctgtgagttttttcgtccatcgtttttttcgctctttcttccttttttttcccatgtttcttttttttccgtctggcttttttcgctttttttcttttttttttctgccgttttcccctttttttttccatccacttttttttcgacgtcgtttcttcggtttttttccgttcgcttttttcatcattttttcctttttttttgcaagtttttttccttttaaagtttttttcatctgctttttttccgtctctattcttttaatcacattttttggcacgcggtgaggattcggtttttaatccacttggtatttttctatcgccgggatttaatctcaaccagttgccctggccaaaccctagcgccgccgccacattcatctggctcccgtgcgtatcctactctaattgattccccactactccctcatcatttgatttcctcttacaattcggctttacttcactagatttaatctccatttaacattcgtcgtccccctataatttcccctttcaattcggatttaattcactagatttaatcttcgtcagccggcgatcttcccctagtcgtttttattccgagttttgtggattcgctctgatttgggaaaaactgaaagaagatatactaatgtttctgcggttgtatcactaaaaaaacgtgtttacccgttgcaacatacgggcattttttctagtcccatccaaattagaggagcaaggaattatgaaaaaaaacaagtataaaaggatatagcagaacatgcagggtaactagcctaataacaacaataggaaaagaaaagaagaacttataggaacgtagctaatttctcacccctcccactaatttgtagatcgatggcggccgcggcgcgtgcaccgcctacaccgccgcctcatgcccgggagagatataccgatggagacgcgcgtgacaacgatgatgcggcgagctgtggtcgagagctctcaccagccgggattatggaagaaggttaaaagaaaatagcgggagagtattagatctatatatggaagaaggttaaaagaaataaaaggaaggtaaggttgggagaaggcgcgcgcgtgcggggaggaggcgcgtcggacggaagaaagaggatatatacgcctttcgttttgttattatatgttgagttctgttccgaactactatctatcagtcaggtacttggaacttaaaaattggtagttgttttcgtcggattactctatatacctaataaaaaaatttataaggcttccgtgagttttttcgtcggtcatttttttcgctctttcttccttttttttccattatttcttttttttcgtccagccttttcttcgtttttttttctttttttccgccgttttccctttttttttctatccatttttattcgacgttgtttgttcggtttttttccgtccgcttttctcatcctattttttgcatgtttttattcctttttccagttttttcatccgcttttttccgtctctatttttttagtcacattttttagcacgcggtgaggatttggtttttaatccacttggttttttccttcggtgggatttaatctcaaacagtttccctggccaaacctagcgccgccgccacattattctgcctcccgtgcgtttcctactttaattgattgtaaaaattgattctccactactccctcatcatttgatttcctcttacaattctgctttacttcaccagatttaatctccatttaacagtcgtcgtttccctataatttccctttcaattcggatttaattcactagatttaatctttatcagctgatgatcttcccctagccgttgagggagatccgtcttccccgtgatctcgtagtaggatgtgcattatcaactcaactctgctcatgtccccttctgtcgccgtctcgatgccacatattttaagatcggtgtttgtgctgattaggggctgttacatactacctccgtcctaaaagaaaatcaaaccctacggatgcgtgtgtccagattcatctctagagtttgattttttttttacgtatgcccagattcattcctaaggtttgatttttttttacatgtgtccagattcattcatagggtttgattcttttttagacggagggagtaagtgaataacaatttctcttgaagataaattgaacggttttgataattaaggtgggtccaatgccctattttagaattgggcggtgtatttaagataaacatagtaattcaggggatcaaatgggctcacccattgtaatattggaactatttgccacgagaaagcccatagctgtatagccgatttcttgcaccattagtgtgcatctcgttactactagttgggtttcgcttgtttcaactataatttacattccagagctaattttgaattttataactaaattttagaataaatttaggtgttcttttaatctctttcatcaatgaccgtgatgttcggactgataagagtaaaagtgtaaaagtcttaaacggacccctttagatagcagaaatggcaaaacacatgaatagaaaaaacacaatacttttaaaactgtataacgtgcagtagtatcgatcgagacgaaatacacatatacaaattttcaatgatgatctaatgctgtatgtttcttgattgtgtataatataataataagacaaacagaaaaatatgctagtgcttttgtctaaaactgcctgtttggaacaacatatttgggcaattggctaagatatgatataaaatttacccgtatgccgtgatggatcgaggcggcacacttgtcatctttcggtaatacagtaagagttgggccagaatagtattgtggctgacgtgtgggcccagcttagctgaaatggtattggggcttaacaatttttgccagcaaccttaatttgtctattattaatacactacgtttcagtactctgcaaggttacatatcccagatacagaaatctgcatgttccaactacttttacccagtcgtgtaggcttcgatttactccacaatctgcgtacagaatactgctgtttccagaaccaattgaagccatgacaccaatgcaacagtaactcatctgcagtatcatgggttattcttccatgagtcacagcatgtaaagtgagctagatgaatcatgatatcgcagcaagcaaaatacagaaagacaaggccaaatagcaggtacttgctccagacatccactcaaatcaccattacggatgaaacagattgaaatgacagttttttccgtccaatttatgttcctacccttaaaagtttattaggaaattaactatgaattaacccagtcacttctatattcatctgcccgatgcaatatattcctctgaacctttgttactgaagagataaaaaagatatcctcaaattaggcctgaaaagtgagctactggtagaatggtagagtgcaagatcaaaactcaagtttcattatctcatcatatatcccaaactactcctgaaaaaaaaaacactgcaagggtagatgatatcaacagtaataatgtgcaaaagctccatctaatgacaatcacgattatgcctccatcagtaactgagagccttcctctctaatcacaccccagaaagcctaactgagggtcttcgtctctaatccgactaaatgaaaaaaaacactgtaagaatcacaccccagaaagcctaactgacagtcttcgtctctaatccgactaaatgaaaaaaaaaaacactgtcagctgtaagggtagatgatatcaacagtaatgtgcaaatgctccatctaatgacaatcacaattatgcctccatcagtgactgagtcttcatctgagaaagcctaactgagggtcttcgtctctaatcacggcgcagaaagcatccctgtgacatgcaacatgaataacgtcatcagaaattcagaaacagatttcgttaataaaaaaagaattcagaaaagatcagttgcaagttgcaatcagtaaagcaattggcgcggatcggttgcaatcagtaaagcaatcggcgcacctcgatccacgtaacggagtgaccaacgatcagcccgagacccatcatgacgtagcaagccgcgtccaggaacctgccgctgtcgccgccgcgcacggcggcgaggtagatgacgtagagccccagcagcgccacggccatgatggcggctcgccccatgttctcctcgctcctggtgtaccgggacgggatgcgcgcggcggcctcgtcgtcgtcggcggcgcacgccgtcatcgccaaccccaggatcggccccatgagcagcgcgccggccagggcgatggcgcacagggccacatcgcccttgctctcgcaccaggggaagatctcggcggcgaacacggccaccatcgcgacggcggcgatgatgcagaaccattgcgggagaagccacatcagactacgatcgaatccggcgagaaaaaaaaaactgaggaaatcaacacggcttaccctaatcgcgaggagccatgggggcgtcgggttgcacgcggctgcgaccggaggcggccggccttcctcgagcaagcagaaccggagatcggccgccgccgccggagtattccccatgccgccgcggccaggggagggatcgagagcgcgtcggcggcggcgagtgtgcggcgagatcggaggaatttttttcgtttttagattttttttaatatttacagaaataatctatcgaccaaaaaaattacagaaatagcccctgccgccccaatggtgggcggcaagctgacgtggcagacggtgggtcaaccgcgccgtctgccaccgtcggccaaaattgcgattaggcccttgccgcccatacagagggcggcaaagggctaattgcaattttggccgccaataaagagcttgcggccgtacttttttcatctgggtcccttgccgccccagatgtaaaacgtacagccaaaagatttttctatgttatgttaataataaataaagaagtatttattggtaaaacttgttaatattgttataaaaatgtattgaagttggttgttgcgcaatttcatatgttaagtgagatattattttgtaccatattcgacgtattagtactcggataatttatataggcctatcgcagtctgggtcgtagaaacattatatggacttaaataaggagaattatgtaacatgaagaaatagtagtacaatttgaacatgatacaactatttgcattgcggttacatagatgatattagattcgaactaggagggaggtagtgtaatagttgaacacaacgacgatgtagtaatgggacaaggaagcatgacagtagaaatttcaatatgccaagttgtccgataatagctaacccctacgttaggatccctctcctctctcaaaccgcgctttagtaatcctgtattgctctggtagttcaagctgcacaacacggctaggtggagttagaacccttctggtgtctatccattctctatattgacatctccttggtggttcctgggaggaaagaatagatgtaaagcaagcaaagttagtaaatattgtgagaaaataaggattcatgtaatcaaaatattcttaccatgaaatcatcgtcaagaatatttggacaaacaaagaaccttcgacccaatgttgtaggatttatggaacgaagaacctgacaacgatcaccacacctgcatcttggacgggcttcccatggagggagtgcgtagttagcacccgccagtcgctctgttgttcacgacattgtcgttcataagccgtttttctctgtaagtattgctcagtactttcggatgcgaaataccagcgaccttcttgtaaacaagtggttaggtcgagaacgggattttctgtatcgacccactcgatgtatgcgcaagccgtagtgcgggtctgccgaatagagtagtgttacgaagaataaagcaattgcccgtacggaataaataagcatatgcagataataaaatacctcacggtcatagttagggcacctaaaaaagcgccttcctcgaatatcaggattcctcgaagccattagttggcatcgatcaccgcataggcagagaggacactggcaccaaggtggtagtaggtatacacaaggatcgctacgccagtttggatcctcaacaccccggcgtctagccattgacaaaagccggtcggatttgtaatgaagcaagtgggaaagagagtactgaatgtgactgagttctgaaagattgtgaggcctcactcgttaaggcgacttatataggcgcaaaaaatcgagtgatacccctgacatgtgaacgtggtggggtatggtgggtacggctgattggcgccgaaagttacatgcctgatcggcgccgaaagttacattggtcgtatgcgccaaatggcgggcaaatactcgtatcgcacgcgaataaaggaggctgcatcggtgcggcagaaagtagtcgtgcatgcgctgaaaggtatcgtgcatgcgccgaaaggtatcgtgcacatataacaaaaacgtagtcattacacaagcatacagtactagaaagtgaagcaaataaacaaagagaagactgctctactggccctgccccacgccgcgaccacgcttggtcctccgggcctgtgcttgcacgtggtcctgggagtaggtgaaacgatccggtggcacagcacgggtagcacgagtgtcccgcggaggagtggcctgcgcctggtcctgtgtctgcaccggcggtgcgcctcccagctgtgaggggccgatgacgtcctctgtcaagcctgaagcgaagtcgaagtcagaaatgtcgaagagcacggtggaaggcagcaagcggtccgacgaggtcccagcatggtccagtggtggaccctgactcgacgtgctagctgcctgtgacgaagtcccggtgtactgccagaactgcactgagtgcgaggtcgacgcagctgcctgagacgctgaccctgcaaactgggagaagtgggcggcctgcgtcatagcgaactgggcgaaacctacacatcgacaacgggacccttgtaagctaagacataaaatgcatgtaaattgattgtcgaagtaatgttgtttttttaagtacctgtggggggcacaacagaaggcctagccaaggaaggcggggtgctgaacagtgcacgaaaccctgaagcaatcggcaagtgaaacagctcacttatatgtgcgaggcatgtacagaaatagtaataaaaatacttacctccgtgcggagggggagtcggcctaggaacgtgcgcagctggacggggaccagtcggtacgggtggccgctgtacagctgcatctgcccgagcaacgtcgtctgcacgacaggtgagcactcggagaatcgagtgcatcgactccaccatccgcgtgtatgtcgtcaggtgctcctctacgggtaccagaatccccgcgcctaaacgttggatcgtcgttgaaccgtcaacgacgacccggttgatgtcgtcgacctgcatggttaatttgttcgtaaatattcgtaaaatttgacgaagagaaagacatgaaaacataaaggaatggtgcgatgcagggtactcacagcacgagcgaagtcctggtcgcggtgcctggcgtagaggtctctagtgctcgcaacatggggctgctgctccaagggagtgaaggtgaccctagtacgggtgtgtggccctccaggccttggcatagctaatagtatacttgtatgtctcttcgatgtgtcggattattgaccttggttcatatgtgagattatcgatgacatgcgcatacatctaagatgcaacaaatgcacatgtaatgttcttgtggtatttctgaacaccaggtagaaaacatgtatgcttggtaacaactgacactgtccaataatccttccatttccccttatatgcgtgcactctccagggacaaccatatttttccttaacacaccgaacttcatattgcgaccggttcgacttggcaacccaaaactctctatgaagtgacactgcaaaatgttttaccgcctccttcatatcttctgctctactataaatcgctccctgaataacctcattttctttgtactcccatctcacactatcctcttcagagacgatcagcccagaaaaatcctcactagcccattctgctggattaatatccgtctcatcatctaacgaatcaccttcctctacatgctcgttgtcagaatcctccctctccatttcatccacaatggcaccgacagtctccccctcgtcggccactccacctggttgaatgcccactggagctactacgcccccgtcctctcgtgcgttgacctcctccacagaagtctcatttacttcagcacttggtccctcgccatcatccatgttcatctgcacacctggatccttcgggtgaacaaacggaaccaaagctagaggccacccgcgttgcaatgcattttccaaataccatctccacactcgagagttttgaactggcattagttcccaataaaaaccctcatttgcccgacttactataacattgattgttatgtcacttgtctgtggatcaactctcaagcccctcattaaccatccttttatagaaggtacactcctctcagccggtctatcaattcccctttctgatacaataaaatctgacagatctaccccagttggcccgtaacggacgtttcctggtctatggtaaacttggaatatttgtttgttcgacatatctgtcaacgaaataactagatcatattactctttcatgcaataaacatctacaacgtaatatcttcttgtgtaagccaatgcaacggtaatgtattgattccaaactagcagatctacgtagttaccgatatctacaatacgcacttctagattagtacaactaaaaccctaaaaatataatgcatttattcaaacaaatttttaaaaaatacacactatttaactcaatagtcacatataggatctatgaatattacatgaaatcggtatctgaatccggcagggcttcgccccttcttttcttctcctcccctctcttctttttttttttcactggaactgaggagggaggaatgagggctgggggctgggcggtaggccttttataggcagcgaggcctgccgccccaccagagggcggcaaggggccacctgcaaaatagccggccccgactggcttttttgcattcggaccccttgccgccccaccagagggcggcaagggttttcctgcaaaaaaccctccctccgtcaccgcccgttcctcccccgtttgccacgtcagcttgccgccccagaggtgggcggcagggtctatttttgtaatttttttggccgatagattatttctgtaaatatttaaaaaaaaatctaaaaccgaaaaaaattcgagatcggagggggcgtggctgtttcggattcgttggtgagaaaggcccaatttgtaacattagttgggccagaaaagtattacgtgcaggaaaaaagtacactttaactctcttaaaaaagtacgtcgaatctaattcgtacctctcaaccagaaaaccagataagacaacttcccaactattgaaactagtgtaatttaactcccttagtggttttgaagtgtggttttgctaacatggcggtgttgagctggtcttcatcccacgtggcgcttaggtagcattacaacccgttttagttgggcgaatttgatatatatttgtcgacaaattttccatcaaaaatttgacagatgtaattacaatacaatcgtggtataattacactgtaacttgtatgtaattacactataactataatgtaacatgtatgtaactttcaaaaatctctccataacatttatttcggtaaaatggaggttgtgagaacaaatcctttcacatatgtgtgtgatgtgatttttcttcttcgtcaccagaataaattttttaatagatctaacgattcaaaattacgtgaaacttatatacaagttacactgtaattacatacaagttacagtgtaattacatacaagttacagtttaattacactatgattgtactataattgtatctgtcaaatttttttagaagaaaatttgtcgacaaatatataggtggtccccttttatttgggctagatctaacggaacaaatgagctcaaactaatgtgccaaatttttttatttgccgtgcgttgcatttttttgtgatacatccggtattaggtagggtgaaaacggtatggaaatagacggaaaccacctttatcgtttttgtttttatattttttttagaatcagaattagagtcggaaaccccggatacgaaaacggaatcgaatattattgaaactgaaaacggagcaaaaataaatcggcgcgaatacggtaacgaaaatttatcggaatacaaaaatccctcaaactgataaatccaattctcaagtctcaatggtcaacaattcatcataaaacacaatcatataagtccaattgttaagtctcaacagtacatcataaaacacaatctatggaataaattatctatgtttaagagagtaatgctgttgataaatcccaatataggaaaaaaatattattatgtaccctcacatttgcataacaaataatttttaaaaaataacagccaaacaccatggtattcactattcagtgtttaaaaaaaagaatccagggtatttcagtcacaaaatttctggaaatttcgagaaaatttccggaaattttccaaccgattccgagttccgacgaaaactacccttatcattttcgattccgtttccttgaaaatatttccgaatttgtttctgtttttgaaaaattccgaaaagaattccaaccaatatattccgttttcgaaaataggtccggaatccggaaagtttccataccgttttcacccctattaggaactgagcaacgaattgaaacatttggatcgctatataatataattgaaaaagttaatgaaaattgttccttggttttgggtctttttgtgctggagctgatccgaatttggtttattccagtaaattaaaggtgaaatgaaagggagaaatcaagagaaaaatcacgagagaggagggggaattgatttttgcaatcaattggaggagaaacacacggaaagatagatcaaagtggtggtggtcctagggtttggtccgtctgcagagtacaataggtcggatgagataaaaattcgaccaccgaaaaaatagaaaccggatgaaaaaaaacacgaaaaaaaggaatctggcaaaaaaaaaacagcgaaaaaaaagatacgaccaaaaggtataccataagctttacttatttttttaattattattattaggtatagatatagatagatagatatataacatttgttttgttattaaatctatctatacctctgtagttcaacaaatgattccactcattctttcattcatcactcaacggtctagattgtctcgctaagatccaacgtcccagattttcctccacctccccacgaagatcgcaccaaataattcctcccacctgcgcgcgcatacgtaccccctcccacctgcgtggatgccgccgatctctccaaaaatcacgcgctcgtggcaatgccagccggaatcgctggggcggtctccttctccctgaccttcgcgacgatggcggaggcaaggaaaggccgcccatggatctgctgccgaagaatcgtggtgccccttctgcaacaaagtcagaggtgatgtgctcctgcttccgtgcactcctccaatctagtagcgttttcgatgtgcattagacctgctaaaaaggtacttttcgtgttgatctggttacgataaatagttcactagctgtaatttgcctttctatcttaatgattactatcgagaatatagattataatttgtattttggttgggaggcagctgtagaagcagtttctgacgttgggaggtttcaagcaaccatagaagttaaaggacaagcaattgtcatgagtttggcggaccaacattcttcagttggatctggttgatcctacagtttaacaaatggtttcacttattcttttattcatcactcaacggtaagattgtctcgctaagatccgatgtcctagatttgccccacctccccacgaagatcgccccaactgattcctcccacctgcgcgcgcatgccccctcccacctgcatggatgctgccgatctctccaaaaatcacgcactcgtggcaatttcagaaaccaaaaaaaaataaatcatgcactcgctattctgccccaaaaataccgcatctcctagccctaaatgccaccgtccaccggatcccctccacctcgccctcaagtcgccacggatccgtcgccggcggacagtttccgtcgacaggtcaccggcaatcgctcaccatcatccgtgatcccccctccctcagtgccgcctcaccgtccaaggcaaccgggcctcgccactgccccatccgccgaccaccgtcgcctcatcgtcaagtcatcgctcccttgatttctcggtgccagctcgcatcaactccacacaggccaagtttcagggcgctagctactcttttttttttcaggggatagtattagttttatatttctgttggatatgaggtatttttttattatgtttgctggagtgcttacttttatatcttttatggtttaaattacaatttcaatgaagcttgattatttgttcttctgtgcatgcaaatggattgccttgtgtatagagtatgcaaaatgttagtttgaagcaatatatattgtgggagatatacatttgttatataattagcaatatattaaaccattctttttattatctgaatcatatatttctgtattgttaaatatatccgtagcgttagcacgggcaaattactagtgtagtctaataacaaaacaaattatagattccgccaagaaactgcaagacgaatttattaagcctaattaatccgtcattagcaaatgtttattgtagcgccacattgttaaatcatggtgtagttaggcttaaaaaattcgtctcgcaatttcttggtaattggtttttttttctacatttaatactctatgcatgtatcaaacatttgatgtgacagcgtataaaattttgtctgggaactaagcagcccttagtatatcctaagtcgcacatgtccgtagcactggattcggtatgctaagaaagcaattcgattgagtgtgcttagatgaggctagcccaaatgtccctgtcacaagcaattgctcttcatgttagcttacctctaaagtctgaaccaccttccatttgcatgccaaaagaaagagggcactgtcgttggttcgtatgcccgatttgattgtgtagctcttaatgctcatagtcataattaagttgtaagcagattgtttgaacgagtctcatcttctgcttgaattgttagcttatatatgtgtcataaccaaaattttatttctagaacttaatgttgacttttttttcattgcggtatatttttcaacattaacttactgctaataacatagacataaaagttttacatgtaaactattttcattactttatttttttttatagttcatgagttagagtcgaagtcaccaccaaagacattatttctctccctgtgtggcaactacttgactcctcatttggcaactacttgatagggctagatgaggcacacctctgtgaagtcagctataaaaaaaatttaagttctcaaagaatatggttatgtatggctaaaatagtggcactctaattgtagtattgaatcaaattgttactcataagcagggacagatccagcgtggccttagagggaggggagggaggggggctcgagccccgttggatctctatggagagagaaggagatagtggagggggaaacaggaagaggaagaaattatatcttaaatctcaggcaaacttgtcacatcacctataaattattacattctatagctcaatgtaagtatgtcaaagtatcattctaaaatattttaacatataatcatccattatttttataatatttaatatacttttatccataaatttcacatcaaagtgtgggccatcatctagtttatcatttatttattatattctcgagctcaatatgcaagcatgttaaattactattccacatcattttgaaatatttcaacatatgagcatccatcattctaaagtatttaaaacacatttatccatgttttcgcagcaaattatggggtataatatattttatattgtgctccctccatccaagaatttaacatactgtttcgagagcaagttgaaagttagagtggaatggagtaatggagtaacgtatctcactctttgggtattctttccatgcctattccgcagacaaacgctcactttccaatcatccaatatgctgatgatactctgataatcatgaaaactgatcaaaaagaactgttttgtctcaaagccttgttgaacacatacactctctgcactggtttaaaaataaatttccacaaatcttgtatgatccctaccaacacttatagccaaaagttgaaaatcctggctggaacctttggatgcaccataggggccctacctttcacatacctgggccgcccaatggttactaccaaacaaaaaaaatcattgactttgccccactcattgacaaaattgaaaggagactcccatcaaccacagctttttttgaaccatggtcaaagattaacaatggttaactcagtcttatcatcgtttccaacatactacatgtgcatcctacatcttccaaagaaagtgatctagcacattgacagagcaagaagacattatctatggagaaaaagcaatactctagaaactaaaactcattgcttggctacataggatctggtttgcaaacctaagaaaaaagggggacttggaattatcaatttggaacttgagaacacggctctgctaatcaaacatctagacaagttttacaacaaaaaagacatgtcgtgggtacacttgatatggaataaatactactctcactctaccatacccccacataaagaaaaaggctccttttggtagaaagacattttcaggctaacccccctgttcagggcaatcacatttgtacatattggctcaggagaaaccactcttttctggaaagacaaatggaacaattcttgtctacaaaataagttctccattttattctcatatgcaaaaaatgaagacatatcagtacaagacttcttatcaatccatgagttcaaacataattttcacataccattatcaaatcaagcaatgcagcagtggcacatcctagagaataatcttctaaacattgacctcaccaatgaacctgataaatggaaatacctatggaactctgatcaataccaataaaaaaaggtctataacatgttctttggacacatcacaacaaacaaaccattgatactgatatggcatagcaaatgtactatgaaattaaaagtgttcctttggctgatgttactggacagtctcaacacaagagaaatgattcaaaagaaaattttcaacattaagagtggtgacaagtgtgttatgtgtcatactacgctcaatgaagacatgtttcatttattcttctcctgcccttttgcacaacaatgctggcaacacattggaattcaatggaatctgacaggagaatttataaatataatcactgtcatggttacggatatggcataccttctatcctacggcttatggaatatacggatatggcataccttcgtatgtatgatacatcttcatatatgataaggaaatcaataagagattatggaaataatcctcacgggtaagtgaaaagcagagtcctactcgaagaggattaggattgtactatatcgtgctgggttcggtatctccgagttctacttagagataaagttaactcatggtataaatacacaccccctgggaggggtcctatggcatcgaatcatagcgccaataccaccaccatagcctacaattcggaggacgtgaagcctactcgccgggagatctcgtcgaaaccatctcgacaagggtctcgctggtaatctcgagatcgactgttctctattgtaatccttggttttccatatcaatctcatataaagtggattagagctattaccttacgaggagccttagccagtataatgtttgtcttcttgtttgcttgatgtcgtattgtgtagatcctcgtaccaacgtacccaataccctatgtatccggtctacgtgtatcccccgtcgataatcacaactgcctataacaatttccatcacaaattcttcattaaattgcttgcaattggatcttggcacatttcgagcagaagaaatgattacgtcttcaacaatatttcggtcagttttgataaatggaaggacagctttaagactgaatttggcttgcatatgcacatggcaaaagaagtagacaaacccctatggtaatcatggatagatagcattctgtaatttcgtttctttttctttttctttctttctgtttcttttctttcgtcctgtacgtaaacccctattattattattattattattattattattattattattattattattattattattattattattattattattattattattattatagcacaataggcgactctccagctgtttcatgtaaaaaaaagtaatggagtaagggagaatgtgagggtagtttgatccaattatacttataataccatactaatacatatggcatgtcttttattcctctcctaaaagaatccaagccggctatcatcgtggaggcatacaactacaggaattcaagtctgctacagtgttgctatttatattccatggtaacttttacctaagaaattacttaaaaataaagtgaattgcatatcgggctgtttttattttgaaagttttactttggatcacctttaaccaatcctctcactttggactatctaattttacatttgttatattttgaacaaaccaaaataccttccctagacatgtcaggtctctactctagcaaagggtatagtctatgcatgtataagaggttggccatttattaataatggtgtagtatataaatatatgtaactattatatgagtggactactaaatgacgtgtcaaatgtgtttttacctaggagagtgggtggtaatgcaccattcgttctaaaatactactgtattcgacatcacctagtttcatccagatgagatggtggtatctagtacagtactatggatctcatctttttgcttatgcttatgtttatcagtcaaaatttgaattttcaaccttaaatttgaagctgattttgagttttttttttcatcgaagtttatttttcagcctttgcttttaggttgctaagaacacgaatataaaagttttattcacaaattatttttcatctgtaaatatgttgtttttcttattcgcgtatgttgatataatttagtgctaccagtatgcttatagagcttattttttgagtaaagtgcaatgccggtccctaaacttagttcgctcatgtcatccaggtccccaaactctaaaaaatacatttttagatacttgaacttgttaaagtgtattattaaggttctaaattttcatgatccctctgagatcttacatggtgctcacgtgacatgctacatgggtgttgactcattttatttatctttttctccattttttctgttcttcctttcttttgatgtgggaaaaagagggaaaaaaaagaataaaatgtagtggaggaaaaaaaaagaaagtttggatctgaaatgttcatgtgacatgttattttagtatccacgtggcacgatatgtaagcatcacgtaggatcgtagaggggtcgtggtaatttggagtcggaataatacactttaccatgttatatattttaacatgttaaatgacatagatgaataaatttagttacatgtgtcgcattttactcattagtattatttttagtgaatatttagagcggcgcaacagggatccgcttctctcatcatttgcaggcactagtgattagcgccacacgcacgaactccatccacacgttctcttcccccaacaaataataaacaatccatggacagaatgcatcatccccccaacattacatcgcctccacaaaaaaaaaaaaatatccaaccaccttttccacttccaccaccgctctcttctccaccgcgatccaaaacccaaaccaatttcatttttatgcaccccaaaataaaataaaaataaaaataaaaaagcttcgtcgcgccgggaaagttggagaacgaacgccatgagcgccgacgaggacgcggcgtcgcggggcggcggcggaggcgggaagaggaaggcggtggcggaggggggctcgccgtcgccgctgtcggtgctggcggacgacgtgctgctgcagatcctggggaggctggagggggacccgcgggactgggcgagggcgtcgtgcgcgtcgccgcggctcgccgcgctgctcagggcggcgtgcctcccgccgcgcctgacgcgggcgctccccgccgagctcctcccgccgccgtcccccgacggcgcgcccagggcgtgggccgcgctccacaagctctccgtctgctgcccgggcctcctccgcgccggcgtcctcctcgagccctccgatgacttcggcctcgagctcgacatcggccccgacctctccgtccccgccccctccccttcctcctcctccctcgaccacgcctccaccgctacctccgcccccgccccaccccccgactcctcctcctcctccgccgccgccgccactacgtggtcgctctacgacgacctctacctcgacaccgcctacgactgctccccctccgaggcggcgcagatctcaaacacggctgcgacccccgcccccgccgcggcgcggcgaggggtggcgtcggggagcaggaggcgggcgcggcggtggctggggacggtgggggcgcacctggcgtccgggtcgtggacgctgagcagggagcaagggaacaagctgctggcgagcaggttccgcggcgaccgcctctacatctgcgactggcccgggtgcgtccacgccgaggagcgccgcaagtacatggtgttccgcggcgtgttccacgacttcccgaggtcccaggtgcgccgcgccctgcgggacacccgccgccccaccgtcgccgtcgactgcgccttctgcggctgcaccgaggcctgggacctctacgccgccttctgcctccgcagcttctacggctaccacgacgacggcgagcccgtcgtccgcgcctacgtctgcgagaacggccacgtcgccggcgcctggaccgagcgccccctctactcctgactgcgacacccacacccatggttcggtatgcccactctactgcttttgctctctcatggatgtgcagccatggccgccattgccaagaatgccaagcaaacctttacttgtgcttgtgataattactccatgtgtatatactactagcaatgtgggtatcagatcatcacctctggagattatgcagggctgatgtgatgtgatatgcatctctttgtcttgttagagatgaatcagatgatgcttaagctagcttaataacgcgattaccgcgcttccgtcgagcgaattctcagcgcgattcggcgcgatcgattaagagtgtaacttctgatgatttgcacaagaacacagttatgatgcaggttgatgttgtatttgatattaggcagtgactcggttacgctctctacttgctgatgagctggggattcagaacttgcatcaactgttcttgcttgctgctgatttgcagtagacctgattgttgtacatgcactgcaacctccttcagctttattatcttcatgaagtagaatttgcaaggttcttgctctctagccttagttctgatacaacctgaaaatgctttgcttgccctttcctgattggatttaaacttatcatcgatctagttcatatacctaatctttggctactcagaggcaactaacctcactcatactgtcatacacactgtcaatcatgcatgcctctcctttctgaatattgtagtagtagcttgcagcctgcagaaagggcttaattttttatgatattatcaatggcaacttggcaatgacagccacttgttgctctttttttccccctaaactaatgggtaatggcagtggaactgtggaagtactaacagctgagtcctctccgaaccgcaggagatagttgcccgcctttgaaccaaactctagggaacgctcaattgcctgacggtttacctgatatagaaagagggagtgtgtaacatacaatttttttggatagccagtgtgtactttgtagcatggtataagattagtttatgagatagtgtatggctgttgattctcctgccttttcgggactgattcactgccggctacttgcctgcctgctgcatggagcgttggagctgatgatgctgcaaaatggcgacgcagaggcatttgttttatccattgcgttggcgtggcagccgctcggtcaccatctgacggacagaaacttatcatgttggttcttgtatattattgtatggtatgacaaattactagtagtacctttctgtcattctgtgtgccgtatccaggggcggaccggggctagagtcccatggaagttttgggaggaagtagaacgtacgagtatgaagcaatgacgtttcggtttgcttaactccggggggaattataattcgttttcgcagatgatttaggtgaaagaaatcacggtcaatgaatctctaaagaaaatttacatggaactgttgtaggttttggccctgtttggatcggagggctaataattagccctccaaattcttattatttaagagtattaaacgtagattactaaccaaacccattctataatccttaggctaatttgcaagccgaatctagtaagcctaattaatccatgttttgctacagtaatcatccgctaatcatggattaacataccttcttagatttgtcatgcgaattaacccaggggttatgaaatgagttttgtcagtaatctgcgttaagtactcctaaataataagattttggagggctaattattagccctctggatccaatcagggtctgtttctaatcgggagaaattttctgctatcaagagagggtgggacagggctgtctgggtaacggtgcttctacgagtttggtgacaaatggtctggattttttatgttttggccccttttaagaacttattttataaatagatcattagaaaacttattccagaaatggattattttataggtaccaatgaacctagcgccgaagtataatgatgttgggcattggcgccgtccccctcacacccgagaggccaagacatagaggggtcagtgcccaacattatggcgttgatgacttgtttgtaaaatattttttgaaaagagtcaaaatgtacatatttttttatcacaaataggcctgatatcaatatctttggtgttgaggacctatttataagaaaaatatttagattttaactctttttgaattttctttataaataggtcctcggcgccaaagagtttagcgccggcccctttcatatcagcgacttagctatcacaggggctaggatgtgtgccgagacattgaatctcggagccaataaccctgaacccgagaaaaagggtctactcctgaaataagtttttttcaagggtatatgttcaaataagttttcaaaatgtaaaaattccaagacgaatggtgggtgaaaattttagctttcctaagacacggaagacggggaacctccttcacacactggtccctcttcccctccatttttggtggctctctggcaacacgctagggggagggggtaagggtgggcattcggttagaccaaaaattttgatctcggtcttcggttttcggtctttcggtcagttcaattattgaaaaatgaagaccgaatttcaacacaaaaatgctaggaccggcaaattcggtctcggttctgaccgaaattcaacaaccgtttcatatatacaaataaatcatataatttttcaacacaaaaatcacaaaaaaattctaagcacgtctcagtaaagactcttattgggatgcatgcctataaggagtagggatgtgaaaattagagtttaatcatattggagatttttaattcggtcttttcatttttgggttaacggagagactaaccgaatggatcaaacaaaattcagtctttcactgtttaggactggatttctcggtctcagtcttttcgccttttcggttcaatccttttctgattctactccctcaccaataggctaggcttccttcaatccaaatatttgcttgggctattcgttgaaaaaaacggtgggttattgtgtatgattaattaagtattaattattgtaaaactttaaaaatagatttttgaaaaaacttctaggtaaaatggtttacagttagggaagtgcgctcacgtcacacaaggcttacttttcccataccgtgcaaacgaacagagccacatggtgttgcctcaaagtaagccatgtggcgttgcctcagagaacttcggtactagtttcggtgtccatctccttctcgtggtagtgatggagtgtccatcttccttagagcacccgcaatggtaaagtaaggtgctctctataaaacatgtacatctcagcaatagactagattaatagtaaaccacagcaatagtatgtttacgtgggtatctatagctctctcatgcattgcctcgtttttctttataaactatctccaggttagtagatagctttgttatctctcttcatttaatcttttccaagtaggaaaatatgctgacatggatctcttgtagagagcctatagataaccattgtgggtgcccttaatccttcttacgatggtgattgattcaatccactctagtagtggaagatgtttttccctatggtcaaaacctattttccgtgcgggtaggccatccttatgtctgaaagtatctgagaaaatcgttatttttatgtgcgggtggcgcacccgtatgcgaaaattctgattttcgcgtgcagatgattatgtcgtccgcactgcacgcaaaaaagatattcgaaaaaaaataaaaatccttaagaaaaacctagctaggtgtgtcgtcgcctcctttgccgggcaccttctagtgccaccgtcggaccagcgcaggggatggctctgccgctgctatcgtcgcccctcacctcctccatcaagctctggacccgcccttcccgagcccgaagggagccactcccgctcgctgccggtgcgctcgagcccgccaacactactcctacccgccaccactactctcgagcctaccaccgtggcttaggagaggaggataagaatgaaggagaggatgtgggaggagtggagaggctggagtggataagaatggagaggataaggagagagaatgagggagtgggtagaatttttaaggtagagggaggtaggctggacttttcgcaggtggacctcttaataggcccgaatgagaaaataggtgtccacttgcagaaatgtatttccgtatacgggtcttttaaggagctggatgcgaaaacacaagttgatttttgcagatgcgatcagttatagcccgtctgtaacctataggtatccttatatagaaaaatcgtttatatagaagtgggtgttccatacgtgtaatttgctttgcaataattttgaccctagtttctaacatctcctcgttgggaaaatcggtatgtctcggattagcccatagcattttacaagggtttgtttgtaatattgtatgttcctaaggacccttttgtaattctatagtataaaaaaataaatagcaatgcacataattctctagtatagatattttgggtggaacattcccatggtggattttttaaaaaaaataatataattttcattttgttctttattaaaattaatatattctaagtggccataattagttttcttaatattttttatggttcttgtttagagttcaatatttttcgtgaaacatctacaagggcgtaacaaccttttagttgcaaacttgatggtcattggtcaacaacattacacagtgataaaaaaaaatagaaatacatactaaggaggatggtcaaagagaactgcaaattttcagtggcaaaagtgataatacatttataatgagtggcaaaaggaaacaaatccctttctgtttttagaagaggagccatcaaatttctagccattggatgtcaaatccaccgtctctaatccttgcaaaatgatatatatatatatatatatatatatatatatatatatatataatatccgtctctctccttcccaaaccctatcaacctccacctcccacctcatagccgccatcgctgaccgtggcccttcaccttgctgcttactaacattggtctaatggcaggaagctcccatcggcctccctttgccacttcccaccacccttatgttccccttccaaccacatgttttctattggtggagctctttattttctttggggaaattggtttagttgtgctattcttccccgtctttagtggttatctccattgatttgtcgtcacctctaaccaattggcatctctcgcctagtctccaaccaaactcattgccaattcatcacacatggctttcgttagcagaaactcctctccgacttctctctaaatcatcattatcactccaatctctctttagatctagaacctaccaccctcaactccaatgctgaacctaagtccaaatgtcaataaaagaagatgaaggcagcacagagcagatggtgataactcgagtagggatctccacacgaatcaaaggtcagaaaattgcatcttttttgggttattttcatctaggatatcctatagaatccatatgcattctataaggatatcctagatgagcacacttaatattccatatctaaattcatctgcgatggacaaataagaaatacacattgcttttataagaaatcaagggaagaaacagaattaataactcatcaacagaatttgttagttctagttggattactaatatgcattttatttatttattttgcaaaaaaaatgcggtacacatgatttcatcttgacatatataaaccctatttgctagtgtaagtttgatgtgaccatttgcttcatcattcctgcatataaaagtgcattcatccagcatacatttgaaaacagaataacacagatagtagattgatatgtagaatcataccattatatatgttgctgcttgtattatctaatgaggccaaggtaataggaaagagattaagagatacgttaagttggggaacttgaactcattattggattgtatcggtactatctatgtctattgttcccgtaactgccatagttggagtaggagcaaactaaaacaaaattgggcaaaaacttagcaagagaaaattgttaagtcaaaaataggaaatttataaaagtgacaacaagcaagttgccatgtttaatactgtttattttaattggctatgtgtaatcatgttgaattcaattttatctaacccaagccacctaccctaggacttacatactctctaattttagtgtgtgggtcatgtgggatggtccctctaattttacaacttcagtttgaacgaggacatgtgtaacagaaatgacaaaaatcatcaaatgcttctccccctccatctatttagctatttctcattctcattctctctctctcgtttctctccatctatttctctctccctatctttgggactctttcacaacttagtttgaacggaaatgtgtgtaatggaaatggcatcttaccaaataccccttcatctatttcacactctctaccttccctgttctctccatctatttctcattctctctctctctctctcttattgtattgaattgcattgtgttgtgttgtattgcattacttcattgcattgtattgtattgatactatgtctaataatctcatcggcagagcaggagcaaaacaaactaaaatagtgcacaaactcagtgaagataaaaattattgatggatcttttgtgaagatgttaatgcactactagaaaatagtaactttgttctatcgaaggttgttaagtcaaaaatacaaaatatgtaggaaattataaaaaagacaatgtgttatatgttggcattataatggctttaattggctacgtataatcatgttgaattcaatttccagctacctattattggactttctggtatgttcttggtagcttatatactatggactaggcacacttccgaagatcctaaattttactatttccaagaaaaaaatatccatcaatctttcttagaaaaacctttttaaaacaacttatcaacttcgtaatgtttaactcattttttgtgcccttgaataattgttataaactaaatttcatctatgttagaatggtgtgtctaattttaatcttgaaatttatattctttcctctgactaggtttctgtgctaaatataagttgttttggaacttccatacactttttcatctttatcattttgtgtatgtgccaataagtgataccattctcataaaagaatgaccgtgttttccaacataatataaacaaaaggaaaaatcgttacaagtccacactattttatatttaaaattatatggtttaatatgcttgtatctagaggagcctataaaatgatttctttcatctctatctaaaaacaaatattagtatcttacaatggtacacttcaaccatcccatattataagggactaaaccaattttcttaaaagaaatggaggaagtagtcgaagaaaaataatgtacaaaaggtgatagatgaaacaataaagtagtaaaaaattgataggtgggaaaataaactaataaaaaatagatgatggggaataaactaataataaaatggatatgtagataataaagtactgtctcatgataaaaaaaaatatattatggaacaaggagaattccttttctcttttaacacaaacaaacatggtaaagcttggtttttatagaaaaatcattaacatgtggtggcgattacaattacagtagcccactgtaacatgttcacattggataaaatcaagatccacaccctatttttagtgttcttctacaatataggaaaagcttcaactgtgacacataataaaggagttccaaagctttatctctaatgatctgatctctccccctcatataccctttcacaactttattttgaaacatgtaaacgtataaacggcaaaaaaaaaaaatctctccccgtctatttgactgtgaaaagtagtatttctcatttttctctatctccaaactctctctgttgttcccatctgccggaggccggagtgagggagcagccggcgaggagggaggccggcgttggccatcggcgtggacgacctcgcccaagacgacgccgacgccgccgccgacgacgacgactttcccgtgtgcggattggccaaggcggtggggttggagggaggggaggggaggggggtgacgcgcgcggccggtgcggtgcggtgcggcgcggtgctccccccgccatctccggtcggatcggatcgaaggtacgcctcattctcttcctccgttccgcttggatgatccgccgcgtggcgtagattggggggcaagggattaatcggtcggtctgtttatttttccctcggattaatcggtccaactttttcttgttactgatttatttgatgcgttgtttgtgtggtactaatggaggattgtgtttgtgaatgaaattttgtgatctagctttgtgttgattagacttggaggaggaggaggaggagaggggggaggttttgggtttttctccttccctggcaatggcagcggctgcggggatgggtggcaacggcaatggcgcggatgacaaggcacgtgatgtcacggatcagtccaaggctcttggtgggaacagctgcgaggaccgcgcgctcccctctgctgtgcgtgtcactgtcagtggtgatccggtggggacgtttggctctt

SEQ ID NO: 5688 - DNA, 82055 bp, Oryza sativa
  unsure (1)..(82055): unsure at all n locations
aaattagtagaaattaattccccgtcctaaatagttttctcccttgtttctcttcttgtgctcctgtctatgccagatggtgcttactcgcagcaatgggaacggccccaacaacaacaacaacaatggagagaatcccacgcttgcccaagtcctggctcaacaggcacagctcatgaacatgatgatgcagcaactccagaaccagcaaaaccaggggaacaatcatgcacctccccagaacaagttagcagaatttcttcgtgtgaggccgcccactttttccagcactaccaatcccgttgaggctggtgattggctgcatgccatagaaaagaagttggacctgcttcagtgcaatgatcaagaaaaagtctcctttgcttcacatcagcttcatggccctgcctctgagtggtgggatcacttccgtctcaacaggaccactacggaaccaatcacttggcttgagttcactgctactttccggaagactcacataccctcgggagtggtgtctctcaagaagaaggagttcagggcactcactcagggatctcgctgtgtcactgaatatctgcatgaatttaatcgtctggcctgttatgctccagaggatgtacgtacagatgaagagcgtcaagagaagttcttggaaggactgaatgatgagctttcttacccactaatgactggggattattctgatttccagaagttggtggataaggccattcgccaggaggataagtacaaccgaatggaacagaagaaacgcaggattgctcacttcaaagctcagtaggggaatagtcagaggccgcgtcttgctatgggacctcaggcagtgtcacatggagggtcttcgtcagttgttcgtccgcagagtcagttctacaacaacaatgctggcaacaacaaccgcaaccaagctccacgtcctgttgcaactccagcccagcaccagcctgccaagagggagtaaggaaacaagccaggagtgtgctttaactgtggggaaccaggtcattattctgacaagtgtccgaagccccaacgcgtgaaggttgtccctgcacagaacaactccaccgcaccagcgtcaaaggctcgtgtcaatcatgttgctgctgcagaagcccaaggtgctcgagatgtgattttgggtacgttccctattaactcagttcctgcaacagtgctttttgattctggtgctacacattcatttttgtctatgatttttgcgtgaaatcatgggatggagatagaagatcttagatgtcctttgatggttagtaccccgagtaaccaagcactctcatcacaacgtagcccctctgtcagaatagagattcaaggagtaccatttctggctaaccttattctattagaatccaaagaccttgatgtcatcctagggatggactggttagcccgatataaaggtgtgatagactatgccaatagaaaagtaactctcaccagcaatgatggtcaagttgtaactgttcatgcattgccttctgagcctttaaggtcaagtctgaaccaagtaactttggaagagattcccatagtacgggactacccagatgtgttcccggatgatttacctggcatgtcgcctaaaagagatatagaattcagaatagatctggtaccaggaacaactccaatccataagagaccttatagaatggcagccaatgaattagcagaggtcaagaggcaagtagatgatttgcttcaaaaaggatacattagaccaagttcgtctccatggggagctccagtcatttttgtggagaagaaagaccatacccagaggatgtgtgtggattactgtgcactaaatgatgtgactatcaagaataagtacccactgcctagaattgatgatttgttcgatcaactcaaaggtgccaccgttttctccaagatcgatcttcgatcagggtatcatcagttaaggatcaaagaggaagatatacctaagacggcttttaccactcgatatgggttgtttgaatgtactgttatatcttttggacttaccaatgcccccgctttcttcatgaacttgatgaataaggtgtttatggaatacctggacaagttcgtggtggtctttattgatgacattcttatctactcttgaactaaagaagagcatgaagagcatcttcgccttgcactagagaagttacgagaacatcaattgtatgccaagtttagcaagtgtgaattttggttgtctaaagtaaagttccttggacacgtcatctcagccggaggagttgccgttgatccgagtaatgtggaatcagtaaccaactggaatcaaccgaagacagtctcagagattcgcagtttcctgtgtcttgcaagctattaccgaaggttcatagagaatttttccaagattgctaagcccatgacatgactgcttcagaaagatgtgaagtacaagtggtcagaagaatgcgagcagagttttcaagagttgaaaagtcgcttaatatcagcacccattttcattttgcctgatccaaagaagggtttccaagtgtattgcgatgcatctaagcttgggttaggttgtgttctgatgcaagatgggaaggtggttgcctatgcatctcgtcagttacgtccgcatgagaagaactaccctactcatgatcttgagttagccgcagtggttcatgcgttgaagatttggcgtcactacctctttggtactcgtacggaggtgtacacggattacaagagtttgaagtatatcttcacccagccagatctgaacatgaggcagcgaagatggttggaactgattaaggattatgacatgggaattcattatcacccaggaaaggctaatgttgtagcagatgctctcagcagaaaaggctattgcaatgctacggaaggacgacagttgccgtgggaattatgcaaggaatttgaaagattgaatttgggaattgtcagtagaggtttcgttgcaggattagaagcgaagcccactctcatcgaccaggttagagaagctcaaatcaatgatcctaatattcaagagattaagaagaacatgagaagaggaaaggctattgggtatttggaagatgagcaaggaaccgtatggttgggcgagagaatttgtgtcccagagaacaaggagttgaaagatgcaatcttgaaggaagctcatgacactttatactccattcaccctggtagtaccaagatgtaccaagatctcaaggagaaattttggtgggcaagtatgaagcgtgagatagcggagtatgtagctgtgtgtgatgtttgttagcgagtcaaggcagaacatcagaaacccgcaggtttgctgcaacctttgaaaataccagaatggaagtgggaggaaattgggatggatttcatcactggtctacccagaacgtcatcgggccatgactctatttgggtgatagtcgacagacttaccaaagtggctcatttcatcccggtgaggacaacatattccggaagccgtttggtggaattgtatatggcaaggattgtgtgtttgcatggtgttcctaagaaaatagtatccaatcgaggtagccaatttacttcaaagttttagaagaagcttcaggaagaggtgggttccaagctgaactttagtaccgcttatcatccacaaacagacggacaaactgaaagggtaaatcagattttggaagacatattgagagcttgtgctttagacttcggtggaagttgggataagaatctgccttacgcggaattctcatacaacaacagttatcaagctagtctccaaatggctccttatgaagcactgtatggtcggaagtgccgcactccgctgttgtgggatcaaacgggagaacgtcaggttttcgggaccgatatcctgagggaagcagaagagaaggtaaagatcattcaagaaagattgcgtatagctcagtctcgtcataagagttatgctgataatcgtcgtagggatttaagtttcgaggaaggagatcatgtgtaccttcatgtcacgcctcttcggggtgttcatcgttttcacaccaaaggaaaattggcaccgcgttttgtgggatcttataagattgtcagtagaagaggtgaggtctgtcagggttacgggttaggcataccctttacccttcgatatacgtcacatatcggtatggtatacccacgcgcatacggatacttcctgcatattctaaggaaatccttcacgaaatctatagattggaagaatcctactcggacaagactgggtcgttgacgtatcgtataaggtctgataccttcgagttctacttggaaacctccagacctgcgatataaaagggaccccccggggagcctgcaagggatcgaatctcagagccaacacaacccacacagcctacgaagccggagcctgcaaggagccaagccatcaagatctagtcgaaccaactcgactacgatctcgccggatccgacaagttccactgttccctttgtaacctgtgttttccactatataatcccacatcgactggattagggctattacctatcaaggggcctgaaccagtataattctcgtcttttgtttgcttaatgtcgtattacatagatccttgtaccaacgtaccccaataccctctatatccggtctacgggtaccactcgtcgacagtggcgcgccaggtagggggacttggtgctcaaggttctactattatgtcatccagcttcgtcgacaacagcgtcaacaccaacctcagccaagtactccctgcttcaacgatgctggtgtggactcaagtcagtgaaatcgtcttcctggtttacaccacaatgccgatctcaaccggtcccccaatgaccggacacgagaacacagtggctacaagccaaggcgactccatgtcgaaaaattgtcccgccgagacggagaatggagcatcgacaacatccgagctcgagaaggattctgatacggccaaacattgtccttccgacatgaaccgcgagctgacgaagatgacttccgaagccacaaggtcctggtgtcctatccacaaaaccaggaaacacactctgcaagcctgctgggttttcctcaacgtccgcgctgaaattcgcgcctgcaaagaacgtggaattcagcgtacttctccaactcgtgatgtctattgtcctattcacaagacaaagaatcacgacctctcaagctgcaaggtctttctcggcaccatgaaagctccgtctcctaaattatacgtccccatcagggataacggcatggaacaaggagcgactccaacttcagatcgattcgttggggtaatcgatatcgatcctcacgaaccattagtcttacaccttctcgaagactatgggtcatcgacaacgagcgcgccgcgggaggtattggccatcgatgacgttggcatgtcagcgcacgccaacgcagaagcggggaatcaatcgactactccagcccagcacattagggccgttcaagctatactgagggaaactccctacgatcccgttctgaacgatgacctcgagcgttggacagaacgactacgggaatcagtgaccaacctcagcaatgcattcgaagaagccgctaccgcagcgcacccggagcagccaccaattggcgatgccaatggtgaagacccggaacgaagggaatcacctcaacgagctacccctccacctcgcggcactggcgatctctgagatcaaatcaacagccaccgagaagcacgacgcacacgagacaatgtgaatcgttctcggcgtcatgtctcttcatggcgccatgataatggaaatcgaggagaccgctcaaacgaggaccgagaccaggacaaccaccacgatcacaacgatcgcgaacgacgggtgccagacaatattggtcgaggccgtcgccataacgacgatgatgacggagatcggcgccgagacaacagcgggagacgacgacaggattcccgagatccaggccgacatcctcgtaatcgtacgccggaaccaagcgacccattgtcatcgtcatcatccgcgtcctcctcatcgtcaggcagacatccacgaaggacacacgaccgccgacaacccaccgcccctaacgctgggtgtagggctttctgtcgtttcctgcgagatgtcctatggcctgagagattccgacctggagcaatagaaaagtactctacgctgttgaatgatgggagcaccgacccagaggagttccttcaagtctactccacagtactctacgctgccggagcagacgacaacgcgtttgcgaattatttaccaacagtgttgaaaggttctgcacgttcatggctgatgcatcttcctccctactcaatctcttcatgggcagacctgtggcagcagttcgtcgccaatttccaaggaacatacaagcaccacgcgatcaaagatgacctacacgcgttgacacagaactcgggtgaatcattgagggaatacgttcggcgcttcaacgagtgcagaaatacaatccccaaaatcactgatgcttctgtaattcgcgccttcaaatccggtgtcagagatcgctacactacctaggagttggcgacaagacgcatcacaactactcggagattgttcgagattgttgagcgatgcgcccatgcagatgatgcgctaagacgcaagaacgataagccgaagaccgggggagagaagaaaccagccacggacgcatctgagtcaagcaagaagaagaatcgcaaaaatgggaaaaggaaagctcaagcggaagtcctcgcagcagaatacgcgaaccctcccaagcgcccagacccacaaagtagcgacataaagaaagcatggtgccccatacacaagacgaacatacattctctggaagattgccctgttttcaaaaaatcgctcgagaaacacatcacatttgaaaaaggcaagcaagtacgcgtgatcgagaagaacgaggaggcggttcctcacgaatcggattcagcgtatccagactccgacctccacgtttcacacatcttcagcggttccacaacatactcctcaaagcggaaatacaagaaagtggaacgtgaagtctgttcgacatggcagggggctgcacccaagatgaagtggtctgaacagaggatagagttctcggaagaagatcaccccaagaccgccgtcatcccaggacgatatccgatcgtggtcgaacccactattcggaacatcaaggtagcgcgagtccttatcgacggtggcagctcaatcaatcttcttttcgccagcactttggacgcgatgggaattccgtaaagcgagttgacaccaaccgatcaacccttccacggaattactccccaatcatcgtccagaccattaggcaagattacgttgcccgtgactttcggccaagccaacaactttcgaacagagcagatcacctttgatgtagctgaattcgatacaacttacaacgccatcatcgggagaactgcacttgcgaagttcatggccgcatctcactacgcgtatcaagtgctcaagatgccgggaccgaagggaacaatcactattcaagggaacgcaaagctggaggtacagtgcgacaagcggagcctcgacatggtcgagcaaacgcccagcccacccgccacgactgagccacccaagaaagtgagcaagacaaacaagacgccgaaaccggacggcgccatcaagattgttccactctccagtgccaaccccaacaagaccgtcaaaatcggggcgacactaattgagaaataggaactcgcgctcatcaccttcctccgcgataatgccgacgtgttcgcttggcagccgtccgacatgccgggggtccccagggaggtgattgagcacaaactcatgatgcgacccgatgccaagccagtaaagcaaagactgcggagatttgcaccagaccgaaaacaagccatacgagaagagctcgacaaacttctcaaagccggcttcatcagagaagtacttcatccagagtggctagccaatccagtcatggtgcggaaggccaacggaaaatggagaatgtgcgtcgacttcaccgacctcaataaggcgtgccccaaggatcacttccctctccctcgaatagatcaactggtggattcaacagccggctgcgagctgttgagcttcctcgacgcttactctggctaccaccaaatcagcatggcaaaagaggatgaagagaagacaacattcatcacgccgttcggggtattttgctatgttaagatgtcgttcggactgataaccgcagggaataccttccagcgcatggtccagggcgcacttagggaccagctcggcaacaatgtcgaggcatacgtcgacgacatcgttgtcaaaaccaagacaggcgactcattgattgacgatctgcggcaaacgttcgacaacctccgacgatatcgcctcatgctcaatccagagaagtgcacgttcggagtaccgtcgggcaagctgctcggattccttgtttctggcagaggaatagaagcaaacctcgagaagatcaaggcaatcgagaacatgaagtcgcccacaagactcaaggaggtacaaaagctaaccagatgcatggcggcactgagcaggtttgtcgttaggatgggagaatgagcacaacctttcttcgctcttttgaagaaacaagacaaatttgtatagacacaggaagccgaagaggcattcgttgcactcaagcgctacctatcaaaccgccctgtacttgttgctccccaacctaatgaagaattattcctctatatcgctgccacgccatattccgttagcaccgtcattgttgtcgagagagagaaagtacaacgaccagtctattacgtcagcgaagctctccacgacgcaaagacaagatacccacagatccaaaagctgctttacgcggtcatcatgacatcaaggaagctacgccactactttcaagcccacagagtcacagtcgtctcctccttccctctcggcgaagttgtgagaaacaaagacgttgtcggctgcattgcgaaatgggtagtcgagctgagccagtttgatgtccactttgtgccacgaacagccatcaagtcccaggtactcgccgatttcattgccgattggactatgccagataacaaatcagacaaccaagtcgacaacgaaacatggacaatggcgttcgatggcgcactcaacagccaaggagcaggggcaggatttatcttgacatctccctctggagatcaattcaagcacgcaattcacctcaacttcagggcgaccaataacatagtagaatacgaaggactactcgccgggataagagctgcagctgcacttggggtcaagcgactaatcgtcaaaggggacttcgagctagtcgcgaaccaggtgcacaaagattataaatgctctaaccccgagttatccaagtatctcgcagaagtcagtaagctagagaaaatgtttgatgggatcgaggtccgacacatctaccgcaaggacaacatcgagcaagacgacctagcacgacgtgcgtccagacgagaaccgctcaagcccggcacttttctcgacatccggacgaagccatcagtgaaagaggttagcggcgaagttagcccggacacccccgacattagctcggaggtcaccaaggcagaacgcgccgttgccgatatcgagaccacagacaactggcacatcccactaatcaaattcatcaacagcgaggagttgccagaggacgatatagaggctgagaaaataacccgtaaagcaaagatctactgtatggtcggcaatgatctatacaagaaagcgtcaaacggggtacttctcaaatgtgtctcgtccgacgacggcaaacacctcctcctcgatatacatgaaggcatttgtgtgtcacacgccgccggctggacattggtcgggaaagcttttcgacaaggttttttctggccaaccgcccttaaagatgcatgcgacatggtccagcaatgtgaagcctgtcaattccacaataaacacacaaagctacccgcgcaagcgctccagactatccctctgacttggccgttctcgtgctgggggctcgatatacttgggccattcccacgaggatagggcggctacagattcctattcgtggcgatcgacaagttcaccaaatggatcgaagcagtacccacgggggaaatcaaggccgacaacgccatcaaattcatcaaagggatattttgcagatacgggctaccgcaccgcatcataactgacaacggctcccagttcatcagcgccgatttccaggattactgcatcgggctgggggtcaaaatatgcttcgcctcggactctcaccctcaaagcaacagacaagtcgagagggcaaacagcatagtactacaagggataaaaacccgcgtctacgacagactcatgtcacacgacaaaaaatgggttgaagaactcccatcagtactatgggccgtacgcaccacaccgacaacgtctaacaaggaaacacccttctttctcgtgtatggctctgaggctatgctccccgacgagctacgacatcagagtacacgagtacagaagcactccgacgaggaccaggaggaacagtgggacatcgatgtaaatcttctcgaggagcatcgtgaacgagttgccatttgagcagccagctatcaacaggcactccgccgttaccacgagaagcgcatccgagcacgcatactttcgatcagtgactatgtcctccgacgggttcaaagccaagtagggcggaacaagctctcacccaaatggtaaggaccctacacgatcacacaagtcttacgtccaggcgcattcaaaattgcagacggcgaaggtcgcgagttagcaaattcttggaatattgaccaactacgtaaattctatgtatgactcaatgccatccgtacctgtaagacaccttacagtatcaataaagcctagtcttaggcccatgtcacaatcaaagtgtttttgcccaatgatcccttaccctaatgacacctagcgttgaaacatgtcctcatgtccctttacgccgtcttgacaaggcctccgaggaacctaagggatcttcggctggggacacccagagccgataaggccttgtcagatcctgtagagatgaaagaccatgtaagatctggtcgtgtaagagttctcgccgtgcgtattaaccaagccgtgaaatcagaaatcaactttccaacttcatggctggggactaggatcagagcttattcaaccaaggcgggtcaaaggtccaagagccttatcctccgagaaaattcctccgacgacaaggctaggggctagggagagtgtacgactcaaacggctgactaaagtcgtgaactgagaacgcactcttacacacgacatccagagtaagaaacatctgttaaagatagatttcttttctatttcacaaaatacttcttacagttttttacacaaatctttcgctacattatacctttttcctaagatatctgtcacagggtacgaatactaccaagaaggccaacgccagtccatagactggaagatcttctcggccaatggcaacatcgacctcgccagatggtctatctccgccggagtcctccgagaacgagcaaaaccctcatggagaaagtcgaggtccaagcgcggacgatgatctcgtaggcaagccagcacgtgtcctccggcgtatcggctcgatcgacgacactcctgcttcaaggcctcgtcgatacgcttgccgatgccatcgagttgggcacaggccccgttcagccatgagatgtatccggccaccgactcctcgggatctccgcgaaccattcgaagttctctacagaccctggccatggatgtgcagcaactcttcaagtacgagttaaaccacacctcacgacctcggagcgtttccacagcctgctctttcttcactgccagcatggttctctcgagttccgctacttcaaacttcgtcttccagtattggatacgacgatcttgaccaacaagggcaccctcgagatctgcttaatgtgataacgactaagtcaagctgtacacctctttcgagtacacagttgatctagccgggagggcatcaaggggtgaatggactactaacctgaggaaatcgtcgtcatccctgtctccataacaagggtctggtccacattgtcgggcgacacgtgtggttcaaactcgagaatcggaattatcaccagtgactcgggctgcccgcgctgctagacatcctcgttatcagcatctctacaaaggacaaaagctcccgaggtcaacacacaaaagtaaactagaatgataattgcacgcgcgaaggcggtcagaactcaagttttacacagcatgtcttggaagtacaagaagtcctactcttcaaataggggagaacagactcccctagatcgccgactccttccatcacctccttacgcgtgtcgctggccgccccctgatctaagatctcgcgcagatcgagttcaggatgcgacagctttacacacgcgaggacatgacacgcctcggtgtagatcccgttcgacgtctcctccgcaatcctggcggcatgcttggaagggatttcccccatcgccgtcaccagttccgcaagggaggaggtcagcgagaactcgtcaggattcaccgggatggtagacttgagctgcactccccggcgaactggtgcaggccagtgtaggtgacccgcaacgaaccccggatttccgacaggttgttcccgagttccgacatgcggtcctcgagccccttccattgtcgctcattgccggccaccaattccctcatcttcatgaggtcttcatgggcttcagccaactcgcgcaccagtcagtcagcacgcgcgttcgccagcgctgcttccgacctcgcctctgcaatctcgcggctgatgccgcgagcaccagcttcgaggaggcgccccatcttgacttggagctcctcctaggtgaggacggcaactggtggatcatgacctgccgcgggatcgctgactgggccgctaggcgtcgcctcccggctcccagctgcaggcacgacatccgtcgaggccgcggcaagcgacacgctggaagtccctccggacctggcttgcacagcctttgctcgcgtctccctacgggacgaccacgggtcagacaacgcttgaatggaatcacggaaacctaaaaattcatctacttacttttcgccaaccgtcacaagacgttgtcgtcgtggaggcgggggagacgcgtccaaggcctgaaagacaaccaatgtgaagtaaggcaaaatccttctggctgcgcgatcttgcgacaggataacttaccgagggggtcgacgccttgcgacgatgtccgcttacagaggagaacttcctcccctttgtcggaacattgccaccactagtagtggcagcagcagcatcagacgcctcctttgcgaccttctctttcagggacgccgccacctgatggtccgcgagcggcccgatgatgtcagtcagaggaagagcctacgcttaatcaagtcataaggtgatctcgaaggaaaaatgcgcgatgcttatcggatgcacttacgttgatagcatcatcacgttcggccgcccccttttcacaaaggggcgtggggatgttgctcgccattgtcagaccgctgatcatcacctggccaacacggcgctccacggcttcgctattcagacctgtgaatcgagaaccaaatttcaatgagtcaataagaacgcgaacataagcatgtcaggataaatgcgagaaagatacctcgaggagaaacccgggtcgcgtcctccggtccagaatagttataagcgggatgggcctgagcctggagcggctggattcgcctaccaacgaagtctgcaacgacttcataccctgacaagcctcgtactcggagatcatcgatgatgttgataaacgactgaaggggggctttgcggtccaagacgaaatcttgtccggttgttctttgggaacaacgaagacagggttcgaatctttgatctcaaggtagaaccacctattccgccatttgctgcgagaagatgggcactggaaggagatataacgcgacttcaggccatcccgaagtcggaacccgacgcaaccagctaccctgttggactccatccaacgcagttcatagtaagagcgaaagagatcaagaaaaggctctaccccaatgtaggcctcacaaagatgcgcaaagatgctaagaaaggcgatagaagttcaaaaccaggagaagaaactcggaaggcggaggaagaaaaccgtagagaacataatcttcgatcgtaaccatgtgacccaagatgggctagggattagtacctcctacttccctctccatggttccacggccaggaagggcaccgtcttcctgacgcttcttcagcgacgcactggtggaagatgatttgccgaggtccattgctgatcgaagatcgccggagaaagggcttaggttgatgaactggggtttcttgtgccggcgaagaaggcgaagatcgctcacaggtggaatgttttcaacacggttggcggacttcaaaatggatccccaaaatttctttaaataggcgcactaccgacggtgcgaattccaaggaacagagagagatgcccgccagaaatttctgggtccgttacgcgcggcggttttttggacttcagtttaaaattcgctcgtgaccgttgggcttcaaatggcgtgctcgactacggcctgtctctgcggtcctcgcaccgggaacgacaacagtttcgacacccgaagtcgtgaatggttacacgagctcattttaagcggaagtcgggggctactgtcagggttacgggttaggcataccctttacccttcgatatacgtcacatatcggtatggtatacccacgcgcatacggatacttcctgcatattctaaggaaatccttcacgaaatctacagatgggaagaatcctactcggacaagactgggtcgttggcgtatcgtatagggtctgatacctccgagttctacttggaaacctccagacctgcgatataaaagggaccccccggggagcctgcaagggatcgaatctcagagccaacacaacccacacagcctacgaagccatcaagatctagtcgaaccaactcgactacaatctcgccggatccgacaagttccactgttccctttgtaaccaatgttttccactatataatcccacatcgactggattagggctattacctatcaaggggcctgaaccagtataattctcgtcttttgtttgcttgatgtcgtactacgtagatccttgtaccaacgtaccccaataccctctatatccggtctacgggtaccactcgtcaacaaggtcgcctatcagttggagttacctcaatccttggcaggtgtccataatgtgtttcatgtgtcacagttaaagaaatgtttaagggtacccactgaagaagctaatcttgaacagatagaaatccaagtggatctgacatatgttgagaaaccaatccgtatcttggagacagatgagagaaggaccaggaatcgagttatctgtttctgtaaggtccaatggagtaatcactcggaagaagaagctacttgggagcgagaagatgaattaaagtcagctcatccgcatcttttcgccagctcttccgaatctcggggatgagattctgtttaaggggggtaggtttgtcacaccctgaaaatactaaatttataaattgttgtttaaatggaattattagaaatgattttaaaagccgagaagaaaagatctaattttaaataataaattccaatataaaagtgggccagataaaattttattaaatacttcacttgattctatagttcttagatttttctgggatttatttgagccaaggaagtatttttaataaatagaattgcatttcatgaataagttaaaaagaaaaaggttttaaaaatcctcttttggctttgggccgaaagtcggcccaaaacctctctctctccccggcccaagcgcgccccggcctagtcagcccgccgagccgagccgccgctctccccctctctctcccgctgacaggtggggcccacctgtcagggtcgtcgtccacctcgcgccaccgcagccgcgccctagccgcgcaagccaccgccgcccccttccaaaatttgcccgcccctttcccgatccgatcaaatcaatagaggggaaatgatccccaggatcccctcttccttttctcttttggaatcgtcggctaatttcgtttggaaataggtggatttgagttcgattcggatcgatctctctcctctaaccctaaactttccattcccgtcgccggtcgccgtgggcctccatcgccgccccctagcccctataaaagtaccccgggacctcctccgtccgccgccaccctcgctttagctcgccgctgcttgtagcgccgcctccgcgacaatccgtgcgccgccgtcgccgctgcgagtccagccgtgcgccgccgccgccgcttcggtcgtcgtcgtcgctcgggaaggccgccgtcgggatcgccaagtcatcaccgtccccgtcccgtccttcgtttccgtcgaagaccgccggagcaccgccgtcgtcgtcgacccgaatgcctccgccgcttcgacctcgtcgccgtcgtcgtccgttgccgtctgccttcgtccgagccctcgatgagtttgccgcgtcgccctctacacgtaggtgctctccgtttgcgccgccgcgccgccgttcgccggcgagcgtgagttgctgagccgccgctggtgatgacgtcatcgctgacatcagcgccgcgtcacccgtagacccgcggtagatcgattcgatctcggccgttcgttttggataagattagatctcgaccgtccgttccgtagaccgtccccgtgcacccgatccaccgtaaacccgagcccgctgacgcaataaatcatttttctttttcaaaaaaaattctttattgcgtcataattcaattaaaatctatataaatgatttaatccgatttaatctttaaaaattcataactaattcatcttagctcgaatttagttggttcaagtctctaaatttttctaaaattgagatctacatgttaaaaatatccacatgtactgttcatgattgtttatatgctgttttggtgattttgctcttttatgcctagattccgacgttcctggagagtccgaatttgcaggagaagattttgaagagttccaaggccagcaaggcaagttacacagatcccaaacaaccctttgagcatgttgattccatttaaagctattgtttctattcaactattgcatttatttttgaatgtcattgggtgggaataacctattgcctttgttatagccctttgttattgattacctattctttgtcacctggttaataatttgattagctagaacattatatggttttagctaaagtaattaggatgcttagccatacttagagacactagctcatatgaatgggatgattaataattcactattacttaatgatggcttaatgatagctcatgatggttaatcatgataggttgattaattaagatgccaactaaaacttgataatggtgggttgtgagcacatggttttgatggtcgtgctcatgacagttaaggaccggttcacgattttcggttatgaaacattaaccgtgccaaccacaagccagcgtgggcaacgactttactttttgtatagtatggttcattgtagagcaccagactgtgaagtggcggagataagcccacgggggtcgctggggagtccatgccttgtttgtaagggggtgattatgatccagaaacggtgcactgctttgaattgtgttatgcgaagggtattgtcacaatctctattcgggtacttgttaagtatcgcgacgcatggttgacatgatgttgaggttgtgtcttgtaggtacagtggtacacctctagccagagtaaaactattcgaatagtcgtgcccgcggttatgggcaggtctaacaatgtctttcgtgattagtctcatatttcacaccataataaatgatgatgaaaataatttgtttagctcctggtttggaatggtatattcctggtttggagttagaactgtgcaaccgggattggttgttcataatggttgggcctatgcaacgggtgtgttgtatagcgttggattaatattgtttaattaaatactttacagttttattaaattctaaagtattcattaaatgccatttatgcaaatgagactatattattccatcctttgttatcccttgcatttgtatattttctgcgtggcttgttgagtatgtcatatactcaccttgcaatcattcatcagaggaggatttctacagtcatgccgaaggtgtggaggattaggcgtagccctggtcaagctgcttgtgggatggagtcgcctgcgctgtttattttattttccgctgcttagaactttattgtttgagatgaactatctacctctgtaatgactttatattcgcttattaattagaatattaattgcactctattatcgatttgttattgtgtgcctcggctgattcctagacgagggtctacacacatgtaagcgtttggaattttggatagaaattccgggcgtgataagatggcgctcctccatcttcaacgacagtcgccgaaggctctgctccctcttcggcggccatatccgccccggtgtcgctttcctttcgccttataaccttctcctttacgactttcttcggtggcattcgctcttagtggtttcgttcgaagatccccacgatcggcgccagctgttgtcgaaacgacaactgcatatgtcgaaagacgtggttacttaacagtgattggaaaaaggtaaagtgtattgattagagaatttctcttgggatccccccattacatggccctatgagactatttatagcccctattacaggttcttactactagggttttggttatacaggggaatttacatggttacccttatgaaagggacatttacaagggtacatagtgtaatagaggttcatggaatcctgatgggccgttaggcgattgtcggcccaatggcccctaggcttgatgggccggaaaaggcttcttcggccctcgcgggggcgagcttgctttggcgaagtcgtctcccttcggcatatactcttcgccctgtatccttcgctcaagaggcctccggcttggcagagtacccgcacgatccttcgcctctcgcccgtgtccttgttccatagtcttcgccttgggggggaggggggcttcgccccaactaactttgacgtctcgggcttggatccccattcctcgcatagctttcggcagattttggtcgaagtgcctcgtaccataccgccaacaatacatatatatactcttctaatcaagtgatcaaatgagcctaatccaactatctaaaatctgtgtgatttggacccaaaaatctgtcgtgtgatgaatagctagtcccagtttgtagaaaaaaatagtaacattttcaattcaagacatattaattataaaatatatattcaattattgatatgatgaagctaatttagtattataaatattattatatttgtttataaacttagttaaatttgaaacagtttgactttgaccaaagtcaaaacgttttataacgtaaaacggagggagtaatattaattattattattacaaacttaattcttatttgatttgtttaataaaattctatatacaaaatattattttaaccaaagcaccatttagtgttttggaaagcctgctcatgaagaatgagaaagttgttgttctaacaagctaaaactaacggagcctaagtccactccgacggtaataaacctccgttatttcataggtggcgctgctaactttcggtataatgtttaatcattcatcttattaaaaaaatcagtgtagatatgaaatactccctccgttcctaaatatttgacgccgttgatttttttaaacatatttgatcgttcatcttattcaaaaaatttaagtaattattaattattttcctatcatttgattcattgttaaatatatttttatgtatacatatagttttacatatttcacaaaagtttttgaatatgacttacagtaaaatatgtgctaaaaagttaacggtgtcaaatatttagaaacagagggagtataattcatatttaaagttttttaatggtaaaacatgtcataacaaaataaatagtatttatataaattttttgaacatgataaatggtcaaacatcatcttaaaagtcaacaatatttaaaaaccaaagaaatggtgaaatgtcatctattaaaaatcaaagagtacgatatttgacttgcactccgaaccaccgtctaaaataactcaattactaaattgtttttcaatttaaggtttgttggtttcggagccaactttcgcctgccaatataaaatttgtgctattataggaaaaaattggtagcataccaaatacttacgtgatactattaagttatcaatatttttgtagggcacaagttatcttcaatccaaataagcccttaacttaaactgagaaacctattaatcgaatgtgtgaggaaactacaaatgacaccgaatatactaaaagagatgaggtcgtcgatatcatatatgtggtgatagtcacatgttttacgtgcgtgcgatgtacgaaaacctatcattgcgcgctacacattcatttattatgtaattaccaataccagtactatataattattgattgaaatttttaattattaataccagtttcattatgtcctaaattattggcctaatttgtttttcctttttcattcttctctcctcttctctgtctctctactattataaaaatttaaatttaagatgtttttgccactaatttgagccgtcgcctctttcatcagcttcatccgattccccattttcgaacgcgatgcttccatcgcttcgcagtcggataagatttatgagtaaaactaacaagctattaacaaatttaactggcacggtttgtgggcagcaacgataagagcccagggcccaagacacagctagggatgcggtcgggcacgacgggcacgggtagttacccatgtctgtgcccgcgagataattcatgcccgcggacatgcccgttacaacatgacggacatttctccacatgcagagacagtcaacaatacaaacattataagttcaacaataagacaacttcaaatgtcatactttagcacaattacacaatcaacaaacttcaattacacaagtttcctcttcttcctattcagcttgttttgcagttggggatgcatctacagaagcctgtgaggcttgctcacgccggttgctgctgaccggtggagtagcacactggctgctactggccgaagtagccattggttcaaatcactaccaatcaaatcggaaataacagatcaatgtcagtaggtactagatcgaaaaaataaataactagatctagagtacgggagaaggggataccttgctcagcgcaggggaggacgttgccggccggaggggagctcggcggctcggcacagaggaggcagtggcgaccggaggtgggaggcgcgactggagggaggcgcggttggagacgttgatgaccggccggaggggagctcgcgcagacgggtaggaggcgaggcgacaacggctagagggtggagccgccggcgacgacctcccgtggcgcccctcccagcggcgacctgacctcccgcgcggacctcccgtggtgcctatggcacccctcccggcggtgacctcccatggcacggtggcgcccctcccatgtccgcctagagcccctcccggcggcgacctcccgcgtcagcttggcggctgtggaggagaaaagtcgaagagaaggagatgcggcggctatgaagggaagagaagaaaattctagggtttttagatgttggtttttatactaagttgattgagggccacatgtcagttgatgttcgcgggtaaatgggcgaagcgggcccgtgtgcccgtttgttacaagttttaacccaataagaaacctatgagtactaaatagagaacaaacccaactctattagggtttttatccacaggtaaacgggcaaacaggtcaaattgctatccctagacacagcccacgaagtcatttgcacggcccaccatttgctacgtgtgcaggttatacagagacaataacacatggtgtgcagttatacgtggaattcaaagtatttcttttaccaaattttcactttttccctactaatctttacctttatttaaaaatttagaaaaatatcattatctattaaaaaatcgaaatgtttatgtctgcttgtctgtttcatctatcgctaccggtgcggtgcgagataggattggatcactcccgcgccgccacgcgtgtgtccatctcatatcacacatacgataatgagtctatcgtgcgcctgtctccatgccagcaagagaaaatagaaccccgagctacgcatatgcataacgcccctgatagttcgaccaccaccatccaggcatccactgtgagtagtgtgtgtacatcgcacatatgataatcacatattcacgtcgggcaactgaaagagaataagtacatacataaatctcacatcaacagccatgattttttttctcttttaatgaaaggcattagtcttgctgttatggaaatcaagggtcaattcactctatggaccaaacttatggtagatgtcatacaaactagaccgcatgacttcacccgttgtaatgcacggacatttctctctagtttgataaaaaaaatgtcagatttagccatcaacgcttgcatctaagctatagtaactagatcatgtgctcgaactctccagctatcgtaatatatattagtagtactagaaaataagcatggcgaagccgattggggcactctctagttaacctgtgcatactataattttactctccatttcaaatatagtaacttctagcgtgaaatttttgttctagaatatagcaacttcttaacacactctctagcctctctctttaaaaccaacaggagcactagtatttcattgagagaggagaaaaaaacaccattcttcttgggtttaggtgaaacaaagcgggttcacagatatttacatcagggacctcgtcttaagcattggggaggctatccaggaagaaattttaagtttttgaaacaccgtatatatgtaacttttacttatatgtgatcccctaacttccgctgagcaacgccctcctagcttgattaggtagaaaacatcatcggcgctgaaatcttcattgattacaccaaacgttggagatccctttctaccaaacgttgattacactgataattacatgtcatgttaaggtggaggttatttgtccatgttgcaattgttgcatacatctttgtagctgaagtgtagtttttttagaggagtagttgaaagatgaggcatgtggtcgtttcctcatgatgatcgtgaaacaggtaggtaacgttgtgtggccatacgttaattgaatggcgtgctaggttgtcagcggttaacctactggctaatttgaaccaatcataacatctttcatttaatttatacacgtattttctcatctcaaccgatcataacaattgtatgtaatttcatccctctctttagttcccatgaaaagttgagtataattttgaggaataaatcaaagatgttagtataataagattttctttaatttcgcataatattgtttaactttaacatacgaatagatagattttgctctcgataaggtttgctcggctctgttggtgtcccatggtgtgatacgtctttgtttctttttccttatttacatctaggtgtgccatttaccgtttcatcaggttgctcatagcttgttctttcttttttttctccatctgatctaggctctaccatcatgtgtagatgccggtttgtttgttagttggaacttaccgctccctgtgcttctctttgattggctgacgcagtggttagcttagtaaatgaggatgagttactgccttcgtgtgatgtagcaaatagtagtaccaatggagtatcaatcttctctatctttccactggtcgctgtttcaggctgccgtcggaaagcaaaattctttggcatatcagccaaacttcgcattttcatttcagccaaagaatttccattgattggcgtatttcttgatgttggatcttctgtggcttaatggttgcagctctcaattgatagtagcattcatatatgatgggtttagggattagcaaaaaaaaaatctcaattgatgtaagttgtggaagtaaattactatcataattaatttgtagcaatatatatttagtaagccatataatctctcagttgctacatgtagtcgtcatcctcctcagggttgggttcctcatcatcatcctatggtgagtgaacatacatctcgtcaaactccttgtcgttgatgtccggattgtcgtacaccgtatccaacacaaaattatgtagggcaaagcatgctgtaattttttttgtttgccacttcgtgttatatgagggtatgcctcttaaaatcttccacttggttttctaagcatgtagataattaaaattctcttgcaagagttccggattgcagccacgaaaatccggcacatggtaccattcacccctatatggagccatatatcgtggagccaaggcatatccagtatcaaccaagtagtacttatctgcacaacaagacatatatttcagaaactcggccaattgtaactgtattaaaaaacacttgcacatactgtgaggtgggtgaggaaacaaatcagatttgtctcctctcacgacgcggttgaagacagccatgtcatggcatcttcccttcatcccagcggcaacaaaagtgaagcgcatgtcaaagtcacatacgaccattacgttttgactagtgtatccatgcctacacatgtaggtcatgcactcctcttgtggaatgatgactgggatatgggttccatcaataactccaatgcaattgatgaactgtggggaaaacctagattgcaacaaccttccatgcacaccacgaaaagcaggatcacgtggttggatgatatcattggaaaattggagcatcactttcaaaatatccctaaatttccgatgcacggtgtctggtgacctttgaaaacgcttgcaaatctggctttgcgataagtcgaaatttctttttaggtttgtgaagttgctttgccatcaatctttcatttgtgatatgtgcaaatctctttttatattttcccacccttgtcgattcatatattgaccctccatgttcatctgagccttttcatgaaggcatcgatcaaggaatgccttggtcattcgtcgagtccaattggcgcggtcgtggctcatctgcataggctgaagtaagtggaaaggtagcatgtgcagtgggttgtctactctcaattatacatagtacatatcgaattattgggttaatgtattagttaagtgaccacatcatttctttcgaatgaaagtagtgaatacataaataatatgtgttcacacatacctaccttgccgtgttgcaaatgagcaactgtggagtgcaaagcgtatcgtcgttggtttatcctagagcacgatgaggaagatgatgttagagatgtgcgcgggcgttatttttattttgtagtacctatttggcatgtaattcatcatgttgagcgtgggaactgagaagtactaaaaagaaaataatcattcggcaaatcatgcatgtcattttctttcttttccatcctgaccaagaagtaatataatcagattaagatgtctcaagagacatgcaataacttaacttatgcatccatctcttggaactatctcaatttgttgtatgtggccttccagtagtttctcatcatcatatccaaagatcgtgtagattttgccatttgcacaaaactatgcatgttgaattgtagttgtggccactaattgtactccttccatcccaaaatataaaactacgtatgttgcattgtagccgtggccactaattgtactccctcaattccaaaatataaggtacaaccgaccaagaaataattgttggttgtgccttatatttttggtatggagggagtagtacttaattcatttaggaatcatcctttccatcatatttatatgctgccattacttatgtcatctactcttaaagcaaaaggtgtttgcttcactccacatacgtccataattagtagactatacacactgacacactgatgattcaaaagaataatgtttcaattcgcctaatttgtggagccctattagatcagatgcatattatgatcatcatcaattactcatacattcatgctaatgattatcatcaattactaatacattcatgctaatactttgaagtattctgcgtgttgtattaaattacttatcatttttattttttaggagctgataaggagtatgtcgtggcacaggggttgagtcgccagggggagcttatcaatgggttaaatgccaaagttgtagccgtgctcacgaagattgcaaagatccgcagagagattttggtccgaacactgagccacgggtggtaaaaccgcaaagcttagaaaatagcttcggtcttactatgtggtttcatatggtgtcgtgaagcctaaatataaaacaactttggtcttggaccgtcaataatgattttttcttagaatttggatacttaatcgacctgcttacttctattatgttaatactaattactattgtaggaatcctggttcttatttatattgatgattatatgtctcacgatgagggatatttaagattttttttatttatataagttttttcaatacttccatgttgctattggttatacaaatttatttttttagagcttgtggaatgtgttcctatttattgatatgcttttggtttacacgaccaattgcaacgagtgcttgtcaaaacaaaactttggtaactaatcgtcctatcgatgagctttccaactactagcagatgcgaatgataagagggacattatagtgccaaatccttatgtattatttactacggaattatatgccattatctgatcattagaattaaagtaatataaacttccaaatactgtcatatactttgatatctttacttgatgaaactacagatgaagctgtttttgtaaggtcaagtatatgatgctaatgaaccatgttagaaactgccaatgaagttcattcgatggtgatgaacgttgttggtatttcttacgttcataaataaaatccacaagtgcacggatataccgctgtaacacttcacccagaagtattccaatatataaaattttcactgggaatgtgtgtgtttagctcttctttaggtttatcaaggatacaagatataaatgtaggccaaagggtagagatgatattctaatgtggtacagtgttgtttggaaggcttaactttaattttatcgctatgcttcaggcactgctcactactaccagaatgcgctctactctgtacccgacatggaggactacaatgatttcgagggctgtcaccacctctacactaacctctaacgtacggtgggatacgtagccaacaatagtaattaactatctagacaccatgtctatgcaattaattactactctagcgttagctaaacactaaagtaatcactttttcttaatgaacgatagtgaacaatgatccgcgttagctaaacactaaaataatcactatttcttaatgaacaatagtgaacaatgatccagcaagctaaataggacctaacttaggccctatttgtttcagcttaagattattgagccatattactataagctggattataatagccgacatagtataagttgttagctgtttgtttatctggatgataagttatttgttagctgttagccctcaataatataaaaaaagcacctttagagtggattattagattatagtaatatggcttatagattgtaataatctatcatgataagctatctgtttatttcagcttactcctaataatacagattataataatcctaacctgaatcaaacagggccttaagaataccacacaagataaatctcaatgacttgattaaaatattctcaactagagcaaagcaattgctaaggtacaaaagaacaattctggaactcctccaactctttctttctcactctctcccttagtctaagtataaataaaagaatacaaagagccttataattcagctcacatattggtgtgttgtgaatgagggaagagaggggtattttataggccaagagacgccttgggagtatgtagatcctaagcatctaaagagcatcttcactcttgagctgccaagtgtccctccatgagctgccaagttcccctccatggcggtttattccgatagaaatgatcacaatcgccttggatagtcggtaactaccgacatgtgaaaatcgagggctagatgggctgttcctgagttggccgacccctggttggcccttctggcccttggttttcttttgggccctagtaggtactttagtatttctgtggagttggcccatttaattatgatcttgttgggcttgttggctcaaaactctatgagcttggatatggaagtaatatttccgtccctcatgtatagttcatctcaactttggtagtttatcacctgcatacaaatatacaccgacactagtggaatttgttagaaataaaccttaccactatgttggatgttttatattttcagatttatgcaggtattgacggcgtaaatttcgtatttaacagccatcaacaaacgcgttcaatcctttgaagtacttatatatggttgattatggggggcacgatagccggttgcctcatagtaggccttttgggccgcaccgtacagggtgggcaaagcgccccaggcccgtgtggttagtttgtatttgaggaaagtaatattagataagggaatcaattttgtcccttgtaattagattaccatcggaccgccgaccgccctagctctatatagggggtgccagcataaaccctaaggggttaggacttttgcatcttttctccacatacgtgccgtcggctactccattgctgacccgcgcacttggacacagatccaatacatctcaactggacatagggtattacctctcgacaagggcctaaaccttagcaggtgagtcccgacgtcatctgctgacgtcgtcgggactcacctgaacgcatctcgggccgacgtcaccagatgcgttcaagcactacgtttccccgccgaccgagttccgctccggatatctcgacttcatcaccaacaaggccggcgtcctcaagctcgcatctccttcagctacaaaccaccggccatggcctctccagtgccgatcggcatccccaacttcgccgccctcaccattagaattaccgtactaccagtggcaaaagaacggcaaaaaaaaaaatgccaaaccaagaatgtatctaaccaaatgttaactcaaaaagttgattaggcaccacacaacaacgccgtttcaaaatgcaccacacaacaacgccgcttcaaaatgtcggtcatatttgtgacatggcagagagaacacggaaatgtaaaacctgaacaatcgataattattcaatggcgtacagccaagtgcaaagaagtataacattcacaaggcacttatagttttaatttgcctttcaagggtttttacagttaagcgaggacatctacaaccaccgcttagaatttcaactctaaggtatttttcagtagcaaccacagatctaatcatctttcaagctaaacatatccctctgtttctttataaaaaaagaaaggtgaacatatctgtacaaaaattcgttggcaccagttttacaactggaagcaagtgtgaaatgattactgcagcaaaagtaaccggcccgtttcaatatgaactccatgccgctcaaggttgacatcaatagtaaacagagatctgtgagttaacctgatggttcatgactgcatgcatgtgttcataactaaaatgcagcaatagtatctactacttcctaagtatttaaaatcatagaccaagaaaccacgctgctcatcatttccccaaaaaacctgtgccgtgatatacctgcaaaaaaagtatatatcttagtagagagtagtactccaagcatagaccaaagttcaatcacttatcagataccgcaataaaaatgaacatgcatctcaagttcttaacaaatcaatatatagaagctcatagatgagttgatcttcgtcttaaaaatatataaacaaattgattgtgatagtccaaaatgaattgcaaagagttataaaagtagcatcgagtttcctgcaccaagtcacaatagttctaccaaaaaaatatatatatgtattgaggaaagatgggcaatctatacatatttcatcattagggagcaatttcagctcctatacaatgtactctttgctctattattttactaagtgttgaaacaccatgtaataaaggaaatttatccataaaagaacaaaaggcttaccttcaatacaagccctaagtagcctaatgaaaacaatgatagtacacataaaagcaatcagaataaacataataaagtttctgaataataattccactgtatttttctttaaaaaaatgatgctttctcatgtcatcacatattccaaagctttgagcataaatatgttttaaataaccaaagtcttatatgtgaaagcaatactgctaaattgttcactaaaaatacttcatgaaaccttttttttttctgtaaatataaccaaaggttgatatgtgaaagcaacactgctaaattggtcactagaaaagtacttcatgtgacagccttctttaaattctacaaaaagaaaacatcaaagtaacatattccgtagagcatcaaaggcatcaaactaaatggaaccaagggagtacctgcaaaggaagagcgaaactcttctactaacaaaagaagaggccaaaccatttatgctacagaaaggctccgcagtttgtcacagtgaggtgtagggtagtccttggcccattggcgcctttggagttccacatgacagaatcttcccagcatgctcttgtagtctttaaaaacatactgctcaagattatctctagaagaacttcctcgtggaaactgctggtcgaattcttgtttgctgacaaagtactccaccccatgcttttcagtgacttttgatatagaaaagtagcttgtccttttaagggaatactcaggatgccttgctggaatgaaagcaaacaagatgaaaaacaaaacccctgcaaggtgcaccaacattgttaaatttatgcctgacccaccctgaaccggatgttcccgtctctgttgttgctgttgcctcactgttcctcttgctctgtaggcattgtgagactggaacatattatcatgggtcccataaaagaacgacctgaatatctcatctggatctaagtcttcttcataaccatagaagctacttcttgcttgcctttgtcgccttgtagttctctgcctcatgacattggaatactgataattaaactcatggtcctcaatggcacctgtttgatcataagttctccttgactgatcattgcttaggcacttgaaagccttgctgaccaacttaaatgcatcctctgccccaggagccttgttcttgtcaggatgaactttcagtgacaacttcctgtaggctttccttatctcttctacagagcaacttctctccactccaagaattgcataataatccttgttctttgtgatgttccgaaccactctaacattttcctcagtgtaacccttatcaacattagaaggaccaacagattctttacgcaaattttggctttcaccaacttcaccacttctagccctgtattggcgtacagcaccatccagggtatcatacttcttgggtgtgcccagcatatcatcaatcggaaggctggggtccaatctttgggcaattcgaaggaatttttctgctcgctgtctatctccagatgcaagtgcagtttctgcaagtttgacagacctcaaggcctcatctttgtttccatccatgcccttagtcagcctttttacaactggatcatatataggtaggacacccaaattgaaaaacttttgaacaaggacagattttcttcacctatgaagcagatatcattcaaaatcaatcgaaattggacttgatgccataatacaaatagccgagtaactctaattcgatagcatcttgtacttgcagtgacacaaaaatgatatctaatcagaaggtagatcaacccgagaaattagggtgtataaacaagtggtataactaagagtacaaaaactaaaccaacaaacttaggaatctctggtaaagcagaaaaatagccaaaattttgtgaacaaaagataacctaaatgaaacagattgccacaatgcatagtatggaactaccagagtacaacagaatgctttggttggataaaccaactgagcatggtcaacacaagtggcaaaaccatgccaaacaagcatgacttttaactaagaaatctatttacactccatttccacatgaaccacatcaacttggatattttgcttatttcactaggtaaaactactacgatggacacagttgcgctagcacttaaaatgcctacacctgcaagaaatatcacatttggaggaaagcattaaagaattaagcatcataaaggcattcaatgctgaattgctgagaaagaacttaataggtcttaaagaaaccaacaaccacttggatcaatgagcacaagaccagcttccctaggcataaccccccaatgtaataaagaaaaaagtttgtgctaccatcatccaggcagtacaaagtagtgccagagtagccgtttcagccaaatgaattcatcccagagaaaaatactcgtttgctatgaagttgaggcagatcacatttgccacaaagttcattggcatgtaaaaatccgacataatttagtgggaatcaactcatttgccacaatgccatgtgaaatgtcaaatttttcctcatcttcgttatgtgttaatctctctcctctactgccggcaaccgctgctccccatcttcatctagcacctagctccctctgctggcgcaccgcacacactttcctctacctccagcagccggcacacgctttcctctacctccggctgccggcacacactatcctctccttccagccaccaccgcaccccagctcagtttgtcagcaaacacacccaaagctccagtctccaccaacagacagctgaagctagtggcacgcgatagcgatcagacctatggaacactacacatgcttgtggccggagatgagctaagaggaacaagattggggcaaatttgcatcacctgtggcaaaggggtgtataaactattgaggaatttttgcaggccaacgatttcattcattgcaaatgtgattacacacatcaaccccttcgcgaaggaacaaccaatttttctcctatcgcaacaacatgaaccatcgaactagacagacaggctccacgtgtactgaaataccccgaatcgtcagccagcagcgaccagggaacacgatggactcctaacggcgggatcctcgcaaaaaccctaggttagggccgcggcttgggcgccgcctcgtgaccaagcaagaaacgataattccccccaagtcgcggcgagggaaagccaactaactaatcgaagatccggagcgggctctgagcccatctacggcgattaaacttaccccgggtcggagagatatccccggcacggctagtcggcgacggggagacgaggacgacgaggagcaccgccgcggcgccgccggagcggggagagaaagaggagagaactgcgcggtggcacttttccacggagcccctcggatttcctctttatttaggagcgcccatcgagccgagacgagagtgcgtgctggccgcgtgggacactgcgctgtggggcccactagctgtttgccgctgacgggtggggccacgcagccagcgcgaatcgtaaagcacgcggaccccgtctcctttttcatacatatcctcctctcgctctcgccccgctcgcttccgaagcttctcgagccctcctcctccgccgccgccgccgccgcctccgcctcgccgccggcgcagagtcgcaggttagctccgtactccgctcccctccccgaaccaagccgacgccgctgctggaatcctagtactcctgcgcgagttctagcgtgctctctctctctcccgtcccgtgccgttgcgtcctcgcgctttagttctctcggttgagcgagtgcgcgagtgttctgcttggttctccggtagatttggtagcccgcgatcatatctcctaggttttttttttccttcggttgagcggggcagcaattgaattcgtggtcgtcagggtttctgagagctggagatgcagtgctatgcttggtttgttttgctgtttgcgtgttatcgttacgtggcttgacgctacggccattgttggatttgtgcgtgctaatttagctgacttgatgtttgtctgtcaggaacgatgagccgacgcaacagccgcaccatctatgtgggcaatctccccggagacattcgcgagagggaagtggaggatctcttctataaggtgagccatgattacattacggattaggcatgtgtgtgccatgtaacagtgttatcctctagtactaaagtggtaggtcagtgcaaattttgttttggtatcagcgagtacatcgtaggctgcttttaggacttaggaggaagatatttgggggcaatactgctttcttatggaattataaatttgctatgttgggccctatggttttctgttgtgtggttggagcatttgttaaatacttcaatgtgaactagatatctaagttgcgtcttcacgcgaccataacctgtcttttatttacaaatatgataatgaattgtttgtaacagttacctatgttaaaatttaattcgtctagttgcagttttcaaattctacaattgaattttgttaaggattgaactttggagagtatttggcccaatttccgagcaattaggttgagatatagttttgcgttatgcatatcagtttgtttttctatttgttggttatggatatatctgtaggtgataggtattttttttatcttaattattcattctggatcatttctataaccgacacatctgaattttagacctgccagtattgtttaggacttttgtgaatatatgatttattatagttctattgacataaaatccatataatacacattattcgttatgtttattgggtctctgtggctatgtaaagatagtagtgataatcatttttatgtgcagtattttcactttatatggatttgatttcgctatatttattcatgtttgtaattgaatttatgaacaaattgagatagcaatcgaggtgtaagtggtggccatggatcgaagtactgacacgggtgatgttggctgaggaaatatatttcaacttgacagaagatttatcttaatatgagtttcacatcttgttagtaaaagagtttattttgcttttcttctaaacttgacctaggcgcacggagaaaagaggatggagtttgggcttgcagctgttgtagttaggatgcataccgatccaattaggcctatttatgtcaccgagttatacatgcaccacagctagagggtactctagaatactcctacatttttaacaactacttaagtttcatccaacggtaaagattgtttcgacttattttgtctttaagcgtatctgacggttcatattagtcagaagaagtggcacatcctggtttctttttgagatttacttttcacttggagagattccaccagtcggttgggcacttgggcacctctttgttgttgccatcttatgtggtgaactggtgataccgaaggatgttactggtagaagggtagaacaatggcatcttgtaattactaaattttctgatatctttattttcttgattattcatacagatagagtttaactttttttttcattacttttgcttctgcagtatggccgtattgtggatattgacttgaaaattcctccaaggcctcctggttatgcttttgttgaggtaagggattaagtatgttatggtgattacttgctatgagcacattttctatctagatttttgctcatctttttatatataagctatcattttatttagtcataaccttgttgttatttgaggatttttttttggggtctgtgagcaaatttagcacatgaaaaccgactacagacattagctttatcaaaatctaacccgaattggttgctattttttttaacttaaaaatggtccacactaaactggatagccaaagaaaactggacctttactaattcttttcgtatggtcaaaagttgccaaattttcataagataaacttcggcttggcgtgaaataaaacaacccctggataacaaactttagaggttctgttagaatgatgtgttaatatgaacccaggagtgttttgagctttgaataggaggtagcgaggtgggtaagcagagtgcttgcattctacccctgaatggacttcttcccaatcatggcaagaggactctaaggccggcaagtagatgcaagttgatgattaaataaatttcttggtttgaaatgaagcattctatggaagcttatatttcaggcatctcttagcaacccatgcgattagtttagagctgaaacaaaggaatatactatcgcaacaatttacccctaacgaactcctcaactggcttgcctgcttgcttattacaatgtgtgactacctctatataccttgctcagggaaaggaataggcaaatctctaaaatggataagctggcaagcacaggtttataaacaggagttaggtatgggttgtgtgatttgaacgatcaagtaacggatacaagacatagaccccctccaggtgcaaacattattgttctcatgctttgccttgctactacttctgttctttttatagaacattttttttatctataatcaatatatcatttttattatttttaggaaaagcagaatgggtagatcttggcgcgcgcgcgtgcacacacacaaaaataataataaaaaactggtttaagaatatctcgcttttgttatgttggacatgtggttctcattggaaactatgatgactaacgaaagtgcataggatgtgagcaaggggcaacttaagggttactatggaggcaagagaatggaaacacccaaatttgtttctttaagctcatgaggaatttgggggtgacggagactgacaaaaaatgtaggggatgagtgaaatttgacatacgatcaatgaatttttccatgtagcataaagacaaaggttagacaaacttgctttagaggaaacttaacaactagcctcaaatccagttttgccaagtgttgctgaactatctaaagaaatgcttgtcaaaattaaccttgtgcaatctgattgtacatatagcaccttagaggctaagaggacttgatactaactaaaagtggttccttatgcagtttgaagaccctcgtgatgcacaagatgcaatttatggccgtcatggatatgactttgatggccacaggttgcgggtaagtggatcttgcatgatatccgttatctttcttgagagaataccaggtggtgaagagggtagttcatatttatttatttttgttgcagcagcaaagaggatagttttgttctttgtcgtaatgttaatcttatacctttatttaggtggagttagctcatggtggcagaggcccttcttttgatcgatcaagtagctatagcagtgctgggcgccgtggtgccgctaaacgtactgattaccgaggtacgtacttctaaactcaagctttacaaacttgattggatacatcagtgttcttatttgctctattcatggaatgtgcagttatggttactggattaccttcgtcagcatcatggcaagacctcaaggtattgatgcagatgaactcccatacaattattcactcttcacgaatcttgagttttacttccattttcaggatcatatgaggcgagctggtgatgtctgtttctctgatgtttaccgtgagggtggaggttagtactgaacacttctatgctcttctgttgctgatattaattttggtatgaattgggcagtagtttgttttgataatacagcaaccatttaagctgtattatctttttccattcatgtttcagtagttcttacttcttaatactgaaatttcatgtgtttcagcaactattggaattgttgattataccaactatgaggattgaaacaagcggtaagtttgaattagttctatgcattttactttccagaagtgaacactgccatgtgccatctggaaattcatgttttggttggttcctttaataatagaaaaagggcactttgtgatatgccagacacctactttctccccaatcatgcatgttcttatcttcccgtgaagatacacctgacaagcagttttttgttaccttacagataagaaagcttgatgactcagagttccgtaatgcattttcacgggcatatatcagggtatggtcatactggaaatgtttctgcacttcatttaacctaatctcaagttgaagatttacgtactcatggacatgtctgttaaaggtgagggagtatgattctgctaagcgcagccgctctcgttccagaggtagaagccacagccgctctatctccagaagcagaagccgcagccgctcgatctccagaagcagaagccgcagttatagcagaagcaggagtccaaggtatggtttgaatctcataatgctcaaatgaatttgttatggtaacaacaacatgaatattattacaatgtgctgttttttccttccagatctaggtctgcttctcggtctcactcacctgtgaaagaaaggtatgcacagttccattttgattttgaatttttcaaagttaagaaactgagtagctttggcatgtgttatcttcatattggctattgaaaaactgcacatgattttttaagaaatggaccccctccaatgttgattattgaaatttgattatgtaattagcctatgttatcccatatctccctcaaataattgcaagaaaggaaatgtcgttaacttaaatgagtttactgctgttctctgcttccagatctaggtcggcttcacagtctcgctcacctgtgaaggaaaggtatgcgtagttccatttcgattttgaattcataacatattacatagtacatggaatgctttcgattcattgcgatggtgtgatactgagattctcggattaatactatgttacaaagttaagaaactaagtagcatttgcatgcgttatcttcaatttgccaaaaaagaaactacatatgattttctaagaacccctccaatgttgtacattcaaatttgattatgtgattagcctgtgtgatcccatatctatctctaataattgcaatacacgaaatattgtaaaatgaaatagggccggctctttatattctcatataatttgtcatttcctttctggtttgtactttaaatgttatgctttcgagatgcattttttcttctgtacatgcactttgagtttccactctctgatgattaaacatgcagaaaactggatagctgtcatttgttgaaaatttgctcttgtctttcctagatttgggacatgcagctatttgggttgcgttggtaggatattggatgcgttgagaaccaaaggatggtttggaacgttggatagttctgctggctagtgacatactgtatgacaagtggactacaaccagcgataggagcaagatagggctggctctaaacatatttggacttatggagtgcatttcgtggtataattgaagtactattgacttacgcatttctattctcaaatgtaaacctcggccttgcacccctattggttattctcaaacataacctcaccttaatgttgaagtttatttctaaattacactttctgatgaaataagtgtgtttagcgattagctctttaaccaatttgtgatctattgtggcttcaccttcatttggaggactcgtgattttacttataaggtctgtcatagtttttcaaaagatgacatgttacatgtacagtggaaaaaggtggtccctttacctatgctcatccaaaacacttctccacatgtttactgtttattgctctcaatctcatgtgtattgatgttaccatattcacacatattttgatcaaactgttgtaatatccctttactgagtaacaatttcttggcttttggaacattttgcagatcaccatcaagatccccaccccctgctacttctgtaagttttccaaacaagtaacttatattctataaatttgttccatatagtaaccattgtctcgtgcagcctcctcgtgaaaagtcagcaagcaagagccctgtcaagagcagaagtttatcccgatccccatctcctgtccgtgacattaaccaaaaactctgtatttttgtgagcctttaatatgcttgaagtttcccatattgatatggtcaatgcttcctttcaggtgaaatctgagtgaagatggatgcacttgaagcctgccagaaactatttcatgatttgtggagctgagtttcggaaggcagtagattgtggattatggtttatctgtttctgcgttaccattgttgttacttttcagaagagagccgtgttatttcactgttgcttggtcatgtcgtaatatctgtcagaaacattgccttacatgcttagcgttttacttgccatcaccaatctatcagacctcgtagcacatggtgctcgaacttcatgctatacatacagcactatgaactctgctatattctaaagctcaactatctgtagtaactgcaggaagcctttgcgcttcaattattgtctttttactctagttttttagagcttgtgcttgtgtacttgtatgcacctgttatgttgtaattctacagagtggttttcctcgcttaattgttgacatgttttgtcgttcggtgtaattgtgcgaccactgatgcgtgatatggtcttgctgacatggcttggcttggattggcttgacctaccctagtattgttggttttgtttcgttcaatccgtgatgaccttcgactttatcccggttgtcttgattggaagttgtcatccacggagaagacgctatgctcagctgactcatcccatctcgggtgtgtttggttgcctgcagtggactttacctcttttgttgtaaagtctatttttaaccgccaaacttttactttagttcaattttattttgaaaaataaaactcaccctagcctttcaagaccaggtgagttataccctaacagtccgtttggttggagagagtttttaggaaggattgggagtttagagagatgaggctattaagtgttttgtttggttagaagatatgggaattttggtgggatggggatgaggaattgaggaaggaactccctccttttcaatacctgggtaggggcagttaattgagagggaattcctcctttactttgtctaagtaaatcttagccatccgtttttattaatgacctaatctccaactaaactcactatcaatttccatcacatctaccaaacaaaatattgggattaaaaatcaaattcacatcttaatctcattatcaattcgctcgtgtaaacttccaatccccttccctcgagttaccaaacaagccataggtgattttcgtcatgcgaacttttttcttttttttttcatacctaaaaccaccatcaagatcagagtcggggtgaagtttgcctggttttggaagtgcaaacaatcagtttatttagcttagggcgaaagatagacttggtaaaggttcaagggttacaaatagacttcaaccttttttttcttcgactgttttttttcttcgactgttatgtttgtaatttctatttctagaattgtttcagctaacatcctgatccacaaggcagagccctcacctagctattatatcatagacatggattttgtttaatatcataatgaattcggatggggataactagctatatcatagacaagtatttcgtttggtatcaatatgaattcgaatataaataagtccatttgatgccctaatcctttactttgtccaaaactcaatctttcaatacagtgcatttaacaacctaaacttttaatacagtgcatttgacccctcaatctttttcacttggttttcacctacgtgacgctgatgtgatggtctagccaacatagaaatcataggtcatatgtgttattctctcgtccctttagtactagctcctctagcttcatccactggtgatcatgaaggcaacatcacatagtgaatggtagcttccaatggctttctcgatagtagaggcttcaacaacaacgccatgtttgggaccatgatcatcccccttatcgctgccgccatgaggacaacattagggcagcgccagtgctaaatccagaatgtggagctccggctgattggaaagggaggtaccttggcatcattgattactcggctatcctcctgtgggttctagaaaatgctgagattaccgccgttgctctatcagctgggtcagcaaccgtggcaggagttggaatgggtgctgtcggtgcagtgggagtggcagcattgggtgcaagtagtatagatggccataaggcccgaggcctgatggcccggcccaagcacacacgacccgattggggtcatgcccgggccggcttgacctgatagctgggccatgcctgggccgatgccttggtacggtgggccggcccggcacggcccgatccaatgaggagggagaaaaatagttagggactaacattagacttaatgcagccatataattcactgcccaagagagaagggatgcaaatagacttattaatcattcagaaatggcccaaagaaatgagggaaggaaattagacttctttttttacgaagaagcacgatggactgtcgtgccttcgagccggcccagcacgccccgagtcgtattgggccgtgcctggctcgatgcttcagcacatgggccgagagggcgcagcccggtgtattggtcgggccatgccggcccgatagattctggcccgagcacggcatgcctgggccgtgccgctcagatggccatctataggtgcaactggtcctgcagctgttgctggtttgactgccgctgcagtaggggctgctgttgctggtgggttaacagcagaaaagggtgtggcaaaggatggactaactgctgctgatcatttaggagaagatttctacaaagttctgcttcagcaagaacatttcaaatcaaccacagtatgcattttactctatcatgaattattatgcatatttggcagtgttttttttcctctttgttaaatgtcgatcatttatagagtccagtcagtctcaaattatttgttatatattctaccctgaaccactgttctgctgtgtggctacaccgaagtttggctatcctaattacaatatatgccgcaacttggcatgattaaaagcttcctgtgatttcttagctgcaacttattgttgctaataatagtttggatatctgtcctcttcgcctcagttgaatattgcatgatgatcttctgatgtaaatcctgctaaccttcattttttctcattattgtaggttcgatcaattgtagaatcctaccgctggtctccttctgtctccattacactggacacttccatgcttactgtactaccgttgctaccgaagtacaggttaaggaatgtcccagtgattgagcctgataagccaattactcactccgtttcaaaatgtttgacaccattaactttttttagcatatgtttgaccgttcgtcttattaaaaaaatgtgaaatatgtaaaactatatatgtacataaaagtatatttaacaatgaatcaaatgatataaaaagaataaataattacttaaatttttttgaataagacgaatgatcaaacacgtactaaaaagtcaacggtgtcaaaaattttgaaacggagggagtattaattaagaacttcattactcatactggtgttgttaaaggacttcagcagttgcaaaggaagggattggtttgattatatttcagcactccctctctcggacttgggacttccgtttatgtcacttgatgaggttattgcgtctccctaatccaattctttactaatgagaaatcatgtcccctacattatcaagataaaagttatatctcaagctgaaatgtacatttttttcacttcactttgcaatagattggtaattgaacaatgctgtgctttcttcaggttatcactgctaacagtggtgatctaatcttttaagcttttaaggacaacaaaattggtggtgtgcctgtagtagaaggtcccaacaagtttcaggtatcaaaccatccgactatttgttaccgcgtgagtcattttttaaattttgcatttccatgttcctaatgataaatcttccatacatacaggcaacttactgtcatggagttcatgaagaccataggctccaccgttcttgattcagggaacggcctggtgaagccacctctcacctgttcgcctgacgcttctcttggcagcgtgattgacagcattgcatcaagaataacccaccggatatatacgtcgtggacggtgacttcgaggttgttggtgtcgtgacactgcgagcacgagacgtgtgatctcttgctttatctatgagcctcctcgttattgtgacaactatttggcaccagccatggataattaagcttgaggacaaaggtgcaggttctgtggacacaagttgagcctttttatgtaacgtgaacaccaaaataacagactgaattagggagcatgcagtagcaacactgatgtattcaggtttaatttgtggtgttcctgcagtgaaagtgtgtagaacaagagtgatgctgttactccatggtctcttaatgtagtttgctttgtgttacttaattcctatatagggaaaagttaatatatcctcagtaaaagttcatctaacacctcatactttgaagtcagataaccaactctatcaacttcatagtactgttcgtataaccgctaaaagtaacttttatctaattattttattcggttttatctaattttacatgtacaatagatgaatttagtgacgtgacactcccactatccgaaaataactctatttttagtcttgggtgttcaaactaaggtcgagagaaaagaccaaagtctccttatcaacataaaaatagcattccattctgatgaatggatagatagataaaggacattgaaggagtaaaacttaaaacagtattgatgagtagatagataggtaaaggtattgaaggaataaaacttataacaggataaaagtgaacttatttttcatcaacaaaaaaacagtattacgagtgttttagaataaaaggtataaaagaaataagatttataataggctagaaatgaacttattttagaataaactgttcaggttagaaatgaagttatctttggaccgaggaataaatatattcaagatatatgtcaaattctcccttagactcttttttacaccaataacggaggatcgatacaatgacaataatcgaggatcaaggattaatgaagtgaaaatttatcatctttgttaaccaaaaccttattaagtatctgtatacggaaatcagcatgtccaaaacaacctcagaagttatatgaacaatattatgtagtaagttgaagcgtttaggttagggtgttagatatgcttgtatccaaagttatatttgtatgacgttagaacaaactgagattgtgtgccttcctcggattgagatccattgacttacttccttccaactttgagtcactgacatgtggatctactctgtcagtgacctacgtcagaattaagtagaggatcctcttttgtcttcctttttacccagagggatccgtgtctatccctccaagtactaatttgttttggggtgaatcgcttgtaaggtccttcaacttatactttaggttctatttggtcctgatattttatattattcaaaaagactttaaagtttatcatgtaacttaatataatccatatacccgctaaaaacgataacttagaatgccgcaccatacttgccttgcatacatggttaaaattgatattttgattttatccttacctatgccaatttttttaagaaaaagagaaataaagagaaaaggagagaaaaaggacaaatacaaatgtagtaaagacacaaagatacaataatcattatgttttgccgtttcctttcttctttcttatttcatacattcttcaatgcggtcaggtaaggagagcactccacacgtccacatccgacgcctggaagggtgtttcctctcccaacgcattaaggctttatgcattgtgcataaactctacagaagggtatcaatgtcattttaacagtcatgcgctcggtttacgatgatgtcctaatggtttacgcaaacaactccaaccagcaccagtacccggatatcctgccagacgatatggtcaccgctgtcgccggagaagatagacgttgcacatggtttacattagagtaaattaatatagttatggtttatgctaatagagaaggaccatgggcaacgtaaaccatgcggtgggagaggatatggtcaccgccgtcgccggataagatagacattgcgcatggtttacattaatatagttatagtttacgctaatagagaaggacctgccatggccgctgctttatttagcgtttatagaggtagaacacaaggtaagttatatatgtagtttaaatgaactttcgtacaagatccggataagtgaatggttattcgtttatataaattcctacatggttacgcaaaaacttattgcgagttacatagccacagcagatccggactaaatgaatggattatgttctattaaataataatgttatgttgtgggtcagcctcacaaccagggtttgtaaaaattgtattttttttaaataaaagactgaaaagaccctgcaattcatagcggatggcccaacagaagtacatgaaaatagcccatctgcgttgtactattttactactaaaacccttacgttttcataattatgctcaagtttttacatctgtattccatttagcaccttaatatttttaggatttattaactactgttagatattttatttgatacccatagattgaaaggtaattatgtttgaatctctcaaaggtaattgagtaaatcatcatgtgactctcataggatctaccacaactactattcatcctccttggaacatttaaaaattggattacgccaagcaggacgacaggcagggaatcagcccatacaccaaaaaagatggattatatgtcaaggacaacaagggttacgccaagcacggaatcaacccatacactaccagctgctgtctacgccaacaagatgagagtttatgctacaaaatggtcaaattccaaggtttgtacgcgcacgcgggcatcgcgaggtgccctacatggtacacacccacgtgtggatctcgcgcgtaaacacatccatgctacgctcgaaaggttaatgtacacgcacgaaggatgagtttacgtctacgatccacgggcaggcatgaaccatatgtaggcaactcgacatcctccgtgtacgcaccaccaattacgcctacgtggggaaaccacatccatcctacgttcacagtgtcgttgcacgcgagacgcgacgtacgtgcctgaggcgtcgcaacactctgttgtcgctaatcaaaggacttgcaactatgcaatgagtagtatactagatatacgacgaagaacactgggatgcgaaagaaaaaaactctgaagtaacatctaacgataacaactccaacacttaacatggagatacgaaagaaaaggaagtctgaagcaacatctaatgataataactccaacacttgacccctcccccagcccagccagccggcacccattagcccattaggcccagcgtgcaagccaggcccaggaggtagggaaagaggccacgaggagggcgcagtcgtgcacatatgcacggtacaactaagggccgacgtgtcgatttgacgtaagccgtgcgcggtttacacgtacgcaggcatcgagaggtgctctacatgtggggcaggcgtgaaccatatgtaggcaacacgcgatcccccactcccccactccctgaccatccatgctatggtcgattgctcgaaaggttaatttacacgcacgaaggatgagcttacatccacgatccacgggcaggagtgaaccatatgtaggcaactcgcaatatgatcccccgcgtacaccatttacgctctaaaggttcacgtcaaaaattccccatttacgcatacagatgaatgggttacgcaccaccaattacacctacgtggggaaaccacatccatcctacactcacggtgtcgttgcacgcgagacgcgacgtacgtgcctgaggcatcgcagcactccgttgtcactaatcgaaggacttgcaactatgcaatgagtatactagatatacgatgaagaacactgagatgcgaaagaaaaaaactctgaagttacatctaacgataacaactccaacacttgacatggagatccacacgaggacacggtttacatgtacacggatgatcgcgagatcaggtgcccaacatggttcacgcccacatgtggatctcagacataaacacattcatgctacgctcgaaaggctaatttacgcgcacgaaggatgagtttatgtccacgatccacgagcaggcgtgaaccatatatagggaactcgcgatcccccgcatatgcgtaaaccttcacgcacgtctcgcgcgtacaacaacactgtgcccgaggtgtgtgcattatgcctaagtcgggatttcggacgtaaacacgtacatagagcgtaccgcctacaacacggtttacgcgtatgtgatggctgatatgctatttcgcgagtcgtgcgtgctctacgcgtacccggagatcgctaggtgcctacaaggttcacccctgtccgtgcctacaatgctttaacgcaactcgcaaaccactgtacgctaggcgtttacggcatacgtggatggtttacccacacgatgggattgcgcacataaacaggcacgtcgaacgtatgagtagaatcgatgtgtttacgtccgcaatccgaggacggtggtggcccgaggagaagaccttgacaaaattataaactatatatatcacattttcaatattttggataataataaggagctaacaataaaatcgatgatgtgtttggctcctaatagttgaaatataaaggactattatataaaacaagccaaaatgggcttcataatggactgccattgggatttactcctatcgttattcagtacacggttgagaggattacctgctaaatttaggtgggcctagcccaccataaatattttttcgttctcacagcatatactagagaagtgctatcgatcttatgtggctatatactttgtattttctatttgtagaccaacgtaaaccgaatgtaaccccaatcgcttggttttagctaggatcttctacatcagatcatttgtaccactatttacgtgtgtcgatgcaatggctttctctagacacgatctacattagaggcgcgatatagagcgtaaaccataaaaactagcacgtaattgaactttccactcgcctcttagctttccggggattcctttgtcctctctaacgaactctaacactgcgtacgttccttcggtgtggaatcacgacaagagtgaactaactattagagtttacactggtgtccaaatgaccgtcatacccctcggataaattaaccccattatttactcagctaacaggtggcgctccctcattggttgtgcctacctttatgcagctttatgctgaccgcacttaagaaaagctcttcttattttctatggtatatataaggtagaatgaacattttgattttaactatgtatgctaggatgatgtggcatgtatgtataacagtttcggtggatcagagactatatcaagtcacatgataaatttagaggtttgtttggacaatataaaataagggattaaactaatctctactattataaaaattgaagatgtttttgccggtattttagtacatcatctatgtatgagtcggttttttaatacagaaggaatcatataatagatttgtttaaaaaaactcgcatgctagcttgagacgatcggtcaaaccacctgctaactcctcccaccacccacctcttctcagctgtctcgcagaacagtgcagtaacacgacggtcaacgtgcagtaacactgcgtcttatgtgtagtaacagcgctcaaatattgttaacatatagtcatgatggatctacttttgataagcgttttttttctagcatcatggtgcaaacgattttaaaaaatagtacatcatgtgagagatattgttcttcaaatcttggcttttttagaatttgactctccacaagtagtaatgctatagcattacttgttactactgtcagttgcacgttactacaatcccatcgcatcgttactgtaagagtgcagtaaaaattataagtttttgcagtaactgtgttttactgcattttttggatagtgttactgcataaacatgtggtgacatgtacttgcctttgcagtaacactccacttttgtgtagtaacaaatatatttagcatgtgagacattaacctatatatcctccacatgcagtaacactatagcatcattgtgaaaacagttttaaaaataatatatatcttgtgagatattgcttttcaaatattggcattttgaactttagcactacatatgcagtaacagaatatgtaatttgtagtaacatgggtatatacatgcagtaacatggttttaccaaatgtataaaattgttcaaaacactcgtacatcaatcagacctcactcaaagccacctacagactttacctatagcccacctattcgatcttcatctcgtaaaactgacaaagtaaaactacgattatcgtgtagtaatataactacttggaagtggtaatatgcacctattatgtagtaacacttctacttttgtgcagtaacaagtatatggttagcatgtgagactttaacccatatatttttgtttcgattcctggtctactacaattttactacgacgttactgccaaaagtgcagtaacgtcctacgtgttctacagtaacgtcacgtgttactgtacttttacaacaatgttactactggagcatagtagcatgttatgagtttcggtagtgaaagatattagaattgataatcatattactttctcacaaaattcttgaaacaaatagcatcattagatgaattggttaaaagaatgtgctttgaactatgaggtcatgtgttcaagtcttgaatttggcaatttattttttatttttctagaaaaagagaaataatctttcagggagaaaaaaaacagaaaaaagaaagagagagagatcgggaggagggagggggaggggaagcgagagagagagggagggggtatagaataactattctatactcgggtgtagaatagtcttaccctctatatatatatatatatatatatatatatatatatatatatccaagcgaactcccacagtgaatttcatcttaactaaaccatataataataataagattaaaatagacctcatccgttgcaacgcacgggcattttttctagtcatacaaaaaattaagagaccgcattggctattcactcttgttgtggaagataaaactgtgcaagcgtaagtacgtgcgcaacatgctagtgatgccatccccggttgctcacttcacagatgtaggatctgttttgttctttgccaatatcaaattttgggcaatagcaagaagtagtggttaccatttttttttggtaaagatgtactttatcgactaattatttatccatcaactgaggctcaagtaatttattgattattccaatgattaatgttctagtgcgatttttttagataatatggttcaatgtaacccttcatgaagtataaataaaccacttaaaaaaataaaacacccaataaaaagagaatctcttgtatcatagcagaataaaaaacaggacatgcacaaacagagccaaagggaaagtgcaacagctcatatagtgcttaatatccataacaggatatggcacataaagtagtaccatggatatgcatgcgtataatgttgtaagatctgatcttagaaggaaacaaactggataaaatatatctctatcctctggccggccactgcatgcgctaatcatcctcagcccatgcaaaccaacgccaaacctcacttcatgtgaccaatcagcacgtatagatgagatagaatccaaattcatctcggtcacctcccttaacgctagcacagacctggctcctggttatgctttttttcagatcaacaccagaaggctttgattgcaatgaaaaatacaagaatccatatcatgtcttcatgttgtcaagctattcactgtgcatccttgctgttgtccatctaaaaccatgcatccatcaagcaccagcagaccaaagaacatgatgatctcatcaggcgtaccatctgcaccttttacagcactagcccaaaatctcatatacataaatctaccgaactacatgctatagttctctgctagtaactatagcaaataactgatacttctctgcacacacgcacacacgcacgcgcgcgcaacacacacacacacacacacatatatatatatatatataggatacccatatatatatatatatatatatatatatctaactcttgagcaaaccactcaacacttttctaaataaattggcttgcataaatagactaactaaaagccaaattatgatacaaacaagccgctcaggttgattcttaacacagtgtataacatcctttttttcagaaaaaaaataatttggcttttacttagtctatttttgcattgtgttaagaatcaatttttagttagtctatttatgcaagccaatttatttagaaaagtgttgagcgtataacatctttttttcagaaaaaaaataaaaaaaagaatttgaaacctatttaattactaccaaaacctaccaccatacccacaaatgcatgatcaaaatgtgcctataatctggtgaagggaggtgtaggtgccaacaacattgacgcacactcctatgaccagtatcccgacaatcatcgtcctctcgaagcagccaactcctcctcgggacatgtagatcttgagatagctcaggcacgggaccagcacagcaacggtgacgttcagcgaggacccgatgaacaacatgagatagccgaagaagggcaccgtgcatgccagcaccactgtgctgatgacgacggctatgctggtgagcaccctggtcaaccagttattctcaacgtccgtcgtcgctgacaacttctcctctatcgctgttgtgactggctggatcacaagcgtgtagttcgccagcggggtgatcagtgtcgtcaggatggcaaacctggtgtacagcttccctgtgggtaagttctgtgtcacctgcgactgcacatcctcaccatagatcagatatctcaacactactgtcactgcgtagtttaggctacacaacaccgacgagatcaacaaaacctgcacattaattggagagtaatagaacattattggagtactgatccatcatcatcatcatcatcatcatcatggtttcataaaccaaattatgataattggaactgataatccatgatcaattatcattggttgccaaatccctccaagtgaaaggtaaaacttaaaaatgcaacatcattgagcaacatcatctgaagatatggataattgaatgcaacgtttgatcaatatctatcgttagatcatggatatgtatcagtaaaagaatggtgaaaggtccaagattgttcaagaaacttccatgagttaatggagcaatagtcaatctcctaccacttttgcatcttatccctaaaaattctcatacctattggttgagtctaaacttagtacaaaaatatatacaacacaatagatctctattttaacttggcatagaaaagtttatgatgcagcacatcttccaaatttagatatgttgccttttaatttatctaaaattgtattggactatacataaaattacttaaaaacaaattttgtaaactatgtattcaaatagctaatataattctttcgttttaagtgctagacacatcttctaactttaggtttaacatacaaactaaataacattaggcggcacatgattagctttatatttaagctacattgcttttacatgggtgtgtatgagtggtaaccaaatatagttgagaggcgaccctaattgcctccagtcaccggtttattccgctggagtgataggctgtactgtagcacagtacaccttcatgtcaccgcacacgttaaactggtcgaaaggccaacccaacattacccaaaatttacgtcattatgcaaaaaaaatattaatgctaaattgtgaatattgcacttgcaattaatttcatattgcacccgccattctatatcagtgtaaattaacattacgaaattgataactagtacaacattttttttagggatggaacaactttttttaataaatcattttaatgttgatttcatttgatcttaattcttaattttaattggatggtcaaaataaacttattggcttaacttttatttgcatgatgtatatacacctgctatatgatgggagtgccaacaaaatatattaagtatgatgagaacgtagcaactatgatgattaagaggtgtgcaagtatagtatgcatgattattgatgtatgagttctaaaaaataattatgagtgtgcgcgtcttccatgcatacatgtaataaaaaaacaatatgtttgtattcttactaaacctgttgctaatttatttccaccatttactattcaattttcattaacgataattctaaatttacattgttagttgttatcataaattttaccaaacttactatcaagttcaacacataaatacattttaaagtgtaccttaggaaaatccttcttggacttcattgaggagtacacggtcgggaagacgccatggccggcgaagcaaacgaagtagagggtgagggcggtgggcaacccactcagattcaagaggttgttgcccgccatgtggaagcccttgtcgggcacgccggcccagaccccgtcagcgccactgacgagatgagcccgactaccgagacataggtgagcatgctgaggttcttgagccacgtcatcgggaggatgacggcggccgtcgcgagcacgaacagctgcttcccgtgcacttggtaccctaggatctccaccaccgtgctggggaggagcttatcgaggttgtcgccctcgaggatgaggaagctgatggcgacgaggtagagctcgacgtacatgacgaggccgatggtcgtccagccgtaggcgccgaaggcgaggtagccgatgtctgggtagctccgtacacagcggtcggcgcacatgcagcggtcgataaggttgccggtgtagaagcagatggcgccgaccatggcaaagagcgccaggctaagccacccaccctgcaacggcataaccagaaatcacattgctaaagttgaggcagctcctcctgaaggaagcaccggtgatgcagaacgagacgccgtcggtagggaagagttgctgctccatgtcggtagggaggaggagctgctgctccatgtcgcaaatcatatcttcttctcgtgtttgctatggaggagagcctcatcgatagggctcttatccgccaccataatccccatgtctgtgtgtacacctattaaaccaaaaatcacccgacagatttttaaatcaaaaacacttagatttttaatagttacataatacacatatggaaatagcatgtataacttatcatatgtatcataacacataattcattattaaagataaccttatagttaaaaataaagtgcaacttacactcagtgaaaaatagaaaaaaataaattacatacaaatctaatagagattacattgtaatttaggcctggtttagttcccaattttttcttcaaacttccaacttttccatcacatcaaaacttttctacacacacaaacttccaacttttccatcacatcgttccaatttcaatcaaacttccaattttagcgtgaactaaacacacccttacaatgagtgaaaatgtaattattacaaattacactgtaaaagtactatatttacactgtaatttttttcctcgacttaactcctctctctctcatcattaccaggctttcatgccctgtatgcttttgggcaaagtgaagttgacaggaatgagtacactagacgattaaaaacaactttaaaatatttaattagtgagagacaaagataatcagtcatatgcatggttgtacaataccacgtagtccagcacacgcgagttaagagtttcgtgggagcgctgacacaaagaggtcacggatctaaagtttcgattaacggttgaaaaatcgacaaatcttaacggaaaaatttgtcgaggtatttttagcttaattgattattaattgagagttgagatgagatctaatttagaatgggcagaatatgtgagattagttatatgttgatatatcttgagtcgataattcatgagcgtaactaactggggcgctagatcaagctccaactcttctgtgctcatttgcacttcgtggactcgtacaattggtaataaattcgctttttcttctcctattttgtgtccacggttcaccattacgtccacaaccggtagagacttacatatgtaatcttgggacttacattgtaaatacactaaaattacatatgtaattttgagacttacaatgtaaatacatgttgactattttttcatgaaaaatatggcggaataaatatagatactctcaattaataatcactttaacgcgcggcagcatactgctggactgagagagcaaacaaaataataatctatctattattcccatgctggttgttttgccgcctgcctattggtccaggtggcacaacgcttttctgatgcgtgtacgatgctgcctatacacagttgtgcatggctcatgtagcatcatgggccaagtgccatgcacgattgaatggactaggtaggcccacgtgtgaagaaagaaaaaaaagaaaaagattgatctatcactgtacgtattgatttggttgcttctgtttacaccgtaattttgacaaattaatccttatattaaaactttaaaaataaaccatgtcaaaaactaattaaaaaaacagaccgtgaccttagcgccaaccctaatgacactaaactaaaacatctcagcaccacccaacatggcacaaattagccatgtaaaaggaactcaacgtcactatacattacgatgacctcttaataggtttaaaatatatagcatgtgctgaaatcctgagtagtgtttaactttattcgttttatcaaaaaaaagtgcctataagtaataaaaatagacaaaacaattttaaaattaagtagtgaatttaaatttatacaagtaattcatagcacatactacgaatgcatatgtaattttcaattattaaataaataaaccaagattagtattgctatgtcttaaacatatggtaaaggttaacatatatactttagagaagtgctctcacgaattgtgcttatcgttgggtattcttgcaaaacgctgttaatcctagaatgaattcatactggtacatgtatgtcttcctgaaaataggaaaggaacgtgcatttttttcaaaaaaaaaatatatgttcaatgtgttcaaatacaaaacatgcaatttcattaaaaaaaattacttattaacccaataaaacatagctagcatatgttaccactctttctgcaacctttttacaaacacaaaagtaagaaaaaatatttaagagttttgtggacatgagactgtctatatgacagccagctgaatttttgggtagtatcagccgaattttggatggtggaatctttcctaatctgacacgtgttaaaaatcctaatgccgcccaaatctccaaccactggttgacgtgtgtcacgatgagttctattttgagcagttaattaatgggtctgtcattgtcaatatcagttcaataaaactctgttgctcaactaaaatggcacgtcaactattcttaggttatgcggttctgctatacattacttcttctgctacacatcatacatccttttcgttcaagttgaccagctttatatataaaaaaacatagtaaaacttttgacatgaaataaatattatttaaaaatatataaaatgatggatttaacaaaaaaatatatgttttatcaaacttaaaaaagttggcttaacccaaaacgtccaaacaactttaagtttggccaaatatatagaataatatagtaatattttcaacataatataagtatattgaatggtatatttagtggaaccaatttgttgttgtaaatgtcactatgttttttataaactttgacaaacttgaaaaggtttaaacaaggacaaacccaaaatgactgaaaacacatagggagtagtacttaccgaaaaattatagttttattgcttttcactatctatcagccattaagtccattaagtaaaaattaaatttttttctattaatttcctactgtatagtcctcttcagtgcacacatcgcaattatcttcacctgcacgtgcttccaatctcaaaattataataaaataagagaagggcaaaacaaaaggaaattaaccctcgggcaagagatacgtatggaggtagagtcacaatgaaggaaatgaaagaaattaggttgttaaccaatttttcttatggaaacataatttttaaataaagcatgtttctctaaattttacaatgaaacaagcgatgggcagattaagaaaaaactagtgttcccaagtcagtgacggtctggcggattcagcatgggtggccccgctcaaacccctcctacctagttggatcaccatggagagcaaggagagtgggggagaaaaagaagagtagagggggctagagaaaggaggcacagatccccctctaattcaaagctagatcatacaaaacacatggtcctaatctacatatatacggcattagaatttgcagacaaaacaaagagtatggtgaatggagacaaataacaaaaaagggatataaaacgagcatactggtagggttaggagaaggcgcacacatgcagggaggaggcgccattggacggaagaaagggatatatacacctttcgttttgtaattatatgttgagttccgttccgaacttatatcagtatatcagtcaggtacttcgaacttaaaaattggtagttgttttcgttggattactctatatacctaataaaaaaattagtaaggcttccgtgagtttttttgtccgtcgtttttttcgctctttcttccttcttttttcccgtatttcttttttttccgtccggccttttttcgttttttttcttttttttccatgcgtcccttttttccgccgttttcctcttttttttctatccacttttttttcgacgtcgcttcttcgggttttttccgtccgctttttttgtcctttttcttcttttttttttgcacgttttttccttcttctggttttttcatctgcttttttccatctctattttttgtcactttttttggcacgcggtgaggattcggtttctaatccacttggtttttttttcccattgccaggatttaatctcaagctgttgtcctggccaaaccctagcgccaccgccacagtgatatgcctcccgtgcgtttcctactataactgattgcaaaaattgattccccaatactccctcattatttgatttcctcttaaaattcggctttacatcactagatttaatctccatttaacagtcatcattttcccataatttccccttttcaatttggatttaattcactagatttaatcttcgtaagccggtgatcttccccttatcgtttttatcccaagttttgtggattcgctctgatttgggaaaatctgaaaaaagagatactgatgtttctgctgttgtatcactaaaagatgtcttttcccgttgcaacgcacgaccatttttttcttgtcccatccaaattacaggagcaaggaaattacgaaaaaaacaagtatagaaggatatagcagaacattcagggtaactggccaaataacaacaatagggaaaaaagagaagaaattatagcaacgtagctaatttctcacctctcccaccaatttgtagatcgatggcggccacggcgcgcgcaccgcctacaccacaaccgcacgcacgggagagatataccggtggagacgcgcgtgacaacaatgacacggcgagctgtggtcaggagctctcactagcgggggttatggaagaaggttaaaagaaaatagcgggagaggattagatctatatatggaagaaggttaaaagaaaaaagaaaggaaggtagggttatgtcacgtcccaaaacgactctaaaatacatcctctaaattatgcctagaataattaaaaaccgtgtgaaagcctccaacaattaaaatgtgcaaagttaaaagtcaaacaaggcttagaggatttttgtatatttcctaaaaagcctaaaatatgtaaataaattttagtggaattttcagagcacaaataataattgttaagaaataaacaaagttaaaaaggttttataaaaagaaaaaccctaaaatccctccttctctctaatgggccaacttcggcccatctccctccccctctctctcctctccccgcggcccactcggcctctccccgcgcgcgcgccgctgacgggtggggcccacccgtcatccccgtcctcccgccgctcccgccgctccgcctgcgccaagcgccaccgccgccgccaaatccgccgcatcccgccgtccccgcgtgcaataaagtgggggaaatcactccccgtgatcccctctccctttccccccatctttccctctctctctcgcgttcaaatgggcggatttgcccccgcaaatctcgccggcgccattgatggcggccggacctcccgcgccggtttccttcccctccggccgctctctcccccttccaaccctatttaaaccctccctgcacctcctccgtccgtttccgcctctcgccgcccttcctccttgccggattcgagctcgcgacgtcgctctctctctccgccgtcgccgccgagctccggtccgccgccgtcgtcgccccggaccgcctcccacctcggcgccgcctccttcgggttcgccgcatcttcgccgacctcgtccacctctccgtttcggtcgccgacagccggaacgccgtcaaccccgtcgacccgagccgcgccgccgcctccctccgctccggccgcctcctccgtcgccgccgtcgcccaggggtgagccgtggaccgtcgcctcctttcctccttccctcccctctctcggccgccgctccgccgcgccagtggtcgccggcggcaaccatcgggacacgggcgcgccgcctcccgccgaccgcgccagcgtggccgccctcgggcgcgccgagtggctgccgcgtggggcccggccgtcagccgcccacgccctcgggtgcggctgacgtgtggggcccacggcgccggccggtgtgagcccgggtgcacccggtccaccgtggaccgtaaggctgccgcgtgggccccactcccgtggacccggtccccgcgccccttcccctcggctgacccaataaaccctttttaaattaaaatttaaatgaagaaattcgtaaatattcatttaaagagcatataaacttcaaatggccataacttggccatttgaactcgaaattggaccattcaagtctctaatttttccttaagaagtcaagaacccatttttgtgctttgttcttgctggttatatggagtttattagagtaaaagccttttcttttccgttggtcgtgtagacgctgcagctttggaagatccgctcttcgtggaggttgaagccgacgtttgggaaagcgagcaaggcaagtcacatcatccttgaacatattgaatcccagtttataaaattattttgatttaaattattgcattatcgctttatttaaattcccgcgttatcattgttttatctagtcatgcctatttacttttgttatgaccttattattgttattgttattattaccttgttcaccctagaataaacaaaaccccaactagtggacactctactcatggtaccactagtatgaatttagttagatgcttcgccgcttaattaggtaacattaggtggttttacaactctagactttgggatattcatatcacctggacactacggaatggttggattattgtggaattggattcacacctccccctctattcaaaatcctcaaaatggttttaggctgggctcggggtgcatggttttgatagtagcacctcggccatataaggaccggtcttcgggcctctattgcaaagcactaccgtactttcacatgtctagtgggtaaggcttagtttgtggctcagtctggttataaacaaaagtacacggatggagatggacgaagtcgggggtcgatggacatctctaggacaaatgaatgctacacgagctgcggcctggtagttgagatgtcatggcacagggccggtgtcctgctgctaggggctcagtcctgcctacctgtcccgggggttccggccgtaggtggggttgggtcggtactcttgtctatggctaggatgggttggaaactatgtcacgtcttccgtccgtataccgtggtggtatgtggcacgtggttacacgtgaggaagatgtgtcttgtgggtaaagatgtacacctctgatcagagtataacctattcgaatagccgcgccctcggttatgggcaagccgagcaatgtacccaagttagtgttttttaattcttaaaacctgcttaacaactaaaatgtggaatggttggcctgggttggcttgggacgagctgggacccagggtcgggtttccagttcggtctgaatcatagtaggccttacgttaaggcaggttcgtgtgggttcacggccttgattaataatcttgtatagctctaggatcgtatttacaaaatagctttgagcaactaagtgtcttttaatgctgtttactgcaaaccctaacccttcatactataaccccccttgtactcccttgcatttattctgcacttgtgggtgtgtcttgttgagtacggtggttgtactcagtcttgctcaatttttcccaaactcagaagaggagttcctggaagatcaaggctttggtgtctagctcatgcctgccgtcaagcgcctgtggtcgtcgccctagtcttccgctgtttcccgtttgtctttgtgtgtgctgggccttcgccgcccatgtaataaattaattatttacgcttccgcttgataaactctgaaatatatcaacttttgggtgtaccttgcttcctgggacaaggaataatacacgcacgtaaggaacgcccgttgggttattttcggtcgtgacaggttaggagaaggcgcgcgcgtgcgggtaggaggcaccatcggacggaagaaagatgatatatacgactttcgttttgttattatacattgagttccgttccgaatttctatcagtcaggtacttggaacttaaaaataaattggtagttgttttcgtcggattactctatatacctaataaaaaaatttgtaaggattccgtgagttttttcgtccgtcgttattttcgctctttcttccttttttttcccttctttctttttttccatccggccttttttctcttttttttctttttttccgtccgtccattttttccgtctttttcccattttctttgcgtccagttttttttcaacggcgtttcttcggtttttttttccattcacttttttttctgtctattttttagtcagattttttgacatgcggtgtggattcggtttttaatccacttggttttttctgtcgccgggatttaatctcaagctgtaccgccgccacattgatctgcctcccgtgcgtctcccgtgcgtttcctgctctaattgattgcaaaaattcattccctactactccctcatcatttgatttcctcttacagttcggctttacttcaccacatttaatctccatttaacattcggcgtttccccataatttaccatttcaatttggatttaattcactagatttaatcttcgtcagccggcgatcttcccctagtcgtttttatcccgacctttttggattcgctccgatttgggaaaaactaaaagaagatatactgatgtttctactgttgtatcactcaaaaaacgtctttacccgttgcaacacacgggtatttttttctagtcccatacaaattagagaaacagggaaattacgaaaaaaaaaaacaagtacataaggatatagctgaacatgcagggtaactagtctaataacaacaatagggaaaaaatcggaacgtagctaatttctcacctctcccaccaatttgtagatcgatggcggccacggcgcgtgcaccgcctataccgccgccgcacacccgggagagatataccggtggagacacgcgtgacaacgatgacgcggcgagctgtggtcaagagctctcaccagcgggagttatggaagaaggttaaaagaaaatagcgggagaggattagatctatatatggaagagggttaaaataaaaaaaaggaaggtagggttaggagaaggcacgcgagtgcgcggacgaggtgccgttggatggaagaaataggatatatatgcctttcgttttgatattatatgttgagttccgtttcgaaatcagtcatgtacttggaacttaaaaattggtagttgttttagttggattactctatatacctaataaaaaaaatttgtaaggattccatgagttttttcgtccgtcgtttttttagctcttcttcctttttttttctcttatttctttttttccgtccggccttttttcgcttttttttcttttttccgtccatccgttttttcgccgttttccccttttttttccgtgcactttttttcgacggcgtttcttcggtttttttccgtccgcttttttcgtcttttctttctttttttgcacgttttttccttttttccatttttttcatctgctttttgtccgtctctgtttttttagtcacgtttttttggcacgcggtgaggattcggtttttaatccacctggtttttttccgtcgccaggatttaatctcaagctgttgccctggccaaaccctagcgtcgccgccagattgatctgcctcccgtgcgtttcctactataattgattgcaaaaagtgattccccactactccctcatcatttgatttcctcttactattcggctttacatcactagatttaatctccatttaatagtcatcgtttccccataagtttcccttttaattcggatttaatttactagatttaatcttcgttagctggtgatcttcccctagttgtttttatcccaagttttgtggattcgctccgatttgggaaaaactgaaagaagagatactaatgtttattctgttgtatcactaaaaaaacgtctagacccgttgcaacacacgggtattttttctagtcccatccaaattggaggagcacaagtatagaaggatatagcacaatatgccgggtaactggcctaataacaacaatagggaaaaaagagtagaaattataggaacgtagctaatttctcacctctcccaccaatttgtagaccaatggcagccgcggcgtgcgcaccgcctacaccgccgccgcacgcccgggagagatataccggtggagacgccgtgacaatgatgatgcggcgagctgtggtcgagagctctcaccagccgggattatggaagaaggttaaaagaaaatagcgggagaggattagatctatatatggaagaaggttaaaagaaaaagaaaggaaggtagggttaggacgtacggggagtaggcaccgtcggacggaagaaacatgatatatacgccttttgttttgttattatatgttgagttccgttccgaacttttattagtcaagtacttggaacttaaaaattggtagttattttcgtcggattactctatatacctaataaaattattgtaaggattctgtgagttttttcgtccatcgtttttttcgctctttcttccttttttttcccatgtttcttttttttccgtctggcttttttcgctttttttcttttttttttctgccgttttcccctttttttttccatccacttttttttcgacgtcgtttcttcggtttttttccgttcgcttttttcatcattttttcctttttttttgcaagtttttttccttttaaagtttttttcatctgctttttttccgtctctattcttttaatcacattttttggcacgcggtgaggattcggtttttaatccacttggtatttttctatcgccgggatttaatctcaaccagttgccctggccaaaccctagcgccgccgccacattcatctggctcccgtgcgtatcctactctaattgattccccactactccctcatcatttgatttcctcttacaattcggctttacttcactagatttaatctccatttaacattcgtcgtccccctataatttcccctttcaattcggatttaattcactagatttaatcttcgtcagccggcgatcttcccctagtcgtttttattccgagttttgtggattcgctctgatttgggaaaaactgaaagaagatatactaatgtttctgcggttgtatcactaaaaaaacgtgtttacccgttgcaacatacgggcattttttctagtcccatccaaattagaggagcaaggaattatgaaaaaaaacaagtataaaaggatatagcagaacatgcagggtaactagcctaataacaacaataggaaaagaaaagaagaacttataggaacgtagctaatttctcacccctcccactaatttgtagatcgatggcggccgcggcgcgtgcaccgcctacaccgccgcctcatgcccgggagagatataccgatggagacgcgcgtgacaacgatgatgcggcgagctgtggtcgagagctctcaccagccgggattatggaagaaggttaaaagaaaatagcgggagagtattagatctatatatggaagaaggttaaaagaaataaaaggaaggtaaggttgggagaaggcgcgcgcgtgcggggaggaggcgcgtcggacggaagaaagaggatatatacgcctttcgttttgttattatatgttgagttctgttccgaactactatctatcagtcaggtacttggaacttaaaaattggtagttgttttcgtcggattactctatatacctaataaaaaaatttataaggcttccgtgagttttttcgtcggtcatttttttcgctctttcttccttttttttccattatttcttttttttcgtccagccttttcttcgtttttttttctttttttccgccgttttccctttttttttctatccatttttattcgacgttgtttgttcggtttttttccgtccgcttttctcatcctattttttgcatgtttttattcctttttccagttttttcatccgcttttttccgtctctatttttttagtcacattttttagcacgcggtgaggatttggtttttaatccacttggttttttccttcggtgggatttaatctcaaacagtttccctggccaaacctagcgccgccgccacattattctgcctcccgtgcgtttcctactttaattgattgtaaaaattgattctccactactccctcatcatttgatttcctcttacaattctgctttacttcaccagatttaatctccatttaacagtcgtcgtttccctataatttccctttcaattcggatttaattcactagatttaatctttatcagctgatgatcttcccctagccgttgagggagatccgtcttccccgtgatctcgtagtaggatgtgcattatcaactcaactctgctcatgtccccttctgtcgccgtctcgatgccacatattttaagatcggtgtttgtgctgattaggggctgttacatactacctccgtcctaaaagaaaatcaaaccctacggatgcgtgtgtccagattcatctctagagtttgattttttttttacgtatgcccagattcattcctaaggtttgatttttttttacatgtgtccagattcattcatagggtttgattcttttttagacggagggagtaagtgaataacaatttctcttgaagataaattgaacggttttgataattaaggtgggtccaatgccctattttagaattgggcggtgtatttaagataaacatagtaattcaggggatcaaatgggctcacccattgtaatattggaactatttgccacgagaaagcccatagctgtatagccgatttcttgcaccattagtgtgcatctcgttactactagttgggtttcgcttgtttcaactataatttacattccagagctaattttgaattttataactaaattttagaataaatttaggtgttcttttaatctctttcatcaatgaccgtgatgttcggactgataagagtaaaagtgtaaaagtcttaaacggacccctttagatagcagaaatggcaaaacacatgaatagaaaaaacacaatacttttaaaactgtataacgtgcagtagtatcgatcgagacgaaatacacatatacaaattttcaatgatgatctaatgctgtatgtttcttgattgtgtataatataataataagacaaacagaaaaatatgctagtgcttttgtctaaaactgcctgtttggaacaacatatttgggcaattggctaagatatgatataaaatttacccgtatgccgtgatggatcgaggcggcacacttgtcatctttcggtaatacagtaagagttgggccagaatagtattgtggctgacgtgtgggcccagcttagctgaaatggtattggggcttaacaatttttgccagcaaccttaatttgtctattattaatacactacgtttcagtactctgcaaggttacatatcccagatacagaaatctgcatgttccaactacttttacccagtcgtgtaggcttcgatttactccacaatctgcgtacagaatactgctgtttccagaaccaattgaagccatgacaccaatgcaacagtaactcatctgcagtatcatgggttattcttccatgagtcacagcatgtaaagtgagctagatgaatcatgatatcgcagcaagcaaaatacagaaagacaaggccaaatagcaggtacttgctccagacatccactcaaatcaccattacggatgaaacagattgaaatgacagttttttccgtccaatttatgttcctacccttaaaagtttattaggaaattaactatgaattaacccagtcacttctatattcatctgcccgatgcaatatattcctctgaacctttgttactgaagagataaaaaagatatcctcaaattaggcctgaaaagtgagctactggtagaatggtagagtgcaagatcaaaactcaagtttcattatctcatcatatatcccaaactactcctgaaaaaaaaaacactgcaagggtagatgatatcaacagtaataatgtgcaaaagctccatctaatgacaatcacgattatgcctccatcagtaactgagagccttcctctctaatcacaccccagaaagcctaactgagggtcttcgtctctaatccgactaaatgaaaaaaaacactgtaagaatcacaccccagaaagcctaactgacagtcttcgtctctaatccgactaaatgaaaaaaaaaaacactgtcagctgtaagggtagatgatatcaacagtaatgtgcaaatgctccatctaatgacaatcacaattatgcctccatcagtgactgagtcttcatctgagaaagcctaactgagggtcttcgtctctaatcacggcgcagaaagcatccctgtgacatgcaacatgaataacgtcatcagaaattcagaaacagatttcgttaataaaaaaagaattcagaaaagatcagttgcaagttgcaatcagtaaagcaattggcgcggatcggttgcaatcagtaaagcaatcggcgcacctcgatccacgtaacggagtgaccaacgatcagcccgagacccatcatgacgtagcaagccgcgtccaggaacctgccgctgtcgccgccgcgcacggcggcgaggtagatgacgtagagccccagcagcgccacggccatgatggcggctcgccccatgttctcctcgctcctggtgtaccgggacgggatgcgcgcggcggcctcgtcgtcgtcggcggcgcacgccgtcatcgccaaccccaggatcggccccatgagcagcgcgccggccagggcgatggcgcacagggccacatcgcccttgctctcgcaccaggggaagatctcggcggcgaacacggccaccatcgcgacggcggcgatgatgcagaaccattgcgggagaagccacatcagactacgatcgaatccggcgagaaaaaaaaaactgaggaaatcaacacggcttaccctaatcgcgaggagccatgggggcgtcgggttgcacgcggctgcgaccggaggcggccggccttcctcgagcaagcagaaccggagatcggccgccgccgccggagtattccccatgccgccgcggccaggggagggatcgagagcgcgtcggcggcggcgagtgtgcggcgagatcggaggaatttttttcgtttttagattttttttaatatttacagaaataatctatcgaccaaaaaaattacagaaatagcccctgccgccccaatggtgggcggcaagctgacgtggcagacggtgggtcaaccgcgccgtctgccaccgtcggccaaaattgcgattaggcccttgccgcccatacagagggcggcaaagggctaattgcaattttggccgccaataaagagcttgcggccgtacttttttcatctgggtcccttgccgccccagatgtaaaacgtacagccaaaagatttttctatgttatgttaataataaataaagaagtatttattggtaaaacttgttaatattgttataaaaatgtattgaagttggttgttgcgcaatttcatatgttaagtgagatattattttgtaccatattcgacgtattagtactcggataatttatataggcctatcgcagtctgggtcgtagaaacattatatggacttaaataaggagaattatgtaacatgaagaaatagtagtacaatttgaacatgatacaactatttgcattgcggttacatagatgatattagattcgaactaggagggaggtagtgtaatagttgaacacaacgacgatgtagtaatgggacaaggaagcatgacagtagaaatttcaatatgccaagttgtccgataatagctaacccctacgttaggatccctctcctctctcaaaccgcgctttagtaatcctgtattgctctggtagttcaagctgcacaacacggctaggtggagttagaacccttctggtgtctatccattctctatattgacatctccttggtggttcctgggaggaaagaatagatgtaaagcaagcaaagttagtaaatattgtgagaaaataaggattcatgtaatcaaaatattcttaccatgaaatcatcgtcaagaatatttggacaaacaaagaaccttcgacccaatgttgtaggatttatggaacgaagaacctgacaacgatcaccacacctgcatcttggacgggcttcccatggagggagtgcgtagttagcacccgccagtcgctctgttgttcacgacattgtcgttcataagccgtttttctctgtaagtattgctcagtactttcggatgcgaaataccagcgaccttcttgtaaacaagtggttaggtcgagaacgggattttctgtatcgacccactcgatgtatgcgcaagccgtagtgcgggtctgccgaatagagtagtgttacgaagaataaagcaattgcccgtacggaataaataagcatatgcagataataaaatacctcacggtcatagttagggcacctaaaaaagcgccttcctcgaatatcaggattcctcgaagccattagttggcatcgatcaccgcataggcagagaggacactggcaccaaggtggtagtaggtatacacaaggatcgctacgccagtttggatcctcaacaccccggcgtctagccattgacaaaagccggtcggatttgtaatgaagcaagtgggaaagagagtactgaatgtgactgagttctgaaagattgtgaggcctcactcgttaaggcgacttatataggcgcaaaaaatcgagtgatacccctgacatgtgaacgtggtggggtatggtgggtacggctgattggcgccgaaagttacatgcctgatcggcgccgaaagttacattggtcgtatgcgccaaatggcgggcaaatactcgtatcgcacgcgaataaaggaggctgcatcggtgcggcagaaagtagtcgtgcatgcgctgaaaggtatcgtgcatgcgccgaaaggtatcgtgcacatataacaaaaacgtagtcattacacaagcatacagtactagaaagtgaagcaaataaacaaagagaagactgctctactggccctgccccacgccgcgaccacgcttggtcctccgggcctgtgcttgcacgtggtcctgggagtaggtgaaacgatccggtggcacagcacgggtagcacgagtgtcccgcggaggagtggcctgcgcctggtcctgtgtctgcaccggcggtgcgcctcccagctgtgaggggccgatgacgtcctctgtcaagcctgaagcgaagtcgaagtcagaaatgtcgaagagcacggtggaaggcagcaagcggtccgacgaggtcccagcatggtccagtggtggaccctgactcgacgtgctagctgcctgtgacgaagtcccggtgtactgccagaactgcactgagtgcgaggtcgacgcagctgcctgagacgctgaccctgcaaactgggagaagtgggcggcctgcgtcatagcgaactgggcgaaacctacacatcgacaacgggacccttgtaagctaagacataaaatgcatgtaaattgattgtcgaagtaatgttgtttttttaagtacctgtggggggcacaacagaaggcctagccaaggaaggcggggtgctgaacagtgcacgaaaccctgaagcaatcggcaagtgaaacagctcacttatatgtgcgaggcatgtacagaaatagtaataaaaatacttacctccgtgcggagggggagtcggcctaggaacgtgcgcagctggacggggaccagtcggtacgggtggccgctgtacagctgcatctgcccgagcaacgtcgtctgcacgacaggtgagcactcggagaatcgagtgcatcgactccaccatccgcgtgtatgtcgtcaggtgctcctctacgggtaccagaatccccgcgcctaaacgttggatcgtcgttgaaccgtcaacgacgacccggttgatgtcgtcgacctgcatggttaatttgttcgtaaatattcgtaaaatttgacgaagagaaagacatgaaaacataaaggaatggtgcgatgcagggtactcacagcacgagcgaagtcctggtcgcggtgcctggcgtagaggtctctagtgctcgcaacatggggctgctgctccaagggagtgaaggtgaccctagtacgggtgtgtggccctccaggccttggcatagctaatagtatacttgtatgtctcttcgatgtgtcggattattgaccttggttcatatgtgagattatcgatgacatgcgcatacatctaagatgcaacaaatgcacatgtaatgttcttgtggtatttctgaacaccaggtagaaaacatgtatgcttggtaacaactgacactgtccaataatccttccatttccccttatatgcgtgcactctccagggacaaccatatttttccttaacacaccgaacttcatattgcgaccggttcgacttggcaacccaaaactctctatgaagtgacactgcaaaatgttttaccgcctccttcatatcttctgctctactataaatcgctccctgaataacctcattttctttgtactcccatctcacactatcctcttcagagacgatcagcccagaaaaatcctcactagcccattctgctggattaatatccgtctcatcatctaacgaatcaccttcctctacatgctcgttgtcagaatcctccctctccatttcatccacaatggcaccgacagtctccccctcgtcggccactccacctggttgaatgcccactggagctactacgcccccgtcctctcgtgcgttgacctcctccacagaagtctcatttacttcagcacttggtccctcgccatcatccatgttcatctgcacacctggatccttcgggtgaacaaacggaaccaaagctagaggccacccgcgttgcaatgcattttccaaataccatctccacactcgagagttttgaactggcattagttcccaataaaaaccctcattgcccgacttactataacattgattgttatgtcacttgtctgtggatcaactctcaagcccctcattaaccatgcttttatagaaggtacactcctctcagccggtctatcaattcccctttctgatacaataaaatctgacagatctaccccagttggcccgtccggacgtttcctggtctatggtaaacttggaatatttgttgtcgactatctgtcaacgaaataactagatcatattactctttcatgcaataaacatctacaacgtaatatcttcttgtgtaagccaatgcaacggtaatgtattgattccaaactagcagatctacgtagttaccgatatctacaatacgcacttctagattagtacaactaaaaccctaaaaatataatgcatttattcaaacaaatttttaaaaaatacacactatttaactcaatagtcacatataggatctatgaatattacatgaaatcggtatctgaatccggcagggcttcgccccttcttttcttctcctcccctctcttctttttttttttcactggaactgaggagggaggaatgagggctgggggctgggcggtaggccttttataggcagcgaggcctgccgcccggccagagggcggcaaggggccacctgcaaaatagccggccccgactggcttttttgcattcggaccccttgccgccccaccagagggcggcaagggttttcctgcaaaaaaccctccctccgtcaccgcccgttcctcccccgtttgccacgtcagcttgccgccccagaggtgggcggcagggtctatttttgtaatttttttggccgatagattatttctgtaaatatttaaaaaaaaatctaaaaccgaaaaaaattcgagatcggagggggcgtggctgtttcggattcgttggtgagaaaggcccaatttgtaacattagttgggccagaaaagtattacgtgcaggaaaaaagtacactttaactctcttaaaaaagtacgtcgaatctaattcgtacctctcaaccagaaaaccagataagacaacttcccaactattgaaactagtgtaatttaactcccttagtggttttgaagtgtggttttgctaacatggcggtgttgagctggtcttcatcccacgtggcgcttaggtagcattacaacccgttttagttgggcgaatttgatatatatttgtcgacaaattttccatcaaaaatttgacagatgtaattacaatacaatcgtggtataattacactgtaacttgtatgtaattacactataactataatgtaacatgtatgtaactttcaaaaatctctccataacatttatttcggtaaaatggaggttgtgagaacaaatcctttcacatatgtgtgtgatgtgatttttcttcttcgtcaccagaataaattttttaatagatctaacgattcaaaattacgtgaaacttatatacaagttacactgtaattacatacaagttacagtgtaattacatacaagttacagtttaattacactatgattgtactataattgtatctgtcaaatttttttagaagaaaatttgtcgacaaatatataggtggtccccttttatttgggctagatctaacggaacaaatgagctcaaactaatgtgccaaatttttttatttgccgtgcgttgcatttttttgtgatacatccggtattaggtagggtgaaaacggtatggaaatagacggaaaccacctttatcgtttttgtttttatattttttttagaatcagaattagagtcggaaaccccggatacgaaaacggaatcgaatattattgaaactgaaaacggagcaaaaataaatcggcgcgaatacggtaacgaaaatttatcggaatacaaaaatccctcaaactgataaatccaattctcaagtctcaatggtcaacaattcatcataaaacacaatcatataagtccaattgttaagtctcaacagtacatcataaaacacaatctatggaataaattatctatgtttaagagagtaatgctgttgataaatcccaatataggaaaaaaatattattatgtaccctcacatttgcataacaaataatttttaaaaaataacagccaaacaccatggtattcactattcagtgtttaaaaaaaagaatccagggtatttcagtcacaaaatttctggaaatttcgagaaaatttccggaaattttccaaccgattccgagttccgacgaaaactacccttatcattttcgattccgtttccttgaaaatatttccgaatttgtttctgtttttgaaaaattccgaaaagaattccaaccaatatattccgttttcgaaaataggtccggaatccggaaagtttccataccgttttcacccctattaggaactgagcaacgaattgaaacatttggatcgctatataatataattgaaaaagttaatgaaaattgttccttggttttgggtctttttgtgctggagctgatccgaatttggtttattccagtaaattaaaggtgaaatgaaagggagaaatcaagagaaaaatcacgagagaggagggggaattgatttttgcaatcaattggaggagaaacacacggaaagatagatcaaagtggtggtggtcctagggtttggtccgtctgcagagtacaataggtcggatgagataaaaattcgaccaccgaaaaaatagaaaccggatgaaaaaaaacacgaaaaaaaggaatctggcaaaaaaaaaacagcgaaaaaaaagatacgaccaaaaggtataccataagctttacttatttttttaattattattattaggtatagatatagatagatagatatataacatttgttttgttattaaatctatctatacctctgtagttcaacaaatgattccactcattctttcattcatcactcaacggtctagattgtctcgctaagatccaacgtcccagattttcctccacctccccacgaagatcgcaccaaataattcctcccacctgcgcgcgcatacgtaccccctcccacctgcgtggatgccgccgatctctccaaaaatcacgcgctcgtggcaatgccagccggaatcgctggggcggtctccttctccctgaccttcgcgacgatggcggaggcaaggaaaggccgcccatggatctgctgccgaagaatcgtggtgccccttctgcaacaaagtcagaggtgatgtgctcctgcttccgtgcactcctccaatctagtagcgttttcgatgtgcattagacctgctaaaaaggtacttttcgtgttgatctgagttagcgaataaagtagtgtcagctaggctgctaatgttgacctattgctatgcttacatgaattagctatccgagcaatgatagagttaataatgttgctattcttgggttgaggagagtcagtctgctagagagccagttgtgctgagcgtgtgggcaggtgttacaagcacacncatagagagttagaagcgacaagcaagtatgtcatgaaagttatggcggagccagacatttcttgcagttaggatctgagttgatttcctaccagttctaagcaaatggttatcgagcttattcttttattcatcactcaacggtaagattgtctcgctaagatccgatgtcctagatttgccccacctccccacgaagatcgccccaactgattcctcccacctgcgcgcgcatgccccctcccacctgcatggatgctgccgatctctccaaaaatcacgcactcgtggcaatttcagaaaccaaaaaaaaataaatcatgcactcgctattctgccccaaaaataccgcatctcctagccctaaatgccaccgtccaccggatcccctccacctcgccctcaagtcgccacggatccgtcgccggcggacagtttccgtcgacaggtcaccggcaatcgctcaccatcatccgtgatcccccctccctcagtgccgcctcaccgtccaaggcaaccgggcctcgccactgccccatccgccgaccaccgtcgcctcatcgtcaagtcatcgctcccttgatttctcggtgccagctcgcatcaactccacacaggccaagtttcagggcgctagctactcttttttttttcaggggatagtattagttttatatttctgttggatatgaggtatttttttattatgtttgctggagtgcttacttttatatcttttatggtttaaattacaatttcaatgaagcttgattatttgttcttctgtgcatgcaaatggattgccttgtgtatagagtatgcaaaatgttagtttgaagcaatatatattgtgggagatatacatttgttatataattagcaatatattaaaccattctttttattatctgaatcatatatttctgtattgttaaatatatccgtagcgttagcacgggcaaattactagtgtagtctaataacaaaacaaattatagattccgccaagaaactgcaagacgaatttattaagcctaattaatccgtcattagcaaatgtttattgtagcgccacattgttaaatcatggtgtagttaggcttaaaaaattcgtctcgcaatttcttggtaattggtttttttttctacatttaatactctatgcatgtatcaaacatttgatgtgacagcgtataaaattttgtctgggaactaagcagcccttagtatatcctaagtcgcacatgtccgtagcactggattcggtatgctaagaaagcaattcgattgagtgtgcttagatgaggctagcccaaatgtccctgtcacaagcaattgctcttcatgttagcttacctctaaagtctgaaccaccttccatttgcatgccaaaagaaagagggcactgtcgttggttcgtatgcccgatttgattgtgtagctcttaatgctcatagtcataattaagttgtaagcagattgtttgaacgagtctcatcttctgcttgaattgttagcttatatatgtgtcataaccaaaattttatttctagaacttaatgttgacttttttttcattgcggtatatttttcaacattaacttactgctaataacatagacataaaagttttacatgtaaactattttcattactttatttttttttatagttcatgagttagagtcgaagtcaccaccaaagacattatttctctccctgtgtggcaactacttgactcctcatttggcaactacttgatagggctagatgaggcacacctctgtgaagtcagctataaaaaaaatttaagttctcaaagaatatggttatgtatggctaaaatagtggcactctaattgtagtattgaatcaaattgttactcataagcagggacagatccagcgtggccttagagggaggggagggaggggggctcgagccccgttggatctctatggagagagaaggagatagtggagggggaaacaggaagaggaagaaattatatcttaaatctcaggcaaacttgtcacatcacctataaattattacattctatagctcaatgtaagtatgtcaaagtatcattctaaaatattttaacatataatcatccattatttttataatatttaatatacttttatccataaatttcacatcaaagtgtgggccatcatctagtttatcatttatttattatattctcgagctcaatatgcaagcatgttaaattactattccacatcattttgaaatatttcaacatatgagcatccatcattctaaagtatttaaaacacatttatccatgttttcgcagcaaattatggggtataatatattttatattgtgctccctccatccaagaatttaacatactgtttcgagagca

SEQ ID NO: 5689 - DNA, 1037 bp, Oryza sativa
ccctttaaaaggatccccaagctttcttttacccgtcgccactctcgccttcgcctctcgtcgtccgtagcgccctagcgtcgtgtaagctagcgccgccgtcgtcgccgccgctccagccgtgcgccgccgtcactcctgttgtcgccgtcgctcggggaggtcgccttcgtggtcgccgtcgcatcgccgtcctcgtccgccccttcgccgtcgctgaagaccgccggagcaccgtcgccgtcgtcgagccgaaggtctccgccgtttcaacctcgtcgccgtcgccgtccgctgctcctccgccgttgctttggtcaccggtgagttcgccgcgtcgcccgcttcgtgctggtgtcctccgttcgcgccgcagcgccgtcgttcgccggcgagcatgcgcgcccgagccgcccgagccgccaccggtgatgacgtcaccgctgacgtcatcgggactgtccgccgtgagccggccgtggaccggttgatctcagccgtccgttttggatggatcaatctcggccgttcgtttccgtgagccgccaccgtgcgcccggtccaccgcaaaccctagccgctgacgcaataaatcccttttttcttttcaaaaataattcattattgcgtcataattcaattaaaatcaatataagtgttttaatccgattaaatcttcaaaaattcataactaattcatcttagctcggatttagttggttcaagtctctaaatttttctaaaattgagatctacatgttaaaaatatccacatgtactgttcatgcttgtttatgtgctgtttggtgattttgctctttcctggttagattctgacgtttccggaaagtccgttttcgcaggagaagattttgaagagttccaaggccagcaaggcaagtcacacagatccccaacaaccctttgagcatattgatcccgtttaaagctattgtttcttttcaactattgcatttattttcaaatgtcattgggtggaattaacctattgtttgttatagcccttttgttctgga

SEQ ID NO: 5690 - DNA, 1527 bp, Oryza sativa
ttcaccatgttggttaaggtattaactaacactccagattggttaatcaaggcatgttgcacggcatagtcgatcctatcctgaaaattgttaaactgcaacggctcttggttgccatctgcaccaaaatcttcaacagtgccatcttgaggaacatcacctttgtcaccttgagatgaacccgaaccagcttcatcggctgcaactaccttcagcttgtacttctggacgatggttcctctgcgggtttcttggaaagaattcatgaactgatcctttacattgctcatcatctgctcgagctcatccctttgctcagtcgtcaatttatccaatgtgattggaacaataatactaggggccagttcggctgaacaagaaataaagacaaagaaacagtagttaaatccataatgatagccgattagccagccgccgatgacatatcatttatcttcgagccgatgtcatatgtgaatcgatcggcagttataaataagtaattaaaactaaatctactcgatcgggtatagacgttaacaatgcataatttttatgtcgatatatacttaaatcaagtgattgggatagatcggtcgccatgccgagacagtataaatcacttagatcgaaatatatattaacaatgagattatagatgttcacagcataaccgattagatagatctagcgcgtatcggctaatacaccgataccactctatattaagatattaaagcgagtaaaatatatcaaacaaaaagcttaacatatctaaaaaaagcaataagatctcaatataaagggcagatttagcatatcaattaagcacatgaaatataaggctaaatcaggtaagatcggctaaaaccccgatactactctaatcgacaaccaagaagcaggctagagattatagttctaagcacgacttatgaggtcaaacctaactgatgcagccataagtatgaaaagaaacacaatatctagacaatcaagccattggaagtttcgtagagtggtggatattctatataatctagatcaacatcggtaattaacctgatcggctgcctcccagtaacagatgttagcctattagaggttaggtaacaatgttgccggagattatatagaatatatgataactcgacaacttacatgcacaggattagagtgtcataatgatgcaagcactaatcccaagaacgcaagccgccataacaagtcgtacctctagttgaagatcgaaaccgatgcagctcaactcgaaagcaagaactcgtcgaaacaaaacgaaagtaaaaggtggcgatgcgccgagattgtatttgaacgtgtgttaattgattacatagggctcggggtctatttatacccgagattacaaaatatgtccttgtcggacacgactctcatctctaacaaactctaagataccataagtctttgcggcagacttttgcccacacttatctctaaggaaattacataaaatatcctaattaatagatacaattgccttct

SEQ ID NO: 5691 - DNA, 17275 bp, Oryza sativa
attcgtctcgcgatttcccctctaactgtgcaattagttttatttaaatatatatttaatgctcaatgcatgtgtccaaagattcgatgtgatgctcttaggaaaattttttgggggaactaaaccaggccttaggtcgacgccatgtgttactaccataatccctcatgttccgcgtgcacgcttttcaaactgttaaacggtacgttttagcaaaaagtttctataggaaaattgcttaaaaaatcatattgatctattttttgaaaaaaatagcgaatacttaattaatcacgcgctaatggagtgcttcgttttccgtacgcgagatatgtgttgccaacctagctgccgaatacaaccttaggccattcacagttcatcacactattttgaggagccttagagtgccatgtaggctaaagctacgggtccaaaatctggttcatcacagtgcaagtggctctaggagtggctttaattttactccctccatccacaaaagttagacatatttcacatttgagtttttccaaataagttgttcctatttgtagtctttatgcattcaagacttaaagacttaaagaagagataaattaaatgtttgattagaacccaaggagtcatataaatactcattggttgcatggtagcattcgcccaccaatttatcatatgcctctattaatctagtcttagcatatcgatttagctctatcggttgcttcttgctttagggtttctgctagtatcggctaaatcgtcttgctagattagattagcttagacatccaccaccctgaaaatcagtcaagggcttgattgtttagatattgtgtttcttttcatacttagtgctgcatcagttaagtttaatctactaagtcgtacttaaaaccataatctctagcatactttttgattgccaataagggtttcatcagagtttcagccgatgaagtatctagacgtcgcatcggcttgtaaggattacatactgttgatgtgaaaacacgacggcctgggagatctgcttaactccagtgcagttccaaagctaggctcgagtgtgtcaatgccagctgatttgatcctacaatcagcaagaaagaataaaagcagaatcagtcgatcgatagcgtatcagccgacggagttagaccaaatcggctatggactggatatatcaaagaataataaaccctaaacatacccaatcgactgtaatactatctatgagttcaatagattgatttaagacaatattatgaaagtagtcaatgtgcagtctgttgacggtcattatcgatcagttgcgcccgtcaatattaccaaaataaaagataactagttatgctcgcaatgcatatttatgttagaataagttatattccactagcactaggattctaacctcttcaagagaataaatacaaaatggaggagaatcagtagcaaaacatacaatcgatcaatcagacgctatcgagaatcagacttgcggacaagtgggctgagaacaccaaattgacacgtccaaaacagcccaaaattcacaagtatacagaaaggagcaaaagaggaggccaccagccgagacttgcgaacaagtgggctgagaacaccaaattgacacgtccaaaacagcccaaaattcacaagtatacagaaaggagcaaaagaggaggccgctagccaagattgtgctggtttggcctagcccatgaacccgccgtgcaaccgtttgatgcagggctggcgctggacggtctagatttcttccctacagcggttggagggtattaccgcacatttccaactgccataaccatcattactaggctatttaaggccttcacctccttacttcttccacatactcaagcaaggggcttctcatacattctctcaagttcagttagtctctacaatatagtggaatagaaatagaatagagtcttcagtcctcggagttttcggaagaattcgggtatggctctagtagcttttccttcttttgtaagacatgtaatatttatagaattttcttttcaatatatttacgatactttgcttcattctaatcatttgggtaccgacttttcgatatattattcgagatatacttgtctagctagcttactcaggagatgcaattatgtgggtataatgttcatttatatgtttgcttatttcatgaggatgatagtagagtagtatttggtagcataagcgaggtgcttaggctattgaatattattatttggggttatatgctgcagaacagtagaggtgggccgctgatggtgatagctcagtatgggtattcctccatgttagtatataatcctaagttactttcctgtggagggtactcctccatattttgccccatttggatggcaatgaagggttgtcgtaaggaactcggcaaccaggggtggtctctcgaaacgccaggagggcatcgtaaggggggtattggctatataactatatagtagataatattgactaaagttgtatgtatgtatattagaagtataggaaatgattattttcttattcttttccactcagcctagaatcagtatgtatgagaatatcgagtgcttctgctttgtgtcactctacccttgaaatgaattaacccctgcttagattttgattatcacaagtaacatataaatattagcttggttctctctattataatcttcccatgggattaaacaaatacgatacccttggaatacttttaggtaaaatgctacaatggtatatccgtgcgcttgcggatatggtctgtaaccataatataccatgaatatttctgtgctattgctaggaattatatttctagtaatgtcgttaagaaatacaaccacagtccaacttcgaattcagttagattcaacaccaaatccgctttgatcttctttcttcttctccgaatttgctgccaaattccgttgttaacacatacaagttagagttagccgatcgtaacagaggtttcactatttatctaatctcgtggattttatgacatcggacctctagccgatgtatgctataaccttcggatcagtgcttattctatcatatcattattagccgattggtttctactagattatattgttgttttgttacattatcatcagctgattgtctttatatcatttatttactcaagtatcagactctgcattggacatacaaccgattgcttaaaaccctatcggcatcgacatacagccgattgcttaaaaccctatcggcaccggctaatataggcatcggctggaattactccatcggcttgatcagctcattgatctactatttgcatatcttatcagttgcaggatcaaactgactggcacgcccacatctcatcaacttttggacctgcactggagctaagcagatctcctaggctgttgtgttcgtcgacttagttcgtgccaatacatttccggcaccatcaaccgagcgtggatttttcatcaacaccaccccaccgtcggcgcgctctctccctaccaccacaccaccggtgcacctctctccctaccaccccaccgtcggcgccacttttcctcctcatctccgccgggctatccctccaccttccccgtcggggtgtcggcggaaatcgagcgacgagctcggcaccgcgtgcggggagaggcgaccgaagtggcggcgcccgggcggagaggtggtcgaagcggcggtgaccccgggcggagaggcgccggatcccccctctctcctgtgggatgagctcggggatgacgcagcggcttgctggaactccctctctcctgcgggatgaactcgacgacaatgcgggcctactcgcttgtaacgtcccgcctctcccaggccgggaccacttacatctggcagcttttcttggatatagactgccctcacagacgaacacaagtcttttctgcacactttgtcctcactcatgtgcacaggggaagaatttcctggtcagtcacccatcccgaaattgctccaggccaagaaaaagaagttgcaacttgttggtatgagtattctattaatcctattaaaccctgggccaggatgtcacatcgctcactcgtacacacgggacggcaaggacaagcgcaggaacgacgaaacgaggtaacgacctccacaacgtgcgcaagtgctcgctcctcacgccgcttgccctggatttggccgaggaacacgtgaccaaagttggacgcgcggacttcaggtagatgcggcataagctaatgtggcgtggaatattcgttcgggaacgacgaagccgaatgtcaactagactgtcacacccggagtttctcctttttcgtagtttctgattcaccaataaatcgtctatagaaattactttggttaaccaggagaaaacccaaattaacaatgtatttaataattggaaatgtcagggagaatttttttcgaattctctttgctctaaaatcattaataggattttagagcaaagaatgttgttaatttaaattgtaaagatttgacttaataataatctttctctctcacctttggtcatgaatagtgcccaattcactccctcttcgtctgcggtttcgttttgcatgatgagtcgggtccgtttctgtccgcgggtccgtttccgttcttttccaaaaacggcaccgcatttcttttccaatttgggaaagtccctatcctaatccttttcctatttttgtcctcccactccctatcggcagctgctccccctctccccctgccgcgcgccgccctcccctccccgagtccgaatcggcatcctctcccctctcctttgccgactcccctccggccccatctcttttagtttttcccctctcctataagttagaacccctatttttcctattcgattttggtttagccctagccgccggccgcccaccctagcgccaccgcccgccgctgtgccgccgcctcccgtcgtggccgtcatcaccctagcgttgccggtaatccgttttccctctccgtgccatggctatcgccattatctatccagttctaatttatctttgttctaagttttgatctaacatcgccgtcatctctgcgtgttgccgccggaccgtcgtcaccatcatcaccctagcattgccggtaatccgttttccctctctgtgtcatggctatcaccattatctatccggttctaatttttctccgtcctaggttttgatctaacgttgcagtcgtctccgcgtgttgctgccggaccatcgtcgccgtctcctcctcgccgatcatctcggtttggtgaggaatctatccgtaatctcctgttttaggtgttaattcttttagtatcgttgttgaaactctagttttttagccccgcgcaaaaccctagccgccgccgccaccgctgctctcgcgtcgtcgtggtggtttgccgctgtgccgtagcttggtagccgagttgcaaagcgtaggtgcatccctaaattcctaccggcctatcgtttgtcgtaccgagtctttgccgtaaatcgtgtctagttttctgttgtcgttctgagccatcggttccgttcgccggttcggttgaccgtttggatggtcccatgtcatgaagtattggctcgttgagtcattaattcatgaggctcgctgttgatgtgaaaacacgaggcctaggatatatgcttaactccatcgcaggtccaaaatcttgccttttaggttcgtgggcgtgccagttgatttgatcctgcaatcaacaagaaataaagacaaagaaactgtagttaaatccaaaaatgatagccgatcagccagccgccgatgacatatcatttatctccgagccgatgtcatatgtgaatcgatcgatagttataaataagtaaattaaaactaaatctactcgatcggctgtagatgttaacagtgcataatttttatgtcgatatatacttaaatcaagtgattgggatagattggtcgccatgccgagacagtataaatcacttagatcgaaatatatattaacaatgagattatagatgttcacagcataatcgatcagatagatctagcgcgtatcggctaatactccgataccactctatattaagatattaaagcaagtaaaatatatcaaacaaaaagcttaacatatctaaaaagcaataagatctcaatataaagggcagatttagcatatcaattaagcacatgaaatataaggctaaatcaggtaagatcggctgaaaccccgatactactctaatcgacaaccaagaagcaggctagagattatagttctaagcacgacttatgaggtcaaacctaactgatgcagccataagtatgaaaagaaacacaatatctagacaatcaagccattggaagtttcgtagagtggtggatattctatataatctaaatcaacatcggtaattaacctggtcggctgcctcctagtaacagatgttagcctattagaggttaggtaacgatattgccggagattatatagaatatatgataactcgacaacttacatgcacaagattagagtgtcataatgatgcaagcactaatcccgagaacacaagccgccataacaagtcgtacctctagttgaagatcgaaaccgatgcagctcaacccgaaagcaagaactcatcgaaacaaaacgaaagtaaaaggtggcgatgcgccgagattgtatttgaacgtgtgttaattgattacatggggctcgaggtctatttatacccgagattacaaaatatgtccttgtcggacacaactctcatctctaacaaactctaagataccataagtctttgcggcagacttttgcccacacttatctctaaggaaattacataaaatatcctaattaatagatacaattgccttcttaggactcaatccacgtgtggcaatccatatgaagcacattaattcaacccgatgacgtacaccgtgtcatattgttagaatcggctgtatcggctaaccctgttcgactcgaactctgccaatcctgtctgtagccgatttggatcgtagccgattcttgctctgtttccgcaacgatcttcgtcttggattctgctttgatctaatcttcttttccaacactgatattaccaaatttggtcgttaacacatgccccccaagtccgaaatatttggtaatgtttcggatttgccatatgtcgactccgagtgaaaatcgcacttgccgttttccgaccgttactccagcgctttaaatgctaaccgtcaccttcgagaaacttcacgctgtttcctccgttttcactgctgaagcaaacctagttttctctctctccggcgatcccctcggtgcgctcggcgatttcaaggtgatctcctccccggccaagcttccgctcacgatgatgtcgacctctgccggcttgtccgctgcgccatcaaccagcccgtctgttgcgccgtcatccaagtacgcagaggtatgtatccatcggctagatccctttttcccgtgcagtagatcgattttcttcatctcatcttattttcttcttctctatctcttttgcacttgtagcatcttaccaatcttgttgcggttcccagtttgtcgcacgaccatcagtactttctcggcccaattggcaaccttgacccctctgaatttatcattgttgagaccaacagaatcccctttagactggccaacccaaacttaagtcactggaaaaacacctttaaatcatggccatctattgagaaaagtacccccgagaaaagctggcctttgtggttcgaatgggtatcggctagcaaacaagcccactgggatgaaatcggaatcagccaagcgctagcccttactacagcaaatttggctaaggatgagcctctgatggccgctgcaatctacttttggtccaacacccttaatgccttcttgttcaaccaagggccgatgacccctactttgttagatatcatcatgattactggtctggatgtgacctcatcggctaatcccatgagcttgaataccaaaagcacctttgaattcaagaccaaaagcattagggttggtcggggtatattgtagcatacatgggcaaagggccagtcacctctcgagagcatgtagcttttctactgatgtggttggagaaatttctttactgtggatcaagttgtggccctgcaactgtggagattatggataccccatacccacactgcatggttatccgactggttataggggataacttatatctatggaatatataacggatcatgacttgggtattacgtttccttgtatattatgtaacggcctaaagtcctggtttgataagattgtaaagtagatttaggaaatcaataccgtattggttaaggtttctatcttgtaatcctgccccccgtcctatataaggtgggcaggaggccctctagggggcatatgagcacatatgatcgtcagatctaatacacccggcggattcaaatccccaaacaggagtagggtattacctcacattgagagggcctgaacctgtctaaatcctttgtttccgcatccatccacttttaggtctcgtgcgctacccccttttattattgccgaattcatgttttgacagttggcgcgccaggtaggggttgcgtcgaattagccgtcgaaaagtgtgatggattcaactccataagaaacgccaagatcaatctcaccggtttcgacgactcaaatcttctatcgggtttgtcgttccaaataaacttttattagattaattttcaatcattatttgatcttcttacatttattggtttttttcatgccaactgagatcgtgacgaagcagtcggcgacctcgtgaatccaaccgacgtaaatttgatcacgctttgtgctgatctatacgccggcacatggcccggtgacagtcttcatgcatggagcatcgccggttataaggaacacacgtgcttatgttgattcaatcaacaagcacgaccaacttaatcatgccatatatccaatatatatgagtctatatgtttctttgtttaataacagattaatctactaatcgctttcttttgcatgttcgtatatgccgatcaagagcaaccatctgtccatgacagcctttgactgctgccacacgcgcgtcaactagcgattgttctggccgggatccatgtccgcgtgcacccacctgtcatggcgccgtcaatttaatcctccatgccagcatgcaaaagcatgcatctttcgatacatgtacatctgtactttttattactactaatctcagtttgatgtgtggtttattttttgcatgcaccctggtttcccgagtccgattccctatgacttggtttgatctggctggactcggacctgtgacttgtacgtgctcatgacatgcaggagcatgaatcggtttaatgatctgcttgtgtggacgcatctaatgttcatgctacatgagatcaatcggccaaccaaataatatatgcatgcttcatatatgcattgatatatgcagacatacatccacaagattaattttcttgatgctaattagagatttcttttgtctctttacatgtatcgccggccgtctccatcgccgctaactggtgccctcgcctacgcgattggatggtcacaccaccattgttgggcatctacgtcttcaccgaccggccgcctcgtccgccgccgactggtgtctccgcctacacggctggcctattatgccgctgttgttgggcgtctatgacttcaccgtcggcctgcctccgtcgccgccgactggtgtctccgcctgtacggctggcctattatgccaccgctgttaggcgtctacgacttcaccgccggcctgcctccgtcgccgccgactggtgtcctcgcctatacggttggttggtcacaccaccgttcatgggcatccacgtcttcaccgactggcttgccttagccaccgccgactggtgtctctgcctacacggctggcctattatgccgccgttggagggcatcttcgctttcaccgtcgaccgccttcgttgccgctgactggtgtcttcattgttattgatggacgactttgttcccacattggccacctctgccatcaccaaggggaatattacaaagttgagtcatcatttatttcattctttatatgatattttccttttcctctgcctcactatatcaactggttcgccgttgactagtgagtcgggggctacagatgttatatcatattttttaaacaatttttataatatttatcttgattgcttgcgatataatctgagtacaaaagtgcctatcgagttatggagttctatcttcctatgctttttgtttggtttgccgatggatagttgcctttgggccgattcctagcacccgggggctcgttggatggaccgagtaacgcaaggtgctaagtattattcggaataaatcaaaagcatagagataagataaatttattgtttgctcttaacaattgcaaaagtacccgagtagtaaattctgatccgtgaaactttgttccattaatgacgaactcatatcactcatatgcatgtttgggaagtgcctaggccgacacccgatgcttgggggctatgactagtcgggcagagtgtttaaacgtaatgagtcatctgctcggggaaatcaaaattgacaagaggagaaaaacatatttataaacattttaaaatgcttgaattttcctctagtattgtatttacatcagatactactcatcctatatgtttgttctgtaggatccagatccagatatgcacaatagggattcatggctttaagcttatttcctacgcttcaggaataggtcagtcagaacatcaccaccggcttgccttcgccgccgccgactggtgtcttcgcctgcacgattggcctattatgttgccgttgttgggcgtctacgtcttcactgccggcttgccttcgctgccgccgactggtgtctccgcctacacggctggcctattatgccgccgtttgttaggcgtctacgtcttcaccgaacggcttgccttcgccaccgccaactggtgtctccgcttgcatggctggcctattatcccgccgtttgttgggcgtctacgtctttaccgcgggcttgccatcaccgccgccgactggtgtctctgcctgcacggctggcctattatgccgccgttgttgggtgtctacgtcttcaccgaccggccgcctcgtccgccactgactggtgtttttgtctatacggttggttggtcacaccaccgttgttgggcatctacgacttcaccgctggctcgccttcgccaccgccgactggtgtctccgcctgcacggctggtttattatgtcgccgttgttggacgtctacatcttcatcgaccggccgcctcgtatgacgccaactggtgctatcgtcttcacggctggccacgccgccgccaccacaaataggcgtcatcaccttcaacacaagctgtctacgtctgttgccgactggtttcttcacttccatggctgcatgattctgccagtgttgattggccttatagtcttcaccgccggtcatctcgtctgctgctgactagtgccctcgcctctacggctggtttataccactaccactactgatggatatcatcgtcttcattgctggccaccttgtctgatgccgactggcttgttcgcctccacggctgcgcgtcttcgtcatcattgactggcgtcatcatgatcgctggtttgccttcgccgccgcccatggtttcttcactttcatggctgacttattttcgtcgttcaaggacgtcttcattttcgtcatcattctacttcttccgtcgccgactggttatgccgccgccgactggtgtttttatcttcacaactacgcatcttcgctaccggtttgcttctgttgccgccgactcgtgttcacttcatcacgactattcaactttgtcaccatggtggagcgacttcatctttattatcttcggcaccggcagactctattgtctctactttgtaagctttgctacttcaccaactacgacgtcttcaagagcctcgacatcttggtatgcgtcatcaaatatgatgccgtgttattttactacaacaagtggtgttccaatattcaagatttctactcggacatgttcaacacgtatcttcactcaagtgatggctactcgatgacaagaagctacaattcttgactctatgttcagttgtttctcaactaaccaaagagtctagggctacacaaataccagactcaaaattcgacaagctttatgtcaagacaattccccttgggcaaaattctccttagctatcagtaccaaattttgaacaatgcatcagctaagatagccgtcggttcgatggttggagcaggtgggccatggtggtttctacagacttggctgaacttagtagccatgaaagctgtcaatcggccatcagtgatagaagtagagttcccaagactagagccgattacagatgatgatggagaagagcgaacccattgcaggtgcatgtcttatggagaatatgcatccacaccagccgattctggagcaaagctatcggctgaactgctcaaagactggttctgcagtttctatgaaggcttccagagagatgctcgggtttggttcccatatgaggactcaatgaatttcgatctcccagcagatttcagatttgaggatatcaactccgaaaaatttgataagtctagagaagtcttttcagctgctattagtccatgcatccttccagttggcatctatcaaggaagaaacattcaagtttcttatgaattttatcacccaatgagttcagctaggcagttcggaatgggacaattgccgatcggcttgtactttgccgataagatccagtgcaggggtgatatatcttcagccttgatgatggatcggctgctgaatatcccaggacctcaacttggcagtattgagaatatagagtttgcaaggttcaggagcaaagcctttgacaaatggtggggtgaatggaaattgcatctgttccatcaatcggcttccatgtatatgacatacctcttcccagatgccatccctcaagtaagtcttttcattatcaattttgtaaacataactgttagccgattgataccttatctaatttctcttctttcttgcagacaacagaatcctcccctcctcgcaaaagcaacagtggcaaggacatcgagtatgctcctggccttattccaaatggaggtggactatctccccctgtcatcggctaccatgcccccaggacctcaagtctgctctaagggcaactgagagaaccagtcgatgccggcagaaaaaggaaaaccaagacatcggctattgatccatcggttctggctccaaagaagaaggccaaaaagaagaaatccaagctagccgatgacttgcctgccgtagatccatccattgaacaagctttggatgaagaagaacttagagaggatgttgatcaagctgcagccgaaatgagtgacccagaagataaaacaccatcggcttctccaaaacaaactcctccaactcctactgctccagctcattttaggagggtaaattacttgtttcaatcatccctttttagaataatcaaatttgaacagccaattgcttactagtcttgtacttgcagaagaagaaaactgccgtgaagaagaaatcggcaacaatagcatcaaagccagctccaccggtaaggttctttgtatctttaagtacaatcaaagccaacattatttaacacttgtctttttcagcttcctcctccttcgcctgctgtgcagccgatgtctagcgaatggactctatcggctacaggcagccacaacgttgaaggagaagaacaaccaactgttctgttttctttcgcaggtcttaaccgatctgttttcttttgacatcaaggattaccttgatgaagaagaagaagacaccactagcaaagcctcagctactctgtccgatgatgtgaagagaaatcttgaagacatatctcatcagctagggtcatcattaaacagcttggtagctgattgtgcttcaatccgggcaagatttaaggaaattcaacctctaatcccagatgatctagccaacgttattactctagctgcttatcttgagcaacaccaattcaagctgaagaaaggtaagcaaagattagtcgatcgccgagagcgtaaggatatcgaaactactatccaagccaatcgacagcttgtacatgaagtgaaatccaagcttgatcagctatctgaaggcccgatcaagtccaatattgatcggctcgaggctcggaagattgagctcttggcactacttcaagaatgtaacgctgagctgtctttggagcaacaaaaattggctaacctaccaaaggctattgaagagcagaagttgaggctgaaatcggctatcaggaatattgccgatatgactaagtccctcaaagtcatccctggaaccgatgctcaagacgcccaagccatagaagaagtaaagcaaattaggcaaagggctatatcggctattcagtaatatttgtctcaatgactatccatgtaatagggcttagaaaattcttgtaattggctaagatattttggtacttcaccaactaagtaactgctttgataatcctttatgccgattaacataacttctgaatttgcctcaaaaatttcaaaaatatccaactttgtatatatatatgccccccctaattttgtaatgacgaagacattgataaaattataaattagtctgtgggcgatataaccatatcggccatcatacaccggcaaaacacagccgattatgaagataaaacagctaagggcgatattactatatcggccatctcaaggcgatgcaaacacatcggctctacatgcatcggcaaattcagccgatcatgaattaacccatacacttgggtaatatttcttcaagtatttgccattaagggcccgtccataaacttccccatcaagtctttgcaacatataagctcccttggacacaacattgtggatttgaaacagtccttcccaatttggcgaccacttgccgaatttattatcacaagttcctatcggcaagatcaacttccaaacaagctctccttctgaaaaatatttaggcaccaccttcttgttataatgtcgagcaaccctctctttatcctaagtaactttttcaagagcccgcaatcttgattgaaccaggtcctcccgttcatcgaccatgagattgtaatactcatcgactgtcaatccatcctgtaaatctgttcttcttgagccgattctcacttcccatggtaaaacagcttcatgcccataaacaagcttatagggagaaacttgaatcgatccatgacaagccatccgataagaccataatgcttcagccaatcgagtatgccattgccgaggataatcagaaatctttcttttaatcaacttgatcaaacttttgttagatgcttcggcttgcccattggcttgtgcataatatggagaagaaaacttgatacccatgctatcggcaaaccgaacaaactcatcagacacaaatatcgaaccttgatcagttgtaatcgtctgaggaatgccaaatcggtagatgatatgttccttaacaaactgaatagctcccctgaatcaactttcttcaatggaatagcctctacccacttggtgaaataatcggtcgcaacgagtatgaacttatgccccttgcttgaaggtggattgatttggccgatcatatccataccccatcctctaaatggccatggcttaataataggattcatagctgatgctggtgccctctgaattgccctaaacttttgacaatcttgacaccttttataatatctgaaataatcttccaacattgttggccaaaaataccccacacgccgaagtaaccacttcatcttgtgagctgattgatgagttccacagattccttcatgtacttcgccgattgcagccttggcttgatcggcactcaaacacttgagtaacaccccatcaatcatccggtaatacaactcatcatccaacagggtgtatttcaaagctttatttcgtaattttcttgaagccaattgagacggatttcgcaaatactgaaatacatcatatctccaatcatcggctgtaatcgtagcaacctctatctcaacatctctcaacatcggcttatatcccgatgccccttgagccaaatcattagcttcaatgttttgctctcttgacacatgtttcaaagttaccagccgaaatccactcattaattctcggcacttctcattgtaaaccatcaatgtatcattcttggattcatattctcctgccaattgactgattaccaataaggaatcacccatgatttcgatagcgtcggcttcaacttccttaagcaattgcaatcctttgagaacagcttcatactcagcctgattgttagtcgcataaggtttaatagtgcaggcaaactcaaaacttgcccctcgaggagaaattatgaccaagccaataccacaaccatgagtgcataccaatccatcaaagaataaagtccatggcacaatttctaccgagtcgattgagtcatctcgatgatccacaataaaatcggctatagcttgtcccttaatcgcctttggtgactcatatcgaagatcaaattctgtcaaagcaaatatccacttgccaacccttcctttgaaaatcagagccgatagcatgtatttcaccacatcggccttacatatcacaatgcattcatttgacaatagatagtgccttaacttggtacaagagaaatataaacacaagcacaacttttccacaggagaatacctcgtttctgcatccaagagccgtcgacttaaataaaaaacaactctctctttcccttcaaactcctgaatcaaaactgaaccaatctacttatcaccagccaatagatataatctgaaaggcacccccttttgtggaggaataagaactggtggagaactaagatattccttgatactatccaaagctttctgttgttcgggctgcaggaa

SEQ ID NO: 5692 - DNA, 11274 bp, Oryza sativa
  unsure (1)..(11274): unsure at all n locations
ttcggtcacggaaaattgtgtagtaaatgggaacgaccgttcaacgtcatcgatacctctttgcacggggcaatcacactccgcgacaattcaggtaatatattcaaggtaaacagtcaacgcttaaagattttccttgagccaaatgaaactttagatgaagaagtggatgtcattgaattaattgattatgaactatgatgatttcatctaatgcatgcttaaaaccctgtatagttgtcatttttgtgcttagattaggttttaatgagcctagggaaaaattggcagctagctggacccactagggttcgtccgaacctgctggttcggctgaaccagggcggcgcccgatcagccccaattttgaacctcagtctcccccgctcatctatagtctgttgtgatgcgcattcgggggtagatcagtcgtatcagacccagaaccctgtccttcctcctctctcccacttttgcaaacctcctcttcttctcatctcaattccattgcttcatcaccctcaattcaccagtggctggcaaatctttgatcccattcatcggctcttcctccaactccacatacaaccttgacggagagccgacaccggtgaatcaattgatcctggtggagcattacacgatggaaggggtgaatgcactgtgggcacaaccccttgcaacagtgccaggctcccctgcgattctggagctgatcggcaagctccctggttcggccgaacccttctcggccccgttcggccccccgttcggtagtgcgatccctctcccctcgccatgtcacaaggacaaaaattcggggggattcgcttgcgcgacggccgacaacgggagaactcgtcttgttgaaggcgcgacgccttttccaaaatgatgagaaggccgctccacctcccgccgagcgctatgtaggcaccctgttcaccaaggcaggggatgaggtgttccataagtatgttacacccaccgctactccatccactccgaaggaggagcgtttccacattcaaggagtgcgaactcctggtggcgggtatggcaagggtttactccggccgttaacagcatcagagaaggagggggcagcggaatcccatagccctccacctatgaaggtgaagcataatttgacaccccctccaattgtgagggctcctggccaatatcaagaagatgaggtgaagtcgccggaaccctcgatccataagctcgccgcacaagtgaagaaactccgcaaggagaacatagagcttagggatcgcaacacggagctaggggtagagcttgctgaatttagaattaatttcaatagccttagtcgcggtttgtgcgctgagatcaagcgcgcattcgtagaaatgggaaaggaaaataagtattacgctaattagatgcttcctttccatgaataacatagtagtaggtgcttggttttatttttccaatcatttaagcacttgctacgaataatgtggctcattggtgttaaccccaatgtttgccaaaatttgttttgtttcatgtttaataaaatttaggttttgaataagtgtgggggagatatctcagcttcttacgtgcacataatctgaaaattacttaatgtctgaacacctggaaggcactgaactctgcagaaaattgcagaggtattgggcaccagagtggttcggccgaaccaccaggttcggccggaccagtgttggccgtagtacctcccagttttcacaagtaagcaggtgagcacgtcttttatctgtatatctccaccatgatatagtactagagctaaaaatttagaaaacaattggttcaagcatatgtgaaagataaaatttccaactaatgaaattcttcatgtgattaaacttgtatattcatcattctcagctgaacttgtgcttgtgaaccaccatccatgtttagcgaaccttatgcatctaagtaattgctttatgtgagatgattcaagatgaagggaatccttgcaactcttgttatgactcttgggaatttgttttcaaaaataaaatggtttaaaagctcaatcctccaattgacttcatcttatacctaccaaggtgtcacaccctgaaaattcaaaatatataaattgttgcttaattggaatttttagaaatgattttaaaaaaaccctagaagagaagatctaattttaattaataaattccaatataaaatggggccagataaaatttcattaaatactttgcttaattctataattcctagatttttctgggatttatttgagctaaggaagtatttttaataaatggaattgcatttcatgaataatttaaattgaaaaaggttttttaaaatcctcttttggctttgggccgaaagtcggcccaaaacccttttctccctccccggcccaagtcggcccagaccgcagccgccgcgcgcgcgcgttcggtcgctgacaggtggggcgcacctgtcggacccatcgtctacctccggccgccgccgcccgaaaccctagccgagccgcgccgccgtccccttcaaaatccggccgctcctttccttctccggtgaaatcttttgaggggaaacaatctccgggatctcctccaccttttctcttttggaatcatcggcttaatcgttttggaagttcgtggattcgaggtcgaatcggatcggtctctttcctccgaaccccgaggtttccttcgcgtcgccggtcgccgtggtccttcgccgccgcctcctagcccctttaaaaggatccccaagctctcctctacccgtcgccactctcgccttcgcctctcgtcgtccgtagcgccctagcgtcgtgtaacctagcgccgccgtcgtcgccgccgctcgagccgtgcgccgccgtcgctcctgttgtcgccgtcgccgtcgctgaagaccgccggagcaccgtcgccgtcgtcgagccgaaggtctccgccgtttcaacctcgtcgccgtcgccgtccgctgctcctccgccgttgctttggtcaccggtgagttcgccgcgtcgcccgcttcgtgctggtgtcctccgttcgcgctgcagcgccgtcgttcgccggcgagcatgcgcgcccgagccgcccgagccgccgccggtgatgacgtcaccgctgacgtcatcgggaccgtccgccgtgagccggccgtggaccaatctcggccgtccgttttggatggatcaatctcggccgttcgtttccgtgtgccgccgccgtgcgcccggtccaccgcaaaccctagccgctgacgcaataaatccctttttccttttcaaaaataattcattattgcgtcataattcaattaaaatcaatataagtgttttaatccgattaaatcttcaaaaattcataactaattcatcttagctcggatttagtgggttcaagtctctaaatttttctaaaattgagatctacatgttaaaaatatccacatgtactgttcatgcttgtttatgtgctgttttggtgattttgctctttcctgcttagattctgacgttcccggagagtccgttttcgtaggagaagattttgaagagttccaaggccagcaaggcaagtcacacagatcccaaacaaccctttgagcatattgatcccgtttaaagctattgtttcttttcaactattgcatttattttcaaatgtcattgggtggaattaacctattgtttgttatagcccttttgttctggattactttattccttgatatcttgggttattataacttgactagttgagctctatatgttggttcaactagatgtattagatataattgcttagccctgcttagaaactttagcacactattgggataactttatgactcactattatttaatgatggcttattgatagttcacgatggtcaatcgtgattggttaattaattaatgtgccaactaaaacttgataatggtgggttgtgagcacatggttttgagagtcgtgctcatgacaattaaggaccggttcacgagtttcggttgtgaaacattaaccatgccaaccacaagccaacatgggcaacggctttatcttttgtatagcatggttcattgcggggcaccagactgagaagtggcagagataagcccacgggggtcactggggagtccatgccttgtttataagggggtgattatgatccaggaaaggtgcactgtagtggattgtgttgtgcaaggggtattgtcacaactcctttccgaggtaccgtggtggtattgaggcacatggtgacatgatgtggagttgtgtcttgtgggtacagtggtacacctctgatcagagtaaaactattcgaatagccgtgcccgcggttatgggcgggtctaacaatgtctttcgtgattagtctcacacttctcaccataataaatgatgctttaattgataataatttgattagctcctggtttggaatggtatattcctggtttggagatagatctgtacagccgggtatggttgttcagaatggttgggcctatacaacagggtatgttgtatagcgttggattaatattgtttaattattacttaacagtttcattaaattctgaaatgtttattaaatgctgtttatgcaaataaaaccctactatgccatcctttgttatcctgtgcacttgcatgtttgctgcgtggcttgctgagtatgtcatatactcaccttgcaatcattcatcagaggaagagttctacaatgatgctgatggtgtggaggattaggtgtagccctggtcaagctgcctgtggagtggagtcgtctgcgccgtttatcttattttccgctgcttagatctttattgattgagaggaactatatacctctgtaatgatattttattcgcttattaattagaataataattgtactctattatcaatttgttattgtgtgcctcggctgattcctggacgagggattcacacacatgtaagcgtttggaattttggatagaaattccgggcgtgacaagttggtgtcagagcccccttgaccctaggttatgccaaatggttacccatagaagccctctaaaaattattggaaaagtagaactgttctcctccccttctcttttaattaaaccaaactaatggcacatgcacttcataatctcttttaatggttctcattcaaaatctattccagtgttattagtactgtacatctattactgtactaatggctcattttaccagcaaaagttttacaatattgttttatttaatcttgatgcaaggaaataaatttagcatgttatttaatcttttggaacctgttgttcaaaagtacaaaatttgtaaccctgtttccaactgtttcaacttatcttgcaagcttggtttattttatttacttaccttttactttgattttctaactttattcaaattaatccaaaaacttgtgctattaattggataaatgtcttaactccctcctttcacttgtctttagatgccgcgctacaagcctgagtacttgtttggtgttgagggatttgtccaggagttgcgtacgatgtcctttgccataggatttgggactgctcctttttatgctcagattcctcatgatcgtcatgaagagaagtgccgagtcaaagtcaccttgaacagtaatagtgaagatgtcccctcagtgatgttcgaagctagaggaagaaactacaccatgcatgtcaggaggtggcaaggatcgccataggagagctccgcgatcgctatagtgatcagttggccgacactgagtatcgctaccatcctcgccaaccccagggaagtgaccgtggcagctacctagagactgaaggaattgagaatgatgctaccacaaggcatttggttgagatgctgtgggctgtggatgaaacccgtgcggagactgtattagcagctcaagatcgtgaagaccggaatcgtggaaagatttgcaagctagaggacaaggtggatcgtttggagaaggaattagccgcattgaagggagaagcaccaccgcagaaggccaggattcgtcttaccgcaaggaagagagctctttttgtccctcgctaccaattggcgccaaaggtccgtgtggtggaaaaagaagttaccccagttctagtagatcctccggtcatcaacgtaagtgatgatgaaggagaagaatcgaagcacactcattccaagattgagtggagagcaactcaagatgatgaagacgagccgaacgagccttcaatcaactccgatgcccggaagaactagaatgccatgtcaagccgttgtcttagatcgttgtgttagcttgtttgtttaagtttggttgtgtgggtcttgcgtgtaatttacatcagtggtgggatgtaagtgcatgcgtttgtttgcttctgagtgttaggaagttggtgagtttagtggtgtgagagtcttcagttttgtaataatgaaactcacttaagatcaataaaagttaaagtaattctctgtcctaagtagttttccccggtttctcttcttgtgtcctgcccatgccagatggtgctcactcacagcaatgggaatggcccccaacaacaataacaacaacaacaacaatggagagaatcccacacttgcccaagtcctggctcaacagacacaacttatgaacatgatgatgcagcaactccagaaccagcagaaccaggggaataaccatgcacctccccagaacaagttagcagaatttcttcgtgtgaggccgcctattttctctagtaccactaatcctgttgaagctggtgattggctgcatgccatagagaagaagttggatttgcttcagtgcaccgatcaggagaaggtctcatttgcatcacaccagttgcatggccctgcctctgaatggtgggatcactttcgccttaacaggactattgctgaacctatcacttggcttgaattcaccgctgctttccggaagacgcatatagcatcgggagttgtgtctctcaagaagaaggaattcaggtcgctcactcaggggtctcgctctgttacggagtatctgcacgagttcaatcgtctggctcgttatgctccggaagatgtgcgcaatgatgaagagcgctaggagaagttcttggaaggacttaatgatgagctttcttactcactcatgactggggattatcttgatttccagaagttagtggataaggctattcgtcaggaggacaagtacaatcgcatggaacagaagaaacgccggattgctcaattcaagacacaacaggggaataatcaaagaccgggttttactttaggacccccatccatgccacaaggaggttttttgtctgttgtttgtccgcagggtcagtttttcaacaacaatgctggcaacaacatccggtaatcaagctccacgccctgttgcagcttcgacacagcaacaacctgccaagaaggagcaaggcagcaagcccgtggtgtgtttcaactgtggagacccaggacattacgctgacaagtgtccgaagccccgacgcgtgaaggttgtccctgcccagagcaactctaccgcaccagcgccaaaggcccgtgtcaatcatgttgctgctgcagaagctcaaggtgctccagatgtgattttgggtacgttccttgttaacttagttcctgcaacagtgcttttcgattctggtgctacacattcattcttatctatgagttttgcgggaaatcatgggatggaagtagaagatcttagacgtcctttgatggttagtacccaagtaatcaagcactctctttgcaacgtagcccctctgtcagaatagaaattaaaggagtaccatttctggccaatcttatcctgttagaatccaaagaccttgatgtcatcctaaggatggactggttagccagacataaaggtgtgatagactgtgccaatagaaaagtaactctcaccagcaatgatggtcgagttgtaactgttcatgcattgtcttctgagtttttaaggtcgagactgaaccaaatanctttggaagagattcctatagtccgggagtatcccgatgtgttcccagatgatttacctggtatgccgcctaaaagggatatagagttcagaatagatttggtaaccaggaacaactccgatccataagagaccttatagaatggcagccaatgagttggcagaagtcaagaggcaagtagacgatttgcttcagaaaggatacatcagaccgagttcatctccatggggagctccagttatttttgtggaaaagaaagatcatacccagaggatgtgtgtggactatcgtgcactaaatgatgtgactatcaagaataagtatccgttgcccagaattgatgatttgtttgatcagcttaaaggtgccaccgttttctccaagatagatcttcgatcaggatatcaccagttgagaatcaaagaggaagatatacctaagacagcttttaccactaggtatgggttgttcgaatgtactgttatgtcttttggactcaccaatgcccctgctttcttcatgaacttgatgaataaggtgtttatggaatacctagacaagttcgtggtggtctttattgatgatattcttatctactcccgaaccaaagaagagcatgaagaacatcttcgccttgcactagagaagctacgaggacatcaactgtatgctaagtttagcaagtgtgaattttggttgtctgaagtgaagtttcttggtcacgtcatctcagccggaggagttgccgttgatcccagtaatgtggaatccgtaaccaactggaaacaaccaaagacagtttcagagatccgcagtttcctaggcctcacaggttattatcggaggtttatagagaatttttccaagattgctaagcccatgacacggttgcttcagaaagatgtgaagtacaagtggtcagaagaatgtgagcagagttttcaagagttgaagaatcgcttgatatcagctcctattttgattttacctgatccaaagaagggtttctaagtgtactgcgatgcatccaaacttgggttaggttgtgttctgatgcaagatgggaaggtggttgcctatgcatctcgtcagttacgtccgcatgagaagaactaccctactcatgatcttgagttagctgcagtggttcatgcgttgaagatttggcgtcattatcttttcggtactcgtacagaggtatataccgatcacaagagtttaaagtatatctttactcagccggatctgaacatgagacaacggagatggttggaattaattaaggattatgacatgggaattcattatcatccgggaaaggctaatgttgtagcagacgctcttagtaggaaaggctattgcaaagctacggaaggatgacagttgccattggaattatgccaggaagttgaaagattgaatttgggaattgtccgaaggggtttcgttgcagccttagaagcgaagcccactctaattgatcaagttagagaagcccaaattaatgatcctgatattcaagaaatcaagaagaatatgagaggaggaaaagctattggtttcttggaagatgagcaaggaactgtatggttgggtgagagaatctgcgtccccgacaacaaagatttaaaagatgcaattctgaaagaagctcatgatactttatactccattcaccctggtagtaccaaaatgtaccaggatctcaaggaaagattttggtgggcaagtatgaagcgtgaaatcgcagaatacgtagcagtatgtgatgtttgtcagcgagtcaaggcagaacatcagaaacccgccggtttgttgcagcctttgaagattcctgaatggaaatgggaagaaatcggtatggattttatcactggtttacccagaacgtcaacaggccatgactctatttgggtgatagtcgacagatttatcaaagtggctcatttcattccagtaaagacaacctattccggaagtcagttagcggaattgtatatggcaaggattgtgtgtttgcatggcgtccctaagaaaatagtgtctgatcgaggcagtcagtttacttcaaatttttggaagaagcttcaggaagagatgggttctaagctgaactttagtactgcttatcatccggagacagacggacaaaccgaaagggtgaatcagattttggaagacatgttaagagcttgtgctttagacttcggtggaagttgggataagaatctaccttatgcagaatttttgtacaacaacagttatcaagctagtcttcagatggctccttacgaagcactgtatggtcggaagtgccgcactccgcttttgtgggatcaaacgggagaacgtcaggttttcgggatggatatcctaagggaagcagaagaaaaggtaaagatcattcaagaaggattgcgagtggctcagtctcgtcataagagttatgccgacaatcgccgcagagatttgagttttgaagaaggagattatgtgtatcttcgtgtcacgcctcttcgaggagttcatcgtttccacaccaaaggaaattggcaccgcgttttgtgggaccttataagattgtcagtagaagcggagaggttgcttatcagttggagttacctcaatctttggcaggagtccataatgtgttccatgtgtcgcaattgaaaaagtgtttaagggtacctaccgaagaagctaatcttgaacagatagaagtccaagaggatctgacctatgttgagaaaccaatccgtatcttggaaatagatgagagaagaaccagaaatcgagttatccgcttttgcaaagtccaatggagtaatcactcggaagaagaatcaacttgggaacgagaagatgaattgaagtcagctcatccgcatttgttcgccagttcttccgaatctcgaggacgagattctgtttaaggggggtaggtttgtcacaccctgaaaattcaaaatatataaattggtgcttaattggaatttttagaaatgattttaaaaaaagcctagaaaagaagatctaattttaattaataaattcccatataaaatggggccagataaaatttcattaaaaactttggttaattctataattcctagatttttctgggatttatttgaaccaaagaaggtctttttaataaatggaattgcatttcatgaataatttaaatt

SEQ ID NO: 5693 - DNA, 4356 bp, Oryza sativa
  unsure (1)..(4356): unsure at all n locations
gtataggattagtgcacaatgacagctaataccctgcaatataagccggtcaaagcctgcagttcatcttcagctatcctttttgtaaacgatcatcttcagttaccttcagcgatgactgaaaaatcgctgcctcaatatcgcagagaaagagctgaactgtttatagtttagtcctgttcagattcttatttcacaaataaatccctgagaaaactaattgcaggaatggaccccttggctcttactttttttttccctttccaatatattttattgttgtcttacaaatttgggaacataaattacatactaacatttaactttatatctacaaataaagaggactacatgtaaaaaaacagaacatgtagtatatatcatttcatatgtttcaagttaaaaaatggaacatgtagttttaaaataatattgggagaataatagtcaacataaattatataatacatttaactttatagctataaatagaaagtactccccccatcccaaaatataagcattttgaggttgcttagcaaatactaaggttaatgaaaaagattccctttcagtcacctcaatggtcaaattttgaattgcttagattcccttcccaagcacctgactagctgaaaatgtatggattttcatgcaatgaactcagtgccccagaaatgcttatattgtgtgacaaaattcaatcctagagagcttacaaattgataattttcacatttaggaataaagatgaatttacatataaaatatgtaggttttcacttttcaatgaaaattaggggagtacaaatgtaggattgataggagaaaggtccgtaaaaagatatcgtcagtttgaaccttgctctcttggatgaaaagcaaaacccttaccactttgttggcattgttttgttgtgaggtaatgtcttccacatcatttttgagtggtgcagaggtcagtgccaagcattggcattgacctctgataacatgacaaactcacagaaagagctcaccagcactgaggcattatagctcaatgcctttgaggctggatctgagcaaagggtacattcctgcaattagttttcccaagaaaccagaaagtgctaaattacaaaaagttcaggacaaagagggttggtagctattctgcactgtaatggtgtattgcattgtcataagataagcagatttttttcctaaactgcaaactagctttaaacatactggctttatggtggctacacaaaatattccgtagcatggcataaatatttatttcaaaccctgaagagacagaaccgatcagagaaataggcgctgcaccacctttactcagttatattctctccaattccatgtcaaaaacagaaaaagcagtaaccaaggtttggatctcaattctcaaatattggtatcaacttttcttattgttttcctgttctttccagccaacatcacctcctgctctagctagcatgcactagctagcagccaaggtttcgatcccagtctatgtcacattttatcaaacatttaaccatcaaatgttctgggccatcaaaaagtttggatcatcattaggcccacatattggctgaatgaaatattgttgcctggttttttaagctaaggatcctggttttttcttgttcaaccgatggtccaggccaggaaatagtaacactatttcaatccactcaactggtacctaaaagtattaaacacttctaagtactatccaggaatggtataaaaaataagtatcgaacttctgcacgtaaataaataaataaatggtaaaaactactccctccgtcctaaaatataagaangtttggttggatgggacactaagaatatggacataggatgtgttccatccaaccaaaactcattatattttgggacggagggagtacatggaatataagacccatttgaaaaggaattaactataaagcaactaaccttccgccaccagttcctggagtgctttatcgccctccaccagtttcagtgctattccatcaagcccagttgtatcccacatcctatcagcctccttattcagatgctcatttgatctcatgaaaacagttttacttccttgccattgcccaccaaatttgcttgactcggcctctggtgctggatcaccattctcaacaactgaaatatcttgaactttttcaggtgcaaaagttacagatgctgaagcatcctcgccagtattcttttcagcttctccgaccaactcaaactttggtgttcctaaaagttctaatggctcttctgttctattccagtggcatactatatcaaacttaccatccttcggcagctcaacaacacggttattaccatcttcccatattttatcttttcctcccaccaaaaatataacaaatttaaactccacaagtgtttctccagggagcttaagctggcagacccaaccatttgtagtccattccagttcaacctgctcctcccatgaaccaagctcctttgtggaaccgataatgcctacatgctcaccaaacttaacctggtgctctagacaaacctggagatgcaccaatggctgctttgaagaatctcttctctttttctcctttgttctgtacaatgtacagtcaaattatagcaactgtaaccaattaattgtccagaaaatttaagtttgtaaactggaaagtaaatgtgtgcaataaaactctttaaaatgaaccttttcaggttcacaattttagttaatcacttgaagccagaaaagaaaaggcaaaccaccattgtggaaaaataataataatgacagacagattgtcaaggaatatggagatagtcagttagtatacagaagtctagataatgaaattacgttacattatctctcattcaaaatttaaatagcaatcaagtgtaaccatgtttcattgatcctgaaggaactataataacttaagtaaacaaataacgaatgcagtctatctcagtttattatgcttttattttctcatataccgctacgttggtccaatatttggcatttctttgattgatcccttggttacattaggtagacttgttgtgttgttgcttactagtttccatataaacttgttctattgggctgtatcacaagtttattagtagcaatttccaatcgtacgatgttgacagaactagagttgcaatggataatatccaacacgaaagacatctcggaacaaactatacaatacaactgcccccaacacacagagcttcgctctaccaggtttattgcacgcagcctcatgaaagcataagagagaggaggaaaaaaagaacaagatatcacctctctgccgccgaggccgcggatctcccgcggcacgcgaagccgcgccgcccagggagcgccatcgctccccggcggagcagcacacccgcaccgactccgggcggcgggaggacgagaccacggcgcggcctgccgcctatggagagcgaggtttcgaggggccgcagcgacgtcattgatcctcctcaacggcaatccgccgaacaggtggcggtcgctcccggaaggcgtcgccgcgtcggtttgttcgagaaggcacggagggaggggaggaggaggatctggggctcaaaagcaagcgagcgagtaggcctcggaccgcgtgcgaggaggatgcgctgcgaggaggacgggtggagtggaaacgagaagaggggcgagacgatcggggtggtgccgtcgtggcagactgacaggggaggggaggaacgagtggacgggccgacggggttcccgtgaccgtttgaccggccccatgcgcgaccaccgtacttatcatatattcggacctgtttggagaaagtttaatagtataggtaattattagcttcaatttatctatagctaatcatatcttatttatataatagttaactataaatatatattatatcatcaatatatagtcccacctctcatacacactcaacgtattggagtccgttctgcagtctgctacaaatatgtagcccgttttcgtctctctcttctcttctctcctccacatgtgcttacagttgacttaggagtccattctgccgcctgctataaatctgtagcccgctttcctctctctcttcttttctctactccacatgtgcttacagctgacttatagcatgttattgtactcgctcttagcatgttattgtactcgctcttagttcacgaaaagaaaatttttggttgtcacatcagatgtttgaccggatatcggaaagggttttcagacaccaatgacaaaactaatttcataacttacctagaaaccgcgagacgaa

SEQ ID NO: 5694 - DNA, 35369 bp, Oryza sativa
tcctttgttatggcctgtttgcattgattactttattccttgataccttgggttattataacttgactagttgagctttatatattggttgagctagatattagatatgattgcttagccatgcttagaaacattagcacactattgggataacttatgactcactattatttaaggatggcttaatgatagttcacgatggttaatcgtgattggttaattaattacttgccaactaaaacttgataatggtgggttgtgagcacatggttttgagagtcgtgctcatgacaattaaggaccggttcgcgagctactattgtgaaacattaatcgtgccaaccacaagccagcgtgggcaacggctttacttttcgtatagcatggttcattgcagagcaccagactgagaagtggcggagataagcccacgggggtcgctggggagtccatgcctctggtttttgagggggtgattatgatccaggaaaggtgcattgtggtgggttgtgttatgcgaggggtaatgtcacagctcctttccgaggtaccgtggtggtactgaggcacatggtgacatgttgtggggctgtgtcttgtgggtacagtggtacacctctggccagagtaaaactattcgaatagccgtgcccgcggttatgggcgggttgagcaatgtttttcgtgtttagtctcacacctctcacaataattatggatgttatacctggtaataatttgcttagctcctggtttggagttagatctgtacagcggggtatggttgttcaggatggttgggcctgtacagcatgggtgtgctgttcagtgttgattaaaatttctgattaattactctactgttttactactcttaactctttgctaaatgctgctttcgcaaatgagcctatattatgccatcctttggtatccttgtgcacttgcatatttgctgtgtggcttgctgagtatgtcatatgctaaccttgcaataatcaatcaacctcagttgaagaaaaaggatccagaaggagaagacgtttggcttataccccagttgagctgcctgtgggagtggagccggagcttcgctagattttattttccgctgcagttttcttcatggtgaggactaagtgcctcttaagtaagtatttagcgttttagttaatttgatgaatctgtatattaaattgtcagtttgtgtacctcggctgattcctggacgaggattttatgcacaaataagttcggaaattattagtgaatttccgggcgtgacaccatgtcaagcaccacaaagtctatcgggatgaagaaatcccggatcttcactggtacgtcttcagcaatacccactgggtagcggaccaaagattcagctagttggagacgcatcggtgttggtgccaacaccgcgaagttgagtttttcgaagacctcctttggcaagacgctcaagcttgctccaaggtcacagagggcttggtcgaaatgctgtgtcccaattgagcaggtgattgtgggacaccccggatctttcttcttctctggaagtcggtggagtaaagcgttgctacactccttcgtcagtttcaccacctctgtggttgctacactccttggtcagttcctcctttgtcagtctcttgttgtttagaatgtccttcaggtagcaagcgtgtgtgggtacttgcatcacatccaaaagtggcacgtttatgtggatcttttgaatgacttcaacaaaacgagaggactgctcgtccacggatggctttcgatatcattgaggaaatggcagcagattggtatcacgatattcctgaggtgctatctcctctgtccctgctgtgctagattgagatgtatcctcgctgttcctcctagttcatgcagtgttaagatacggtggatcctaagtcgattttcctcccctcatgatgattgccttaacattttctatggagggttcgggttgccctggaatcctcccagtctcattagcagggactagagtagctagttgcgtcagctgagtttctagcattttattaaatctcagctggttttggaaagcggaagcaaagccatctagcttaacatttatgttttctaagatcttgtcattggcagctagtttcttgcttagagcaccggtagttttagcctgaataaaaacaagatctttcaaggaaggctggttgttgaatgtatcgttattgttgtcgctgcctccttggtagttggagcggagctggttccacccctgacctccttgtggacgagcaaaggttcaagcttgggggggattattgacagtcgttatcgacaagtttcgaccatcaatattatccaatatatgaagactagctatgctcgcaatgcataattcccaaataaaataattacttccactatatgctttgctactaacatttatgcaggagaagcattcataaatgaagagaacgaggtggaaatatatcgatcaatcagtcaaaagtctgccggtgatctacaattacacgagaaggcccaaaagtccaatttaataatcacaaatgggcctagaatgtatgtcactgattcaggggcccacatggaagtctcctgaaggaagctgggggctagaagagccatagggggtcggccgaccccttgttgagcccaatccagtcgcattttggccaggacaaaagggaggccgaggagaaagcagcaggccaaaaaccaggcctgttgggcaattcccctttggcgtggacgctccggatgaactcctgatggcggttgcggggcatttccgacaattcccatgctctacaaccgtcattgggtgctataaaaggacctcacctccttcactttcaatacacactcaagcaaggataaaagctctctacaaagttagtattagtgttagtagagtagagttagaatagttccaagtccgtggaggcttcggggagttcggtaaaggttctatagcttttcctttcttctttgtaagacttccatttatcaatataatattcttctttgtacaagttcggtactttattccaatcatagagtatgagtatcagtcttagtttattcataagtagtataatctgtgtggttaaaccttctgggatttccattgatgctggtataatgtctgattactgggtcataagtctgctctggctaggccgagagctatggctcggggactcagatgctctgcaccgattgcaaggctgtagagtaataagtagtaacttaagcatagggtttaggttatcacttatcattatttggaggtatattctttgggtgatttgcatgccgctgatggtgacagctcagtacgggcgtctcccccgcagtttatattcctacatacaatttcctggggttggatacaccgccgtatcctacttcgattggagggttatgacaggttgtcataagaaactcggcaacccggggtaactttgcgatgcatcgggagggcatagctattcttgggcttagttatgttgcattgttaaaggggttatactacatagtgtatactagttagaatatactaagatgttgtatactagaagtataggaatagaacttatctaaattactaccacttagctataattaggagaatgtaggagttagctaaatccttagctgtgtgtcactcaacccttaagcttaacttacccctgcatagaccttgatgtatacatgtaatatataaactattaacatagtactctcttatcatatcttcccttgggataaaataaatacgataccttggaatactcccgggtgaaatgctacaatggtatatccgtgcgcttgcagatcacatctgtaaccataatatacctaggttatttctagtgctattgctgggaattatatttccagcagtgtcgctaagaaataccaatgagtatttctagcgccgttgccggggaagataaaagattaagagtttactacatgttaataattttatatgttacctccgtatagttattgtcctttgttggcaaaccttgtttgttttctcttttatatgaaaacagggtagtacaggactggttctgatctgccgaccaatttcatatctggagtcactggtgaagtgaagccgaccccgtgtcgttcatcctcaaggttactctatcggcaaccagaccagccaattccgcgccaccagaattgcacgatacggctgagaagtgtggacaccctgagtattataccatccagtgtccaacgcgaccaccacatactattggagaagtgggatccatacatgcataaatagccactcgtcctcaatgtgtccatgatcgcggttgacaaccttctgttataataaccgaaatgtcgagtagtgagtgcaagacataaccgtaagatagcttgccagtccaccacgtcatatgcccgtcaaccactcgaaggtggcgaccaaaagcataccccagtgactcgctatccccaattatttcaagcgatcaaaacccgttactcatgcttagctagtccccaggaatacgactatcctcacactttcatcgcaagcaattaataaacatagcaagtaccataatagggttaaagtgcagcgagatacatgacacataatagggtccgaggtcccaacatacaacacataaatatagcagcggaagtctcaaatagagttcataagcaaaagataaaaccggtggtgccacaaccccactagggcaaactaaccgggcaagagccaagttgcaagagatcactccttgccctcgccgccctcggcagagcaatgaccacacaagaagcataactcaaaactggattccactcctgaaattgcagacaccgggttaagtacaagattgtactcgcaagtcttacccaaaattatatatacataagggagagagaagcatgcaagctttctagcctacagtgggtctctaggttcaacatttgcataatgctaattttattgagcaattaatgagtaaaataagcaaggacaagtaaatctagcatcattttaatttatggacagcaagaacataattctgaaatgtataagcaaatgagcccaaacggcgctctcatcatcaaccatgttccaccaaagtccataccaacatggcacaacatgccaacaccaccatcaaacataatcccatccataaaaatccacattttatgctaacatgagtgagatacacatcaagcaatgtccataaccgaggacgcggctattcgaatagattatactctgaccagaggtgtacaactggtcccacatgaaatgaaaaagatcaaatgctacacaccccgtcgagtgcggtacacaagtgattcaagctcattacatgccctttcttagccccaccacaaccacctataccacgctagggttcccgacgactcagtcacgtgcgtgcgtgacgtgaccaaggcgggcgcgccacgcgggaggcatccctggccaatataggcacccgaggccctccaaagggctacctgccctcaagtctctccaacgtggtataaatgatcacagtagaactagtaaaggacaagccggtcccaaataaggcatgtggtaagtacgaagggtgcttgaatagatgtcaaaatgttcggtccttaacgactcagacggggcttcttgcatcagaggaaaaccaacctcccttcatcgccctatcacccgtccaagtccaacatatttcatcaaccattatttagtgtaagtgctcaagttttatgcccaataatgcaagttgtctatatacaacaattaatagcactgtccatccctacagttctattagcactaagcatggctaagcattaatgaataagacatcccaagtaatcccaaccagtggtaatagggtataaggacagcaatattacaagaactaaatgcataaataggttcttcccatacaccataaaccggcaatattaatatctaggaatgcatgcatatatatacgtatagattgcaaccaaatcatttttagagaaagcataggttctatatgtttaggtgcttgccttgctactgagggtagtcactatccttctcgggatatggctctttactctccggaatctctgaatctatcgaaaagaagcaatatgcgaataagagccaaataaacatgcacatgcaaaatgatcaataaattatgaaataaatacagtgggtagatcatattttaacttgaatttaggtgaaagaatcaccagattatcacttatggtttgggagatatgaaaatgacaagctcttaggtgctgaaaatggcagttctgtaaatattaacgtttcctttagtactttacaagtaaaatgcatttcaaaccaagatttcataataatgattatttttagagtaaagtacatcactcacagctcctaagaaaaattatttcacagctatatgtgttgtcattatttatttatggattttacaagttaaaaacataggaatgataaataaactcctaaacatgatttaagaggtagttttgccaaaaacaacaccacaacagaaaagagtactaaaatataagctcaacaaaattggtttcacaattttagcttttaccaataatttcttacgaatttattaagagctagaccactcaagggatacatatagctatttatatttttactgggaaaaccagtacaaaagttggtcatttttattttacaacatagaagatcacatttttcttaatccacagaaatttggttcactgaattcagagttcatatgaattagttatgaatttttaaaacgcaaacctctttcagctcaaaagctatctcagaaatcgatttctattttcgctccccttttctccaacttccaccggacatccctcacatggcagcaacctggacgtagggtcatgcgaggctaaggcctcgggctgatggcaagagacagagcaaggcctcggctgacggtaagagacgttgcctagggctgcttcaaccgaaatcaaaagagattaacaccggatgagctgcagccacctcctagctgcaataatggagatggatgacctgttgaatgttgctataaatgttcaacatggagagaattcaaaagaggcaccatggatgaaaaggaagctcaccaaatagaggaaaacacaatgctgctgctgcagccctacaggctgaaaccaccactctcttcttccttctcgatctctctcaactctccatgcatgtgcaagatgttgggatggattgaaagcttagatgatggggattgttatggtctaacatgcagagcttgagtttgggttctttgatgggatttgggggaggagaagtgagttgggagctcagcttcagaaggaaaagaaagaaagcaagggaagtgaaaggggaggaagaaggggttttcctttgcccaccttatgtcttgaggtggggagaacacccaagggtgggttttgggctaaaaaggcacccaaggttagtgacaagtgggcccaagtcgtggtggtctaagaggtaagggctggaatagaggtggaacaagaatttgggtagatttccggaattttcagcaattttacacctcttccaatatgacactcagttagttcaagaaataatagtgatataattttatcctttggtgtggagatagacctggacacctagtttccatttttcaaagtttcactcaaaaattcaaaatattttaattctggtgaaaagatgaaattggttaggctgaaatttttaggaggccaaaacagagagtaaaaattccacaaaatttatatttgttggtgataaataaactagtatttgaataaattattatacatgtacatttctgttcaagttattgttcaaatagaagtggtttcaattttaccgattagagttaactttgtcatcgcctatgatcaaattgcaatatagtaaatatgaaatctaaaggacaacaaaagcacttctaaatacctggttatgatcctagggctgttacaagaagtccctttgcaagttcgctgctcgctctgttggtaacatgctagttgcaacccaagtcagcaggggagatggtgactttgatttaaagaccagctaaattaacgatggcgtaggcttgcttgttccgtggcaaggctaaggaggatgcaagtgctcattttcagtaattcgtggaaagtcgtagcacgtataccgtcagaagaatcagactccaattattgccgttctccctcctcgagagagcagaacagcggttctacatcaaccgtgcaacagtgaatacccgaaacaattgctcaacggccttcctctcaagattcttcctgatgggcaaggccaacgctcttcgtggaagaatatccagcttttagcaaacgagggatgaaaccattcttgaagcctgggaaaggctgttggaatgcgtcaccgcccgtcctcatcatgggatggccgagtggctcatccaacagagtttcttgaacgaattaacccccttgtcctgggatcacctggatgctgctgctagagggacattcttctcaagtacagtcagatgccaaccgattgagaagatgctctcaaatatggggtggagcgaggaacgactccaaactcgtcaatgcggcatgtacactatcaagtggatggaaatgctagcagctcagttggatctccttatgaatagagtggacaacaacgagaaggaatccaagcagggtaccgttaatgctctgggctctcacacgacatctgaggtttatggcaatgccggtcactctgggacggatggtccgaaaacccgtaaagacgtcatgctcatgaacaacagcaacgggaaccgtccacaaggagaccaaggatggagcattgctccatggggtagatcaagaacggaccgaagcacaaggaggtcaaagtaaaaccccaaaggacggatagcctcaacaccttcatgatgaacttccgggaacagggagaaacgaggaaccaacaataccttaagctggcatccaagaagtcgggaatacaggctggtcaacctgagttcctagttacgaagaggccgcagcctacgcctaagacaaagaaggtgtggtgggttaaggagaagacacccattcctgtacctccggaactgggtgcctcatcgagctaaaacatcggaggtacggtcgtgctcgtcggacctgaaacgacgtcgcccttgccaacaggtaaattggtagttatctcatatttattttccattgcatcgaaacatgtttgaattttcaaaacgcacattgagatttgaatttgaggaaaattattcaaatgaatttttgtgagcaaaataaaataaattttttggcaaaattctacacaaccaccttcacactagtcgttggaacccaacaggtacttgtggggccgattgggtccaccaggggtcgggccgaactggcctagcaccggctggctgcaaatttttgcagggtagtggctagtggggcccacatgccatgactagccgttatccatgcactatatatgtagctcggctgggagagggaagtcacaccactttaactcattttcactccctctcaaaaccttgctctcaaaattaattcattcaaagttttgcaagtttgcctcaaattcacacaatttactgcatttagtttagacactttgcatgtacaagtttgctttagttcggtgcaaggttaatcggcgggtatttgcttaacccccgtccgagtagtcttgtattctttctctttgttatagctatgaagaaacgactttcgggcatattcaagagacgatcaagctcacggacaagtcgacacaataagccaagtacaccttcttccgtggatgcatccatggaggaggcgtatgttccaccgaggctgtacgacaactccgatctcgacctcgtgggcgaccgggaattgcaaagcctactacatactgaaaaaccgaacgtgtgctcacacctgagcatacgactcgaccttctgaaaatgataggtacggatgctgagtttcatactatttagcgtgctataggttgggataaatttgcatgtgtagacgagctgggttcccgtttgcttaccatgcagtttcatgtgccttgctagaggtgggcgatggtgttactttccggttattccgcaaggaatatcacctttcttggaaagactttagcttgcatctaggctttgacaaaacatgcaaaattaatttcaggatgcatttcctgattttaacaagcgtatgttttggcaatgtatttcgggtctgtcatcctgtaaaaagcctggaactagggacatccataatcctaccttgaggttgttgcataggttgcttggtttcgtgctgtttcctagagctgatatccagatagtacgaacttatccttttgcatgccatggatagaaaaatcaagtttcacccgttcaacccatgatcaagcaatggttagaaaatgtgaagttgtctggtcctgttaagtgtatttctttggtgactcatttagcatgaagagttgggactatgcttgatacgcaagtatcttgtattcctgttacccgctcttatgttgatgaggcctatctgattcaaggtcacatactgaaacatggtctaaatgattgtcacgcccggaatttctatccaaaattccaaacgcttacatgtgtgttaaaccctcgtccaggaatcaaccgaggcacacaataacaaattgataatagagtactattaaatattcgcaaataaaaaaaaattattacagaggtagatagttcctctcaaagaataacattctacgcagcggaaaaaaaaactataacaaactacggaacagctatggcaactccactccacaggcatcttaaccaagaacaagcctaatcctccagatcatcaccttcactgagatactcctcttctgatgaatgaatattgcaagaatgagcatatgacatactcaacaagacacacagcaaatatgcaagtgcacaggataacaaaggatggcataatatagatcatttgcagaaaacaacatttaataaatatttaagagaataataaaaacagttgaataattaatcaacattaaataaacaccatacaacacacccgtgttgcataggcccaaccacatttgaacaaccaaccccagttgaacaaattaaacctccaaaccaggaattatccattccaaaccaggagtcaaattaattatcacattattaacattgatgagtagagtgagactaatcacgaaaaacattgctcaactcacccataaccgcgggtacggctattcgaatagattaaactctgatcagaggtgtaccactgtacccacaagacacaaccccacatcatgtcaccatgtgcctcaataccaccacggtacctcggaaaggagttgtgacaataccccttgcacaacataacccattacagcgcacctttcctggatcataatcacccccttataaacaaggcatggactccccagcgacccccatggacttctcgccacttctcagtctggcgcactataatgaatcacgctatacaaaagataaagccgttgcccacgctggcttgtggctggcacgataaatgtttcacaacagtagctcgcgaaccggtccttaattgtcatgagcacaaccatcaaaaccatatgctcacaacccaccttaaccaggttttaattatcaattaattaacatcgcacgattaaccatcgtgagctaccattgaatataaccttaattaataataataataataatttatatttaacccctttagttagctaatgtttctaagcaaggctaagcaaacttacatatagcatttagccgaaccaatccaatatataaggttcatgctaatcaagttataacccataggaaaacaaagtcatcttcggccattaattaattgggaaaggttcaccacccgattgacattcgaaaacaatgcacagttgaaataaaataatagctttaaacgggatcaacatgctcaaagggttgtttgggatctgtgtgacttgccttgggcttccgcaaacgcttcggaaccttcctcaacggaaacgctctcctccggaacgtcggaaactaaagcaattaaacaaaaaccaacaaaacagtacaacaacaagcataaacagtatatgtggatatttttaacatgtagatcttgattttagaaaaatttagcaacttgaaccactcgaaacggatctacggttatttagttatgattttccgaagttttaatctattagaaaattggaaaaaaaggaaaagaaaaggagatgatgacgtcagcatgacgtcaccccacggtagccggctagggttggcgagctcgccggagattagatggtcggccgcggatttggagggcacctacgcgtagaggacgacgaggcgaacccaacggtactcaccaaagtgccaaacggcgaacgatgacggccggcgactaggaagcggcggcggcggctcgggttggacggcgacggcgagctacggcggtcggcggcgaagggggacgggcggtgtcacgcccagaaattcccgaatagaattccaagcagaatgtgcattaaaatccccgtccaggaccagccggggtacacaaacgacaatgttgacatacagatccacgtcttacaaacatcataaagtcttacataaatgcagcagaaggaaagaaagacaacaggagctaagccttgactaaactgcagcgggaacaccactccacaggcatcctcgacggcacggacgaagcctactcctcggagaaaccttcatctgacccgaactcgaactctggggttgggaaaagtagagcaagactgagtactacccactgtactcagcaagtcataccggaatagaggtatgatgcagggaatcatcaaagaaaagctaaagtggttcatttgcataaagcgggcatttataaacagagattgaaagatttaaacagttgtaaaaattaagcagtattagtcatccactgtccaacgctacaccacgttgcaacaggcccaaccatccacctaaactatccaaattaaaggattacactaaggtgagactaatcacggtgaatctggttgaccgcccataaccgcgggcacggctattcgaatagttttactctgatcagaggtgtacaactgtacccacaagacacagccccacgacacgtttccgtgcgccgacatgccaccacgacataccggaaagaggccgtgacaggaccctctagccaagcacaccacacctcaggtttcacccccgtccccggcgggcaacgggcagtcccctctcgtgcctaggtgaatccggaagccgcataggccgtcgcagggcccatccaaactccatcacgcccacccttgcctggatgcgtcgactagagaaaagctacactacaagcccagccgttgcccacgctggcttgtggtaagtacgataagttcttccagggcatcccgcgaaccggtccttaattgccatgggcgcgactagcaaaaccatgcacccacagcccaccatgtgatacattttatttaaccaacaccagcgcggtggtactaatccaacattatcatgtaaacctatagtctaggttttaaattgagatttccccattgtgtgctagttgaactaagcatggctaagcaattcctagtccaaagtctaatcaagttatgacccaagctaacaaaggagcatggtatccaaaaggcatggctgtaacaataggtaaccatccccagtaatattataaaacaatgcaatatttgaaagaaaacaatagagcatttgcaatatagggtcaacatgttcaagtgacaagcatgacttgccttgctctgctgctggaggaacctcggcgactatctcaaagtacaccggagcgtcggaagagccggaatctagcgacatacaaggcaaacattgcaaacaggctataagactactgaaacagggaacaaaaccatttttaatggattctacacatttttcctgatttactgagacttgaatggacttaaacggagctcggatgaattagttatgaattttagaagattcactgtgtttattactataaccaaaatccttaaatactttattgcgcaataaattccagggctgacgtcagcacgggtggcgcggcgccgacatgcggggcccaccggtcagcggcacggggaggagagaggaggcgtcggcccgcgggcccaccggtcagcggcacggggagggcggtctaccgtggaccgggaccacgcgggtgatccaccgccgatccacgggaccgacggcccggatcgccctcgggccgatcggacggacggcggcggcggcagcccccgggctcggatcggcatcaaagccgatcggccgacccggggctagcggcggcggtgcgtgcgcgtcgcgtcgccggcgacggcatccggcggcggaggcgacgcgaaagcggcggcagcggacggcggcaacgacccaaagcgacggcgagcgcgggcggcggcgacgcacggggaaatggggaaggagaggagaggagatgcctcaccgagggtggccggcgcggaggaagacgatggcgaacggcgacggcaagccacgggaggcgacggcggccggcggacgagcttcggcgtgccctaaggaaggagaagagagggattagagagagggagatagaccccggcgaccggcattcgaggccgaaagcggcggtaggggttaaacccaccggagcgcgaggagacgggtgttccggcggcgaacctcgacgggggaggggcggccgaggtagatctcgaccccgcgaacccgacggcgacgacggcgcggtgcggcggcgaccctagcggcggctagcggcggccgaagtagcaaaaacggcggcggcgggtggttgcacgacgcgggagcgatggggagctcgggagaggtcggcgcaatggggaaaaagtgagagggagcggcggtgaagcttaaataaggggagagagggccggacgtggccgggagaggcgggaatcgccggccgacgtggggagtggggagggagagagagacgggattcgaaattcgaatcccggccatctcgggcgcgggcgcgagcgggagagagaggggaatgggcgcggagagcgcggcgcacgcgcggacgtggccaacgtggcccggagaaggcggaggcgtgggcgtgacggccgttacgagcgaggcggcgcgagcgggagaggcgggaggtgggagacgggtctgacaggtgggtcccacctgtcggcgaccccgggagggagggaggcgggcggccggctgggcctcggcctgcggccggcccagcagggaggagggggaggaaaggaggagatgggccggcggcccatccgaaagaaaggaggaaagagagaaaaaggaaaagaaaaagaaaaaggaatttttttcctggaattaaaaattgcactttggtgatttttaattggttacaattatttctagggctctgaaaattccactaaaaatcctgttagtgagtttcgacatgtagaactcaagaaaaattccacatgccaaatccaattattatttgcattgattttcaagggtttactcttgctttgcaccggtatttttcttagggtcatttataaattcaatttttggcttaggaggagaactacagggtgtgacaggcggccgagcttcctcacctccgtgcgcacctaacggcgacggcggcaagcggcggcaacggcggaggcgatgcggcggcgcggctggagaaggaagatgagtccgacatgtgggccccacatgtcggtctccacaggagagaggagcgggcggcgtcggctgggccggcttgggccggttcggccgcgcggagagagaagagagttgggccgaaatcggcccaacggcttaaaaggggttttttgaacttttttaaataaaacaatttgtgaaatgttgtttcaattattaaaaatacttcccttgctcaattaattcccagaaaattctagaaaatagaagagcaagcataatatttaataaaattttatctagctcattttcatgttgaaaaatttcctagaaaattagggtttagcttgtaggcttttaaaataatttctaaaaatgatttaaaatatgcatttttaatttagtcgatttttagggcgtaacaaacctaccccccttaaacagaatctcgtcctcgagattcagaagaactgacgaacagatgaggatgagctgacttcaattcatcttctcgctcccaagtggcttcttcttctgaatgattgctccactgaaccttgcaaaaccgtataacgcgattcctggtattcctctcgcttacttccaaaattctgactggcttctcaacataagttaaatcttcctgaagctctatacgatcaggatctgcttcctccgtaggtacacgtaaacatttcttcagctgagacacatggaacacgtcgtgtattcccgccattgacggaggcaactctaactgataagctacttcacctcttcgactcacaatcttaaaaggtcccacaaaacgcggtgccaatttccctttggtttggaaacgatgaacacctcgtaatggcgtaacccgaaggtatacataatctccttcttcgaaagccaaatctctgcgacgattatcggcatagctcttctgacgtgactgagcaacgcgcaacctttcttggataatctttactttttcttctgcctctcgcaatatgtctgtcccaaaaacttgacgttcaccggtttgatcccaaagaatcggcgtacgacattttcgaccatataatgcttcatacggagccatttgcaaactagcttgataactattgttatatgagaattccgcgtacggcaaattcttatcccaacttccaccaaaatctagaacacaggctctcaacatatcttctaaaatttggtttactctttccgtctgaccatctgtttgagggtgataggcggtactgaaattcaaacgggtacccatctctacttgtaatttctgccaaaacttcgaagtaaactggctacctctatctgacactatcttcttaggaacgccatgcaaacataccactctggccatgtataactctgcaagcttattccccgtataggttgttttgacaggtatgaagtgagcgacttttgtcaacctatcaaccactacccaaatagaatcatgtcctgctgacgttctgggtagaccggttataaaatccattcctatttcttcccacttccactctggaatcttcaacggttgtaacagaccggctggcttctgatgttctgccttgacccgctgacatacatcacatagagccacatattctgctatctcacgtcgcatactggcccaccagaattgttgctttaagtcttggtacatcttggtgcttccagggtgaatggaatacaaagtttcatgagcttctttcatgatagtatccttcaactccttattttctgggacgcaaattctttctcccaaccacacagttccttgctcatcttctacataaccgatggctttacctcttctcatgttctttttaatttcttgtatgtcaggatcattcacttgagcttctctaacttgatcaaacagagtaggttgagcttccaaagtagccacaaaacctttgctgactattcccaagttcaacttttcaaattcttggcataacttccaaggtaaacgtcgaccttctgacatattacagtagcttttcctgctaagagcatcggctacaacatttgctttccccgggtgatagtggatttccatatcataatctttaatcaactctaaccatcttcgctgacgcatgttcaaatcaggttgagtgaaaatgtacttcaaacttttatgatccgtatacatctctgtacggttaccgaaaagataatgacgccaaatcttcaatgcatgcaccacagctgccaattctaggtcatgcgttgggtagttattctcatgaggacgtaactgcctagatgcataggcaaccacctttccttcttgcatcaacacacaacccaaaccgtgtcgggatgcatcacaatacacttggaaacctttcctcgaattaggcaaaattaatacaggtgcagtcactagccttttcttcagttcttggaaacttcgttcacaatcctctgtccacttgtacttcacttccttctgaagcagacgagtcattggtctggcgatctttgaaaagttctcaataaacctgcggtaataccttgcaagtccaaggaaactacgaatttctgaaaccgtcttgggttgcttccaacttaacactgactccacattgcttggatctactgccactcctccagacgagatgacatgtccaagaaacttcacttcggacaaccaaaattcacatttactgaacttggcataaagctgatgctcacgtagtttctctaaagctagacgaagatgctcctcatgttcttccttcgtcttggagtaaatgagaatgtcatcaataaacaccacgacaaacttatccagatattccataaacaccttgttcatcagattcatgaaaaaggctggggcattagtgagtccaaatgacataacggtacattcgaacaaaccataccgagttgtgaaggcggtctttggtatatcttcctcacggattcgaagttgatgatatccagaacggagatctatcttggagaaaactgtagcacctttcaattgatcaaagaggtcatcaattctgggtagaggatacttattcttgatagtgacctcattcaacgctcgataatccacgcacattctctgagtatgatctttcttctccacaaagatgactggtgctccccatggcgaagtactgggtctaatgtatcctttctgaagcaaatcatccacctgtctcttcacttcagctaactcattagctgccattctgtatggtctcttatggatagggttggttccaggtaccaagtctatccgaaactctatgtctctcttaggtggcagacctggcaaatcctcgggaaacacgtctgggtagtcttgtactatgggaatctcttgtagagcaacttggtttaagttcacaccatgagatttaggagaggacacaaagaaagaaacggtttccccattgctactagttaaagtcaccttacggttgacacaatctataactcctctgtgacgagataaccagtccatccctaagataacatctagatccttggattctagcaagataagtgaggatgggaaaggaacttcttctatttctatagtagcggaaggacaatactgtgtcgaaaatacttgattgcctggggtgttaactagtaaaggtctcccaagactaacaacttccatcccatgattgctcgcaaaacttttagacaaaaaggaatgtgtagcaccggaatcaaaaagcacagttgcgggtatagagttaacaggaaacgtacccaaaaccacatatggtgcattctgagcttctgctgctaccacatgattgacacgtgcctttggtactggaacattggagttgttcggagctggagcgttcttcacgcgccgaggcttaggacacttatcagcataatgtcctggatcaccacaattgaagcacaccactggtttgcttccctgttccttcctgacaggctggttctgagctggagttgctgcaggacgagcaaccacgttgcggttgtcattgccacgattaccagtattgttgttgtagaactggcgttgggggcggataactgatgaagatcctccttgagggtacgatggagcttgaggtccaataacgagacgtggcctctggttactgccctgttgtgccttgaattgggcagccctgcgcttcttctgctccatccggttatacttgtcttcctgacgaatcgccttgtccaccaattgctggaaatcccggaaatccgtagacatcaaggcataagacaactcatcattcagtccctctaaaaacttctcctgacgttcttcatcagtgcgaacatcctctggagcatagcgagctaaacggttgaaatcatggaggtactcagtgaccgaacgagatccctggttgagtgctctaaattctctcttctttagagctacaacacccgctggtatgtgtgtcttcttgaaagcagccgtgaattcctgccacgtaataggctctccttcagccctgccttggcgaaaatgatcccaccattcggcagcaggtccatgcagttgatgcgaagcaaaagaaactttctcctgctcagtacactggatcaaatccaacttcttttccaccgcatgcagccagtctcctgcttctactggattggtggtgcttgaaaaggtagggggtctcacacgtaagaaatctgccagcttgttttggggaggtgggggtggattctggttctgattgtttgcctgctgattctgtgcctgctgcactaacagattgatcagttgtgtttgttgggccagaatctgagctagcgtgggatctcctccattgttagtagctccactaccacttccacttccacttccagtgcgcgtgttcaccatctggcgataagcagagacaacaggaaagaacgacagagagacacccttagaacggagttatttaattaatttaaattctatattgctcttaactgtgtatgattacatttaagttgcactaacactatctcaccaactatcttacactccgacaagcaaaagagctagactcatgctgttacatcccaccaatgatgtaagcaacaactaaaacccacacactcacaagcaaacttaaacaagcaaactaacacagcgaactacggcaacgatctagctaagcgactaaacccgccttgtgtcggaacgaagcgatggatcttcttcctctggagtagctggctctctttcttcagggtcttcctcttcttcctcatcacttatgatgtcgatgacaggttcagcacgatcgggcacagcttcgcccatcacacgaatcttcgaggctaactggagacgaggtggcggacaggttctctttcttgcgacgaggcgaagcttgggtgttggcggcggcgtttctcctttaagttcagctaattccttctgtagacggtacaccttgctctccaacttgcaaatcttgcctcgattccagttttccctgtcatgagctgctttgtctcgctccacacttactgcatccatagcactaagcatatgcaccacatgcatcagagtggcactctcttcaccatcaggacagatataggttccatagtcttgaccatgaggcttgtgaggatgatactagaaagctgatgaatccaactcttcttcaaagcgttgacgcaactctccaatggccaccaaagctgcttcttgacaagcatggctgtacgatcttcctccagcttcgaacttaatagacggaaggtcttcacgatcactagccaacgtcacacgaacatgacacttctcctcgtcggggtcatgggaaatttggcgatactcgggagcaacttcataacctacctcaaaaaccatcaatcttagctccctgacgaatcctaacacctcgatcaaatttctcggtgaatggggcggcatctaaagaaacatagaagggaagaattaatgcatattttaagttagctgcaccaactagacttaactgattttgaccaaaaaggaagaaagataaaagaaaagaccgtacaaagctattatataaatatatttttagaatttaacttttttggacagagacaaatattttttttttgacaaataactaaaataaaactaaaatacttatgatctattataagcacggtacagtgtcaccacaagaaagatgagtagtactagtgctatcatgattgtatcgataccataatagatgtacagtgccgactaatcaataagatttggtaaagagaaaaagaaacattttgagaagaacaactttttgcttttaaaagaaaagaaattgaattaaataaattttgtgcataaccttgcatgtgctgccaacttatttaatttataagagaatagagaagagcagttctatattttttttcaaaatattttgaaggctacttaaggtttaccatttggcttatcctaaggtcaaggtggctctgataccaacttgtcacgcccggaatttctatccaaaattccaaacgcttacatgtgtgttaaaccctcgtccaggaatcaaccgaggcacacaataacaaattgataatagagtactattaaatattcgcaaataaaaaaaattattacagaggtagatagttcctctcaaagaataacattctacgcagcggaaaaaaaaaactataacaaactacggaacagctatggcaactccactccacaggcatcttaaccaagaacaagcctaatcctccagatcatcaccttcactgagatactcctcttctgatgaatgaatattgcaagaatgagcatatgacatactcaacaagtcacacagcaaatatgcaagtgcacaggataacaaaggatggcataatatagctcatttgcagaaaacagcatttaataaatatttaagagaataataaaaacagttgaataattaatcaacattaaataaacaccatacaacacacccgtgttgcataggcccaaccacatttgaacaaccaaccccagttgaacaaattaaacctccaaaccaggaattatccattccaaaccaggagtcaaattaattatcacattattaacattgatgagtagagtgagactaatcacgaaaaacattgctcaactcacccataaccgcgggtacggctattcgaatagattaaactctgatcagaggtgtaccactgtacccacaagacacaaccccacatcatgtcaccatgtgcctcaataccaccacggtacctcggaaaggagttgtgacaataccccttgcacaacataacccattacagcgcacctttcctggatcataatcacccccttataaacaaggcatggactccccagcgacccccatggacttctcgccacttctcagtctggcgcactataatgaatcacgctatacaaaagataaagccgttgcccacgctggcttgtggctggcacgataaatgtttcacaacagtagctcgcgaaccggtccttaattgtcatgagcacaaccatcaaaaccatatgctcacaacccaccttaaccaggttttaattatcaattaattaacatcgcacgattaaccatcgtgagctaccattgaatataaccttaattaataataataataataatttatatttaacccctttagttagctaatgtttctaagcaaggctaagcaaacttacatatagcatttagccgaaccaatccaatatataaggttcatgctaatcaagttataacccataggaaaacaaagtcatcttcggccattaattaattgggaaaggttcaccacccgattgacattcgaaaacaatgcacagtggaaataaaataatagctttaaacgggatcaacatgctcaaagggttgtttgggatctgtgtgacttgccttgggcttccgcaaacgcttcggaaccttcctcaacggaaacgctctcctccggaacgtcggaaactaaagcaattaaacaaaaatcaacaaaacagtacaacaacaagcataaacagtacatgtggatatttttaacatgtagatcttgattttagaaaaatttagcaacttgaaccactcgaaacggatctacggttatttagttatgattttccaaagttttaatctattagaaaattggaaaaaaaggaaaagaaaaggagatgatgacgtcagcatgacgtcaccccacggcagccggctagggttggcgagctcgccggagattagatggtcggccgcggatttggagggcacctacacgtagaggacgacgaggcgaacccaacggtactcaccaaagtgccaaacggcgaacgatgacggccggcgacgaggaagcggcggcgacggctcgggttggacggcgacggcgagatacggcggtcggcggcgaagggggacgggcggccgagcttcctcacctccgtgcgcacctaacggcgacggcggcaagcggcggcaacggcggaggcgatgcggcggcgcggctggagaaggaagatgagtccgacatgtgggccccacatgtcggtctccacaggagagaggagcgggcggcgtcggctgggccggcttgggccggttcggccgcgcggagagagaagagagttgggccgaaatcggcccaacggcttaaaaggggttttttgaacttttttaaataaaacaatttgtgaaatgttgttttaattattaaaaatacttcccttgctcaattaattcccagaaaattctagaaaatagaagagcaagcataatatttaataaaattttatctagctcattttcatgttgaaaaattttcctagaaaattagggtttagcttgtaggcttttaaaataatttctaaaaatgatttaaaatatgcatttttaatttagtcgatttttagggcgtaacaatgattctcttatgtttttgtttcccggcaatacaaatgagattccgttatctaacccggagtttcatttgtataactgctgagaaaactaaccatttctctccaagcggtgttgcctcgtgaggtcccatgcagggtaacatgacgaatggcgagagaagcacctcaggaggcgtcttcttcttcaccaccagtgcagaagtatggagattgttgggacccgaccgtgcatgcccccggttggacccaattcctgcaacatgatgctggaggttcgtcctggcagagtgctagcgacagccggtggtatgagccgcaggagctgcactggggttattcgcgctccttcagttcaagtggtctacctccatcctcttggatgcattgctcaatctcctctcgaggggatctgggaaaattcatccgggggatggatacacttgaactgcaggcagggaacatgcagcacatgctggaagatcatgtggtacagtcacgggaatggcagcagactgttgatgcacagcttgcaaactttaacactatgatccaacaacaacaagttgactggcaagcgtttcaccgctaccagggatttgatccccgccatgagccatagcaagaagcaagcttggggggccactaaggtaacttgtatcacattgcatatttcccttttcaaattgcatgtttaaatttttgcattgcatttataaacctaaaaataacataaaaatttgcaaaactaaaaataccaaaaagataggttagatttaatatgctaggtaagacatgcttagttcttcatgttgaaatgatgaatagttgctctgttttatatctctcatatatgggttcatggttaagtactccctcaagaattgaataagagtagccaacaattatctgggaacctgaggtaagtgagctgcactttgctgatctgagtctagtgttggtatttgatacggttacagataaaatccgcaagcgcacggatataccgatgtagcacttcccctacggagtattccaagggtatcgaatccaagggaacatgtgtgatcagagcttcctccggttcatccaaggacaccaagcaattgataggccaggatagagaggatttactagtgagaaacagtgtagggaaagcttaattttaatcctcacgcaatacttcaggcactggcaacccgctgttcctagatgtcgctctacttcgtatccggacagggaggacttaagtgctctcgagggctgtcaccacctctacacccatctcaacgtactgtgggatatgcagcaattactggataataattacctaaacaccacgtctaagcaattaatatctactttagtgtttataactcaccaaagcaatcactatattttagttgattatagtgaacaataatcctgtatgctaattaggaactaaccaagaggtaattctcacaagataaatctaaattactcaagaagaatattatattgaattcagagtaataaacagaataaaagaaataggagaagattaccgacaactccggaattcttccgactccttctactctactctcttcctattctagtatacaatatagtacaatagagccttttataatttagctcaagcttggaagtgtgtgtgtgaagtgagggagtgaagcctttatatagaggtaggtataacggttggcgaaggggaaatgtccgaagtgccctccaaccgccatcagggagtgatttggagcgtccaagccaaaccccacatccaacggtggagatagtggttcggccgaacctgggctgggcccatctggcctggcctttggcccaagtcctcccctggtcctcctctatccatttcttggtattttgggctgatttactgatgttttgatgaagttcacaacccaaccttgtatggatacaaaattttcctcactttagtctagatgtcctcccaacttcagggtttattacctgcataaatatacaccaacacttgtggaatgtgtgagattaagcacctatcactatgttggatgttttattatctaaactttatgcagatgttggtggtatagaatcgacatttaacaaccaccaacatctaggttgttgcgagatatgagatagtaaataagagttgctatgtcgcgaccgagaaaatttccttttcccgaacgctagtgtattaatccccatcccaggagaagccggggtacaccaaacaaacatgatacaaaaggcacatctttattatatcgataatatttacattattacaaaggcacttcaggcctgacaaacaaaaataaacagcagcggactagcgggcctacggctccatcttcacaggcgctcaactgaggtataagccaggactccacctaggacttcttctccaaagcttctcttactggaggggggagagatagagcaagaatgagtacaaccaccgtactcagcaagtcacaccgggagatgcatgattaatgcaagggggtacaaggagtaataatataggggttaagtttcgcagtaaacagcatttaaaagtcacttagttgcccaaagctattttataaagactatcctagagctacacagtattattaatcaacgccgtggacccgcacgaacctgccttaacccaaggcctacgatgattcagaccgaactggcaacccgacctgggtcccagctcgtcccaagccaacccaggccaaccattccatattttagttgttaagcaaattttaagaattaaaccactaacttgggtacattgctaggcttgcccatatccgagggcacggctattcgaatagatttactctgatcagaggtgtacatctttacccacaagacacatctttactccacattctatggccttggaacccgtcataaacatgtgacataacccttcacccatcctagccgtgaacaaaagtaccgacccaaccctgcctacggccagtatcccgggacaggcaggccaggattgagcccctagcaacaggatctagaccgggtgcgccacacacataggggtgagaccacccgcgtactagtccagtgccatggcatctcgactaacaggcaccgacccgtgtagccttcatttgcctagacatctcgattaccaagccgcagctcgtgtagccttcatttgcctcagagatatccatcgtcgcaacgacttcatccatctctatccgtgttcttttgttcaggactagactgagcaccgagttaagccttacccattagacatgtggttagtacggtagtgctttgcaacagaggcccgagcttaatccttatattggccggggtgctacttatagagtacccactagttgggggtttatttgcctagggtaagcaaggtgataataacaatagcaataataataaggtcataacaaaggtaaataggcatggctaaataaaacagtgataacgcgggaatttaaataaagcgatgatgcattaatttaaatcaaaataattttataaactgggattcaatatgctcaaggatgatgtgacttgccttgctcagagagaacggccttccgaaccttcggcaacgaccgcaaactacgcttcgagaaccttcggaacgacagaagctacgcgaagcacacaagcaaagctacaagcctataaagaagcaataccaatacataaaaagaaagcaccccggttctttatgttataacaaacattaggagacttgaatgggtcgattcagggttcgtatgaccaagatatgatcatccgaagtttaatgttgttacatggagatttacggattattgtgattaggttttgcaattataaaacatgtgtaagcgctagcctggaaaagacaggaaggctgcgctgttgacatgcagaccccacatgtcaacctaaaggaccccagtagaccgagtacacagagacggtccacgggtcgacggaagcggaccccgtgtgtcaaccgaggcgagtggccgacaaacggactccactagacaccacacgggctgcacacgtggaaaccacgcggctaccgagcgggcacactaacacggtcaccacacgcacaagcgaacgactacagacaccagtacacgggtaccggggtcgacaaccacacaacgggcacgggacgacaccgaaaggacgaggacggggcagcgagaggacggatccttaccatcacgcgacgaggcgtggggacgacgatggcgaacgggcgcggcggagacggtttggagacgacggaggcgaacggtgtcacgcccggaaattcactagtaatttccgaacttatttgtgcataaaatcctcgtccaggaatcagccgaggtacacaaactgacaatttaatatacaaatccatcataataataatgttacacacttacaaaagaaaagaaaacagcagcggaataacggtctagcgatggcttcagctccactcccacaggcagctcaactggggtataagccaaacgtcttctccttctggatcctttttcttcaactgaggttgattgattattgcaagaatgagcatatgacatactcaacaagccacacagcaaatatgcaagtgcacaaggataccaaaggatggcataatataggctcatttgcaaaagcagcatttagcaaaacatttaagagaagtaaaacagtggagtaattaatcagaaattttaatcaacactgaacaacacacctatgctgcacaggcccaaccatcctgaacagccatacccagctgtacagatctaactccaaaccaggagctaaacaaattattaccagttatagcatcaataattattgtgagaggtgtgagactaatcacgaaaaatattgctcaacccgcccataaccacgggcacggctattcgaatagttttactctggccagaggtgtaccactgtacccacaagacacagcctcaacatcatgtctaccatgcgtcgcgatactggaaagtacccgaacagaggctgtgacaataccctctgcacaacacaactcaccacagtgcaccattcctggatcataatcacccccttataaaacaaggcatggactccccagcgacccccgtgggcttatctccgccacttctcagtctggcgctccgcaatgaaccatgctatacaaaaggtaaagccgttgcccacgctggcttgtggttggcacggttaatgtttcacaacagtagctcgcgaaccggtccttaattgccatgagcacgactctcgaaaccatgtgctcacaacccaccattatcaagttttagttggcaagtaattaattaaccaatcacgattgaccatcgtgaactatcattaagccatcattaaataatagtgagtcataagttatcccaatagtgtgctaatgtttctaagcatggctaagcaattatatctaatatctagctgaaccaatatataaagctcaactagtcaagttataataacccaaggtatcaaggaataaagtaatcaatgcaaacaggccataacaaaggaatagattcacaccacccagtgacattcgaaaataaatgcacagttgaaataaatagagaatttaaatataggatcaacatgctcaaaggattgtgtttaggatctgtgtgacttgccgtgcaataatcggtcttcaattaatcttcttgaatactttcggcgcactcacgaaccttcgcaacgacggaaacgacaagctaacatgcaaaacgaagaaaaagactaacaaaaaccaaataaacagtacatataaagtaaacaaacatgtagatcatgattttagatgaatttagcaacttgaaccactcaaaaccgagttaggatgatttagttatgaatttccgaagatttaatctattagaaaaacaggaaaaagaaaaacgatgatgacgtcatgatgacctcatcaatggtcggaccaagatggcgacctcgccggagattggatggtcggctgcgactttggaggacatgaacacgtagaggacgacgagacgaacccaacggtactcaccctcgaaccaaacgacgaacgacgacgcccggcgacgaggtctagcggcggcgcggcttcggtcgacggcggcgacggggctccggtgaccggcggcttcggggagagagcggccgagcttgcccacacctcggcgcaccttacggcgatgacggcgaccagcggcaacgacggaggcggcggcgcgacgcggatggaactcggccggcgacgacggcggggtggagcacgtggcggcggcgctacgaggcacgtgagatcacgggagagggggcaaacgaaagaggaggactagggggtcctttttatagccatgggaggccgggatcgagcccacaacgacgggaaaaactcgggaaagtttagatcttcgccggaaaaaggaaaggttgaaccgcgaaattggaaaggatttccatataaacttttggggatttcttggggaaaaggaagaggagattgaggggattccattcccgcaactaatttggagaaaggagcaacgatgtggccggattggtgggaggaggcggcggcactgtgcacgggctggagagctcgggctccgtctggaggtagaagaaggagcactgtagcgacagggacgaaaaacagacttctatgcgggctgagaggaagggagagagaagggggaggcaaattagacttttcgtcttgggttggctgaaaacaaagcaaagaaagaaagagaagggggaagctcggctgggccgacttgggctgcacggccgagcacacaaaagagggagatgggctggaaagggcccaagactaggaagaggattattattacttttccaattaaattaatcaatgaaatgatctttgaattgttaaaaatacttcctatgctcaaataattccaagaaaaatcttgaacatacttggacacccaaagtatttaacaatattaaaaccagaccatttaatgattaatttaatatgtgggtaattactgaaatgctctttgtatgattaaaaattaggaattgagctccgaaaaatccgagaatattccagagagtataattaaccatggagaatttaataaaaaattaaatccatccatgctttaaattaaggaaattttatttcccacatttaacttcacttgtaaattaatgaacatttaatataaattctaataataatttattaaataatttataaatcctgaaacaaaaatcaggatgtgacaaacggcgagggagcgactttggcggcgatctttgcacgaaagcgagacgcgaccggcgcaacgcttggcgacgcggaggcgaggtcgaagacgatgacggggctacggcacttgacggagcgaggacgacgaacgagaacggcttgacggagggacgaacgccacgacgagtgaaaccgggaacgacgagaggacgacgacgacgacgaccggggccggtgaggaggcgacgaggcagttggcagcagctgcacggaggcgaggacggcgcggaacacgccgctgcgaatccgacgacggaggcggcaccgcgagacgatgagccggtgaggaggaacggccgaccggaagaggggatggcgacgtcggacggagacgacgacgatgaacaccggcggggttcgggtggaggggaggcgagaccgagggcgaccttgccgctgcgatgccggcggcggtggtggcgcggccgacggcgcacgggtggagaaagggccgaccggggaaattccggtgaggcggatggagaggccggcgcggcacggcggtgttccggcgaaaccgaggagtggccggggaaggagacgatgccgcggtatcgaaggaggagacggcggcgtcgatcggcgtaccggcgacgaacaggagccggccggagacggtgtagtggcggcgacgccactgaacaccggcgggaacgcgtctccggtgctctccgcgctaaacggaggatggcccgggggagaggaggcggctgcgaggctgctggtggcgacggcgcgaccggacggcgctccggcgaggagggagaggcggctggaggcggccggtggcatgggagaaagaggaggatggtggggagaggtggtgaggccacgggagagtgcgggagggggctaaaatgatagaacggagcgagggggttccattttataggatgggggagggagccgagcatgggagagggcggaacggcgacgggaaacacggtcggcggccatggaaggcggccgggaatggcgcggccgttccgggcgtcagagggcacgaatcaagggggaaattggggggaattgaagaggaaggaaaggggattaattccctctaatcaattttggaattcctgttttgaatcgcgtggatttgggggagcaatggcgctaggtttccgggaaagggaaaggaggccgtgcggaaggagaaagacgacctgggggtgtgacccaccggtcaggcacgtggtcagcgcgcgtgacgggcgcgtgcacgcgaaagggaggggcggctcgggcaggggggcgcggcttgggccgggcggccagcctaggaggagaggagggaaaggcggcccgggggaaaaagggaggaggagggagctgggccgaggggaaggagggagggcggcccaagagagagagagggaaggaaaaagagagggaggaagagaggactttggccgcgggccgagagagagaaagagagaggactttgggccagacttggcccaaaggaggaaggaggattatttttaggtttttctttttaataaactttgataattgtttttgttgcttaataaatatttccggtgctttgaaaattcaagtaaaatttgagggctcattttagaccaaggagaatttaacaaaaattctccgggccacattcgaatttttcttgtacgtattttagtgttaaccaatttctttttgaattttaattaattctattattccttttagagaatgatttttatttcgggatgaatttatcaggacgtgacatgctacgaccctgttctaaatttgacttgaattccggatgttttatttttcaaaatgataaatttggaagttcctcatttgatatgaattcctactagagccaaaaatatatatattgattaagccatatacattatggttacttgtaattccattgaactttgtcaaatccttgtgacttgtgtagatacttttcatgctttatgatcaagatcatacacccacatatgcacacatatgctaagcttctacattggaagatagcattcatatcatccaccatatccatgtcatcattatccacaaataagctctccatccatgctttctttccaaagaaaaatcctttgcaaaaattaaaggaaaaaaatagggaaaggtatggctatgagaaaaataataaattcttgctctcccaaaattggagcatgaaagaaaaaaaaagaaaaaaaaaagagaaaaactagccataccctctctatgaaaattaaaggatattttggaggaaaagcataagcacaaatgagaagcattttctttatccacattttgttttccatcatattttccaccatattattcacacacactttgcacgatcttgatcttgagtatgattagtcatctattttagtccaagttttttgacttagtaataaatgagaatacaagtatgccatgtttgatccctaccaagctccacatatcaaaccttagagtaggaatcataaaggcaaatctagtgaggaattcatattcaaacaatttgagtgatctagagaatcatttttggaacttggctttcttttgcaaaaaatcatttgaaaacctccggaataaaagttgaataaagattgggtaactagcgctctaattgctgttctgtctctcaaccgctcaagacaaggaaaggcagtgtctcgtgggaattaggggtaagggtaagccaccgtgccaaacttatttaatttgagagagagtatccataccttgcatctgtatctttgagatatacaacattgcagcaactcctgatcaacaaccaagtctttgttcctttcgtcctttactcgggacaagcaaaggttcaatctttcccaaataaaataattacttccactatatgctttgctactaacatgtatgcaggagaagcactcataaatgaagaggaggaggtggaaatatatcgatcaatcagtcgaaagtctgccggtgatctacaattacatgagaaggcccaaaagtccaatttaataatcacaaatgggcctagaatgtgtgtcactaatttaggggcccacatggaaatctcctagaggaagttgggggccagaagagcccataaagggtcggccgacccttgttgagcccaatctagtcgcattttggccaggagataaaggaggccgaggatgaagcagcagtacaaaaaccaggcctgttgggtcagtctagggt

SEQ ID NO: 5695 - DNA, 28181 bp, Oryza sativa
aaaaagaaaaacgatgatgacgtcatgatgacctcatcaatggccggaccaagatggcgacctcgccggagattggatggtcggctgcgactttggaggacatgaacacgtagaggacgacgagacgaacccaacggtactcaccctcgaaccaaacgacgaacgacgacggccggcgacgaggtctaacggcggcgcggcttcggtcgacggcgacgacgggactccggtgaccggcgacagcggggagagagcggccgggcttctccacacctcggcgcaccttacggcggtgacggcgaccggcggcgacgacggaggcggcggcgcgacgcggatggagctcggccggcgacgacggcggggtggagcacgtggcggcggcgctacgaggcacgggagatcacgggagagggggcaaacgaaagaggaggactagggggtcctatttatagccttggattaaagagatcggactcctcccgcaagaaatcgatccgggaaatcaaaaactcagttttggagataaactcgaaaacgagttcgatccggataagatactcaacgattagctccgatttttgggggtaaagatagaggaggataagaggaatatttcccctcaactaattttagataaacacaaggggaaaggtcagatttggaggagaaaaaccgagccaaatcggtctcagttcggctgctagaggtagaagataaacagtgtcgagggaggcaaattagacttttcgtcttgggctggctgaaaacaaagaaaagaaagaaagagaagggggaaactcggctgggctgacttgggctgcacggccgtgcacacaaaagagggagatgggctggaaagggcccaagactaggaagaggattattattacttttccaattaaattaatcaatgaaatgatctttgaattgttaaaaatacttcctatgctcaaataattccaagaaaaatcttgaaaatacttggacactcaaagtacttaacaaaattataattagaccatttaatgattaatttaatatgtgggtaattactgaaatgctctttgtatgattaaaattaggaattgagctccgaaaaatccgagaatattccagagagtataattaaccatggagaatttaataaaaattaaatccatccatgctttatatttaggaaattttatttcccacatttaacttcacttgtaaattaatgaacatttaatataaattctaataataatttattaaataatttataaatcctgaaacaaaaatcaggatgtgacacatggactctgacaaggatacgccactcattttggggcgtcaattccttagcactgcggaggctaacatcgatttgggagctaggagtatccggctccgcattaacgggaaggaggaaaagtttgagttttgacctaggacggagtggtgctctatggtgaagatcaagtacgggccaaatccacataatatacaagaggttgaagtgaagccgctaacgacgaacaacctaacagctttcatgaagaacttcctcgagaaggaagcagaaatgagcaagcctcgtccaagaaatacaccagtaaagccaggggcgcaggctagaaagcctgtgaaatcagttgctaagaagccacaagtcacaccaaagatgaagaaggtgtggcgggtgaaacagatgacattcggtccctcacctccggagccgggtgccacatcgtcatgctaaataggatggtggtacagtcttgctcgtcggacctgaaatgacatcgccctcactaatatactatcatcggtttcagtgccgctaatgaggggaagccgatggagccttaggctgaaaagtgttagatgttagaattgatagtattgatcaaaatgaaagatggagagttcaaagagaacttgccaatggaggaggtgtcagtcgaggagttggttgccgatgagtagaagctgatatggtttttgtcttcagaaagataataaagtgttagaagatatgaatgttgtccagatagagtggaaggatgcaatatttactcttgctcggggttggccgacgacgaggaggtagaggaggaggttgctcactggctttgctgcttttgtcctcagggatattgctggcatcttcatcttcattagtaacattggtaggttcatcgcccatatcggcagcaacattttcgatatcttccatggcggcactgaaaccgatgatagtcggagctatttccctatatggtaataaagcttgagcatatactatcggctgattactatcactaattgtggaaggacatcggcggcctacaataaaaatggattaacggtagagaagtttatgaattgcaagggctaattgaaggattgactatggttaagtaaaagttagatcccaagacgtaaagatgtttcatccactcaatccaccattaatcaaacaatcggctgcgcatgggatggatatcgatatcggcaggagagcgtaagataggtccttcaaggtttagcagccgatcaaataagagagttgagatcactattcccctagtttgaatttttcttaagaagtatagaccaattgggagttggccatatcctagttgtcgggctgccaccattaaatgatagaattcgtaagagacctcagagtaacggccggtagatataccagtcgaaaggatgcagggtgagacaactgatataaatatatctctggacttgttgtcactgttgatttcatccaatctcaaatcaattgggagctcataggaactgaaatcagtgttggagtaccaaattctagtgcttctgggaaaccattatagaagtgttcaaaccaaatttgaagtttttcatccaatggtcctaatctagggtagattgatgttgcttctctaaaggacatacattggtgagttatttcatcggcatcgttggaaatacatattcttcgagggttggacatacgattagcaacttgaactgtatagagattgagccaaagttggacaaaccaccgaggccctccacatcctatcggcttgccagttagcaattttcttgttgttttatgcagaagttgatacgtggccccaatagatattttcctaaaggcatctctttaccattaaaaatcattaagagcggcgggctgggcggccgctcggcgtgtccacgtcagcgatttgctacagtactacagtgctcgggtgtattttttgcaaaaaaagcccttagatttgtccataattcggagtaggttcctcatgaaagtcgctctgaggcgattttttatttggaggccctttaaaaaactggatattgcatgtgaaggagggaaaaattgcggattaggagtgcgctgtaaaaagtggaagtataggggctttttcgcaaaatgccacccacttaaccaaaccctagacgccgccgcccccttctcttctccctctcgtctctccctccccatctcccaccgtcgccgccacgcgccgccgcctccgtctccgccttcccctctcgccgacgcgagcgcgtctacctccgccgcaacggccacgtccacctccgccgccgcggcacgcgtcccctcctccctctcgtctcatcctctttctctcccgtcgccgccgcctccgcctgcccctcgcgacgccacctccgcctcgcgccgtcgccatcgtcgtccctgtcgcctcgagccgccgcgtccatatccacctccgccttcccctcgcgtcgccgcctccgccttcccctcgcgtcgccgcctccgccgccgccgccgcgccatgtggttgctcgccgccgttggagaagctggatccgatggccaagccctcaaggccgtcgcatcttatggcggcaagttcatggccggccaatccggtggtttgacggatgatggaggggatggtggtgatggagcagtggggcgaaatccttgcccatgccaccagcatcccttcgccacgtccctctatcttctgctcttgcgatacacgagccgctgccgtcgtcgagcattgcctccctccccaacatcttccggggcgttcgaggtggtaaggtgctcgatccggtgatgatacgatcgacctcaacggggagaagctcggttaactggcgctacgatcgatctagatggcttactcacaaggcaagcctgtcatcacactgtcctagaatcgggtcgccccagtgacgcccttgtctggtgctgcatgcctcctcatcctctccctcacgcgactgcaagatttgaatcactccggtgagtctctggttcgttctcggcttctcaatcctctgccttccttgattttttcccctttttctttgttctttactttgctgatgtgcataggtgaattctttgttctttactttgctgatgtgcataggtgaacgagaaaagcgtccagccaaccacttctcctcgttgactgtctttatcttccctccagccctggcagcaatagagcaagctcatgtcaccatagtcccatgctcttggggaaggagatactagcatcccgcctacggaaattgccatcgccgctgcttcctcaaggtttgcattatttttcacggccgtatttgttgccacatgaaaaaaaatgttagctgatattgttttcctatgttacaacaggtgagaaagatagtacaaggaaaacatgtactttggggaatctgttatggacaatagtaaagggagagtttcttttacaagaataaaccataaaccatttccaatttaccattattattccgcaatatagaacgacaaaagcctgagctcacccgatctgaaattttttcagcttttatcttatttgacagttcaagaactggtgtaatagttgatagaactatacttgcagaaaatagaaaacatgacctctgcgtgcaggcgagattctcagtggtgatgcagacggaggcagtacaacattcacagtggtaacatgacactaaggtttggttgattgggcgaagaaaaatagagtttggtcaggatgcagtgtttcctctgagaaaattgttgcaaaaagcagctgcacaagacaattgtgaggtattataactgcatttatggactaaatttggttctatcgaattcgcttgattcgtactatacatgtttatatatgtttggattgtattacagtgcgatatgaaataaaataaatttcaatagttgagttggattacatggtgaaggattataaacacaagtaacctaattatgtggatatattgtatgggtttcctataataaaagaattgtacaacaaacacaatttgctctatgtagtattcaaattcaagtatttagtacaaataaaaaaggtcatttaaggggattgagtagtgcaatacatagttcttccatagtaccataagttatatatggaaatagtcatgccagagctgtagaagctagaaaggctatactgtaagtacggttacatagagaaatgcacattatgtagatgtacagtttatacaggggtgtaaagcaaaagggctgtataaagtagtattatatacagaggtggcaaagctatataatttaattgagcaatgcaaaaaggtttatatatgaaagtggaatgagatgtcttactatttcatcctgtttattacaaaagggatttaggaagtggaaccatccagttgacctatgaaaacaaaaaaaagtattaatcatacaggttacatcaagtcagtacatgctatttgtaatgtgctgtgttaatgagtaatcgatgtaccttatcatgttgcttttatctaaacgatgtataatacgtgattaggaatcctagagagttcttgcattggtagcagtgtgctttgagcctttgagtcagtatacaggcgtcatgtgcgaagtgttaagattaatttgtaatggatcttccgtgccacgatttgtcgatttcacatgaaagttctactcttcgtgtcctcctcatattaataacaattctcttttatgatgttctacagcgcttctgaaaaatgaatatatatcactggtgacagattatagatttggacttacgtaaattggtatggtatccttgtgagtattcatctacagttcaaggtatgatacatacactgcatatatttataggtccatcatccttgttacagtttctttctgttaaccagataataatgttttcttgtatgtccccaattattatcattccttctcacacaaaaattgtgccttttgtatttctgtaattttgtcataaaatgctaccactttgtatattacaaggaaataaccattatcatggtttcttattagtcaatggcatgtttccgagaacaagaaaggattaatcaatactctttctgagaacaggaaaggattaatcaataccaacttctttttgtaattttatagaaattgttggttttccttagcagtggctggtgatgaatttcactgcatcatattttatttgctttcagacaagatatgatggcaattgttccacatgaaatctgctaacacatgcatatttggtatgtacttctatcctgattatatggctttacctgcccttttcaatgccttctacggagtgtcgcctattaaaatcagtaattgacaagccacatggcatgctcatagtttttttgggttaaataacttgaagcatttcagcgtagaagctgggtaaagtatgggacaagtatgtcgctgatcatctccacttaaggcgagaaacatttttcttcatttgtttcaggaattgtaaatgttcttaggtttagaggtgagatccatgtgcatgctatctaactgatgctctctggtttaccaaatttgtggacttctatgtattgaatgatacccttacaggttgtatttgaaaggtcaaaataattgatgcatcaccatgtttcttgccctattcattctatttgagaacatatttatatattactactgccggcatatacaagttacaatttacaagttgttacctttactggaaggcatatacaagttactatatccctttttttttgaccaaaaacagcaggagaaactccttctgtcctatattaatatatatataaagaacaatatttacatgagagaactacaagattagaatatacaaaaacttatgctagagtttggcatttattctttctactcgttgaatcaagagagtatcttcaagtaatcctagctctgaatacttcaaattatcacttatcattgtagctgagatatattttcttactttagttacttcttgctttaaattatctatacaaacaacaccttcgtgaatatggtttaatgcactccaacgagtttaacacttcctttagctctataattatgtgcagatttttttagtttaaattcaccttttagagactattcttgtgattgaaattttttggatacttattttttcctcaagttcattgagtgtggtctaggcatacatggttgcatcattttgccatggattttatcacttgagaatatgcatgctagaattaggcttcttatctttcaggttttttctagggttaatttaagattagaactggcatgtacctttatatgtaaagaattttgttttttcacctcaaaccctctatggtgtgtacttcctacagagtaatacgtagcatgttttctctgttcaaaatttaaggtcatatatacatattcatttagtcctggtatttaagtaagatccattgcagtgagtgtgtgtatatgaacttttgtatgtaaatatatctaaccaatttactgtggcttatacaaaattagatcctaaattacattgagaaaccttttgtatttccaatcaactatactagagcatatatgtatagctaccagtattgtgcatttgaaaaatagagcattttttccaccaacggtggttgatctgttagtctcaggtcccaattagatgcaatatttcatcttagtgcaatttattttgatcttcagtttgacctaaataattgtaatttgcatatgtcctatttttctgatcaatgacattcttaaatattcctataggatgttagcatctcatacatgagctttgatctatatacaccacacttggtattatctctaaccatgttgaattatcatgacatcgatgcattttaacctgaaggaattataatcgttcagaattttgtaatttacattaagtataccatggctgaataatataatgattcaagtttttagttagttgtatttctcgaaaatgagttggagttgtttggttgaattcctgtaggtacagctgttgctgccatttgtgtacattggggaaattttttaaacataaactaacaagacatatatattttgcagtacattttaaacacccattgccctggatactaagtctaactagacatgttttctatttgtcaaccacctttttgttcggtcaaataataattgatctacactggagttattctccattctccaatgtaaatataataactaatgtagtttaggatctgatgtatttcctttcgatatagatgaggctgacagtgcaaacaacaatgagctgtagtacaagttgtaagcatttcctttttacatactgacaattgtactaacagatatcatgatatactaatgatattgctacatttgacaactgttaaagcctttgctctcatccaggaagctggctttggaacccaacacctctaagcggaaatgtgcacgcatatcagagctggctaatagtaagcatatctctataattaaaggatgctagagaatttaagattaatagctgagctatctattcccataataggagagtaactaaggatcacataaatctcagtcagtaacagtccattgtaggcactatgtcatgctctcctaagcgtgctacattgtaattcatctgtcatcctatgaacagccaatcattatctttattattcttaaggtttttgtttagaactcaacttataaaaatgctgatgtgcctttaaaaaatagcttagttagtcataggatcatgttgttctatataatgaagggaaaaaagagaggtatgccgtttttagtttcctcagtgtgaaaatagtttatttaaccaaaccactttattactgatgtttataactatcccattttattacctttcttcagtgctgcgtgcagtttgtgactttactcagaaacacaaggccgcaaccaagtcgctaaagtgattaattaagtgcatcgctattttggcctggttagtgcattttgtaagtttgccagctaaactgtacatttccagaggtagaatactatcatataggtgcgattattatatacttgtattgtgctatatacgtcctggcatcaatatatatgctatctacctatattatcattgtgctgctaatggacacatctttattttaaggcattcttcttgttacaacctgtttgatcatattgccaataccgtaaatgtgcatatgatgttcttggcaggaaatgccccgtaccttttacaatgcttttgcttgtaacataacaaattatttgatcttatttagaatctatagtcagttatatggaaaaacatgagtgttcgatcattatgtgcactatttgtttcaattttttatcattatgtctcatcagtatctggagattgttcttttcgtttggagaaatcttgagattgttcttaacacctagaatttatttatggttgttctacctgttcactatacaatgggtgcttaactatacttttcagttttctcatagctttgatcatgcatgttaatatctatactgaaagaacatctaatctactatgcttaacatcttaagacaaaattaatatgttcaagttacttgtgagatctgctttcaaccttttattcaaagaaggccttaggcttaagtttatataagatttcctaaatgttgcacttagcttgtcaaagcttaatgacctcgtgttattagttaaaactgcatgaatacctttttgttcatcatgaataaaaatccaatatactaatatcagcacgcattcattcgtaggttgttcttggctacataagattgatccacgatattaatgccagatccattgatctatagcaattgtagatcagttggcagtggcggagggtaaaattaatcagcggtgagcagcttgatgctctcaggtatgatccactatccagttttgttgctgatgctcaccagagcaacgttgccccacttccttttttacagtcctctcatgttagagaggttgaagtgatagattactttttcttttgcattcctcttgaaaaaaagcaatattcagatgaattcgtttgtagtgtggttgtttctatgaagagaggtctaatttgtttggaggattagagggatgcatgaagtttgaagaaattttggaactaatatgagaaagaggacgcaatgctcatttgtggcaattgatgcaaaaagcagctggataatacaactgtgaggtattatacattgcatttatctgctaattttgcttctatcaaatcggcttgattcatttggtacatgtttatatagcaagtttgattcttgcattatgtatgaatagtattatagtgccatgctaaagaaaataaattcgataggtgagtatgaataacatggaaaaaggttttagctgactagcgatcaaatcacgtggaactatgttctgtatgggtttcctatatataaaaattttagagcaactacaatttactctgtagtattcggattggggtatttgctgcaagcagtgcagtacatagttcttacatagaaccctatgtattatatgcatgggaatggccatggtagagttgtacaagcccaaaaggccaaactgtaactaagattgcataagagctgcagattatctagaggcacaataacgatacaggagtataaagaaaaaaaatgtcatactttaagtagtcttatatataaaaaaatgtcatactgtaagtactcttatatacagaggtggacaggtggtagaacatacttcatatatacttcgtgttctcggttgtgtcttaatttggatcaaagttatcaccaattatgcaactaattatgaagttgtatggcaattttaaacaactaatcatatgcttttacatgagaaatgtttgtgtgccatgatcttcaatggcccacataactcatgtagtcaggtattacattcatgcttgctcttacttctcatctcgattcatttcagttttagccacaaagacatttttcaggtattacatttcagttctatccctatagatatttttctacagttttgtctatattatgcatgaatggaaagttcatctagcctgcagctactctcctgcaatatctactatacatgtgttggttatattcatacacttctgctagacccaaaatctcatggaacagtgtgtgatcggtattgcattggtgatcattgagcattgataactcaattcatacgctagctacatgtcagatatttgcaattacttctgctttgatctaatagaggaaatctcagcacatgatgtcttaattgtcaatcctctaatcattatcttcagcaagcatcaatttatatatatttgtttttcttaatgttgaagcaggatcgagagattatcagcattgctccctgatattggtgcaatacaaaagcttatctgacccctttccatcggtgggatcgagaaattatcagaattgctccctgatattggtgcaatacaaaagcttttctgacccctttccatcggtgggagacaatacttagccattgtgttaggctgtgtttagatctaaagtttagatccaaacttcagtccttttccatcacatcaacctatcatacatataacttttcagtcacatcatctccaattttaaccaaaatcaaaactttgcgctgaactaaacagtcttagtctatttcactgctagactgtacatgtgtttgttatgctgaaactatttcgttgaattttatgtacgtatatcggaagcatgcgaggatgttggcagggcagttggaccaaacagtttagtaataaaatctcagaaatccactggattcggtaaccttgttgcgtacggtcaattatcagttatacacattggatcagcaaggtgtggtatagtgtgccggtatttcatacaggcggcgcgcgcaacggcgccccatcctctagtttaccaagggtgtgtttagttggggaaaagaaaatttttggatttcacatcgaacgtttgaccggatgttggaaggggttttcggacacgaatgaaaaaattaattcttgaactggccttaaaaccgcgagacgaatcttttgagactaattaagccgtcattagcacatgtgggttattgtagcacttatggttaattaggtttaaaagattgtctcgcgatttccttcataactgtgcaattagtttttctttttatctatatttaatgctttatgtatgtgttcaaagattcgatgtgatgtttttgggaaaaaaattttggggaactaaacgggccctaaagcaacggcatattagctgttggtccacaacttagttccacagaaaacaaatctgtccagccaaagattcaagaaggctacatgctccttctcaataacagccctagtgttggaatcaagttgttaggatcggatattaggtagtatcgttttgctcaaagtagtattgtatcgtaggatcgtatcatagtatcgggatactatgagattttcttttttgaaaagtttaattaatatttatattaattatatatagccattctatataaaaatatatagtaataatatatattatgcaaatatagacatttatcatgagaaatcacattggttttgatatatttaactgatttctatatatacttgagcatattcgtttacattatttccaaaccatcttattttaaataatattttgtaatatcgtagggatcgtagaatcgagataccacctaagatttcataggatcgtgtagtaatgaatagtaggatcgagaggtgggatcggtatcgtttctgcttggtaggatcgtagtatcgtaagatactagaatacgaatcgggatactgacaaccttggttggaatgtctggtgatataccctgaccaaccacctccacctttggtgtccaacttatagttgcactttgttctcaaacttacgatgttgatgaaagaggttgtatctaggccggtcagcatagagatatcaagtaatgttggagtcatcgacccatggttcaaaagaagcattcaaggtatctgactagaaataggaagctgatggcattaaaggttcatctaagagttcagaactgccctatgggccgaagaagttctcagttgcccatcgagtaacgaacaatgttaagtggatgcggaggtaagttggtacacacttggggccggatcactccgagcaatgacccaagcgtcctttaacttactaggcagaaaaaagagagatgtggagcaatattacaccttgttactttttagcctggtctgctgtgggtatcgtgtgggtaaaaagctaggtagacgttgcagagtcatagagtatttgaatgcgttgtgctcccggttaatggagttgtgtctatgggtggattccagattatgagcacaagttaaactaattggctaataattaatttggttaattttgttattagctcatgttctgtttaagttattagaaacaattactccctccattccaaaatataagaacctaggactggatgagatatttcctaatacaacgtatcaacgttccatttggtcctagtttcttatattttgggacagaggtagtatattttatgcttattaatattgtttaaattaaatgtttaattatgttgcttatattaaatgtgtattaggacagaccctatgaaataactgataaggtttgggtttaaacctttcaacttcttatattgcattttattatgttattataagcatgttttgctgagtaccttttgtactcataaatgggttcagatcatgaggagaaagatgctcgtggagatcccgtgactcgttagagtgggacgattatgatttctaggtcattctatgctcaggcagttcctgtggtggagttggactgtttatttgtttataaggttttatgggtaatatatggaatgatcatatatcaaagtttatgattttatatcatttcatgcgtaactgaacttcctaggaggttatgtattcgtggggcaccttaactttatctggtgtccccacaaaaaccgaaccgattaaattaggaaaaccgaaagcccacccctagggatcaggatcgagatgcataggaggttacgtattcgtgggacacctaattttatcccgtgtccccacaaaaaccgaaccggttaaactaggaaaaccaaacgcctacccctagggatcaggatcgagatgcataggaagaggatatcaatattggggagaaggcacagtctctggaacaggacagaggacgatgcatacgggctagggcgtgggtcggtaacagctaaagcagttcaaaggaaagatattattacaaagtagatatatttacgctgttactgcacacgagttatattgttactatattgatttcatgatggtactacaggtctcaagtaacacataatacaattggcacagtaacgtgtgagtaaaggttagttgtattaaaatcaatcaataacgtggtggtagctcctactcataggaactaaacaatggtgttgtctcatattactacagtaatatataattctaatggtgattttattgtacgcataataatataataatagatttgtgaatatgcagtaagatggtttgaagtgtacagtaacaaacatcgcattgtagttattacatgttatgccaaattctacatcaattacaacggattttccaacaagccgtacgagatctagttgtttgaatactagttacatttccatacgatttgtgctaatattagcattctcaggccatggcatgaaagatttgaattagttaggccttaaacttctatttcctttagaatttaggcattattttttccccttgcttccaaaaaaaatagtaaagaaacactaatgacaacccttcgagttttgcgtgaaggctattcgcattacaacagtcgatccatgcggcaaactttatttacctaaccatactgatattggcgcacatccatgctatggctgtggcctgctttgcactataaaaatatctttcccaaccaggcaaccttccacatcctgtgcactcccgaacttctgctccagatactggccaatcgcagccagtcgctgaccaaactgcttcctaaaggttgtatcaaccgacaatggcttcttgctgtaatcaacagtaagacgaattacttctccattggcaggaccagagttgtgcaccaccatctcctcactgaaatttgaaaaggcaagagtggcaacttttccatcgaatttgttacatgacagcctccacggggtgccacgggttcctgaagcaagcgtttcacccagcccaggggcgacctcagcctggacaaccttggggtcatggtcagcggggcaaacagtatgaagcacgaaggagagatctggctgcagtatttcttggacaagaacagccattgtcgcgtctctctgataaacaccagcggctcgacggcttaggatggctctccttgtgtataaagaagcccaaaccttcccaaccgcagctccaaaggcacatgggtccatgagactgacattgggaattgaatcatagagaccagcagctgacataccagccaaatcctccacattagcactagatctaacaatcaaccggacatcctgtgggaagattcttttgagaaatataatagtctcctccggtggggaaagatgtgaaattattgcttgtagctccaacgccaggctatcaacttcaccattttcgactttggctgtttcaatcttttctagaaggcttgtaaaggattccagtgatccacttttcttgagcgcatcctccattgatccaaatggtatcacagcaccagaagggactctaaaggctgctggaactccttgatcactatagactacacagcagtaaaaaaaatatcagaaaataataattagaagtcttctcttatgaatttatcacctagaagttttccattcaacaaacattagcagtaaacaactctataatatcaaccctgtactagagtcactacaattgttttcctgtgaaccatatgtacactttccatcagttaccaacttaccatggatagcactacattttaactgtcttggcaaactgttttttttaataaagaaaatacaatgatacgtgcacttggatgatccaccaaattatgcacagaattgtttaccttatactttgattacatacaaaatcgtgcagtgtaatatatcctagtattttctgttcaaaactttcgacttccccattgataataattggagcttatttaaatacttgtttaaacttaaagtccctcgatatcttgcaaaccttgtaaagttccatttgcaaaagaacttagacaaaaaaaaatttaaatgaaaacttgatacctttattagacaatgaagcaagaacagaaagagttctgcatgcagcagcttttgcaccagctgattccactgaagcttctgaaagctcaagagcagcaaaactaccattcactcctgatttgcttttttgctgtggcaatgcccacggaatgaaaaataagtaagagcaactgcaacaagaatgcaggatgcatctttctggatgatccctatcaaagataagaaatgaagcatcaccttagacatttgcagtggcatctcgatatccgatggtagagagaattcattttggagtttctgttgaaatggattccctgtactatttggttctgtagagacagcattgtcatttttttctgaaactattgagagattgacattgatggatgatgcttctaatctgtaagaaactaagttaatttcagtccaccaaaagggaaaagagaagtcctagagatatactgttgagagaacaaggccaattaattctcattaaggacgagaaagcatctatggaatttgctaacccaaatacacaagtgaattttaaatcgcaagtctgttacaatggtagatgaaaattcagagttcaaagttcaatctgatttaaataaaaactgaggccatttttggaagtgatatttctcttagatttagtttatgcttattatccaagaataaagcctaattcatggcgtgtgctggaatattcttctacactttattcctgcaccttttctatccccattcgttccttttggcacaactcagtaagttggagagtcatgacatcttatgtagttagcagggagggaagcaccattggcccacaatgaaatggatatgcgcatccctagttggagaggctgcaagttatccttctttggaggaagcaccaacgttgcagtggtgcagtccttcacccactaggctcgcagttggcacagtaaccagaaattatacttctattatctacaaaacctgtagatcgtacaactcatgattccctactgtcatatttttctataaagattactagcaaaatgcccatgcattgccatcggagaaaacaatttcaaaagaagtgaaaaaaaatgaagtatcaataatgcatgtacatggtagtcgtcatcacaagacatgtgtgcttggttgatgaattacaatgaaaaattgttatcatttgtgaatggtatttagttttgaagttacgaagtgcaatgctttgatgtagtggtgcggtggtgcctgtgttgactaacatgggtcagcttgtgaagaatctattcccaatatggttgtttggactattgatacgtaggaggcttggagttaaccttgctaccggtattacgctaagagaagagccaaaacacattggcaaacaaacaccttacatcacgattgatgtgatgggtgtaagtcgatttttataagtggcaaaaaacgagaagaaaatatctagagaaatggaaagagaataggagaagaaatcaaattttcaaatcacaagggacatcatatgtgctttgtctgcttaggctactgttcctgtggaactattcaccacatcatgcatgggagaggtgatgagatcttggcttacggaagtaggctcatcggccttggtgggtcatggccagctgaggagccagccatgtgggggcagggaggagtgaggctccctcacacagtgtaagggcatctcccagcgattgagttgtgtttgagaccagcacagctacggaggtgacggaccaaaatttctggcagaaatgctatcaatttttataatagtggagataaagatatggattacatcatgatataaagcatttatgagttagctggtttaaatagcacaactagatattcgaaacttttaacaagatactgaaaacattcaaccacacaagtcgagattaaaatttcagcctgttattcaatcaacgattcaaaatttctagcagagcaattttaaagtgtacaccacatacaaatctaaagtcgcaaacaaggtcatagttgtcacttaatcgtctctcatattaatatttgcacaacacacaggaagaatcatgggcatatttgtcacttgaacaaataaaacagaaacttcaaaagatcaaagcaaaagaaataacatttccgatgagaacaaatcattagaacagaacatgacctgatatattttccctcaagcaaatacacatctgtaactgtgtcatcatattcacaagttacaaatacaacattctcctgtaaatatatcaaaagtagctttcagaaacggcaccatcataagtaaaaggaaatgagtgtagtaagactaacttgacgagctctaacaccaagatgtgaaaggtgaggtagttcctgaagaagaataacaccaactatattatccccagcagctttgacctatcaaataatgagcaaaaccatggtttatcagttatgggggtgataagatcagcaaataagaacttggcgctcccaaagtacctcttcatctccatcagccttatctacaattagaaccacaggttctttgacagatgaaggtaatgatccaggaagaattctttccacctgaataaagaaatcgtttccacaaaacatagacaatcagaccagataataactcaggcccaggaaaaacttctagttggactgaggatattataaccattccttatttagtaacctgaaggaaatgtctcttgcaaggcactggcccaagctgatctaatttaattagaaatgaagcatacaataatttacatgcatgtttatgaaacaaataaacatgtactatctccaacagaaaacaagaacctagagagtagaaaaatggaaacagtagaaatttctatatgtcactaatgaaaattgaaggcaccaaaaacctagatctagttacttgcctgtcacaggaaaataaaattctactcagaatgccactctgacaaggataaagatcttggttaatgctaaatgagtcttatactcctcccaaaacatgtgacgtccacccaaaattccaaatgtgtaataaaacttcagagaataatgcacagaggaagggtggactgtgatagatggagtggaaaggactaggagactataagctaggatgatgaatatttgggagaagaaaacatatatacaaacatgtctttgtccataaaaccacacatttatggtcatgatattgcacttcctgtctgaagtgccctaagctaaggttcccttgctctattgtaagtaatcaggttggtgcaacagaagatgtcaaggagtgtttcctactgcagcaacactacaaggaaaaaaaaattgaggtctctctctctctcccccttgaccagagagaactgagggcaaagcaacctaccttgccaaattaccccaatcagtactcgccctccctccctccctcctccccccccctccttcctctctctctctctctctctaccagagagaactgagggcaaagccacctaccttgccaaattaccccaatcagtccctgggctgtgtcaatggatatgcacaaaatttcatattaggattatggtggcaactcaggaaacaaggcaatgcaaacagaaggaagttcaatgcaagaaagtctgctgcttagttacagaaaatacccgcatcagagttccatgggccactccaggaacaagaacatcccagccagttgatccaagtacttctcgaattgctttctgaagtactgtgcatagtttagatacctgaaaaacaatgctagacatatataaaaagttaggttcagaataattagattgattacagctccagaaaaccacaatttccagactctgtacagaaaaggattacccagcacgaatttctgcctctgtgtaagttctcacactgttatctggtattccaagggctttcccaataacctattaacaagacagccacacagaatctaagtttgaaacataaccaaacaagacaaaaagtctgagtgcaaaacttgtatggtcaaatatcacaaaaaaaatgtaaatctttaggaacgaccatctgagtaaagttgtccatgaaccaattttccatgcttacatgccactgaaaatgtctgatcccagatatgcccctgaaattttggttcttccagttttaccactgctttttaattcatgcctgaaattgcaatcattgtcaatgttgcgggatcagctcagctgacgtgccaacaattgttccgacatggcagtcctacccttgctttactcaacatgtgaaaatggattgacaataaccctaggcatccattcaccatgttattccatcttagcttctatccttctcaggtgatggacaacacaaccagtagaaaggagaagggcagaggtggtgggcagtatccaggatttagctcacacaacacaggtgtttgagctgagtgggtttggggtggcggatgtgtgttgccataatggcagtcaaccacaccaacaggttgtactcagcagcttattatactatgcgtttaagtttgttggataataatattgacaacattgtatcttcatatttgtttcatttaactgcatgcatacagttgtgcatgctgatcaggatatatgcatacttgcagcagaacatgaagaagtaagatgtgattttcatgagtgcaaacagagcacaaacttgtcttaaactcttattttctatgtgatatttttaacaaatttctgcaacatgtgttagttttaatacaatggcgtaaatgcgagtaataaacctaacatggtgacagaacaggaatacgagacttccctcacttgcaaagcaagggtaaatttggcatttcccacctctcacaccaagatttaacaccagttggtcaacagtcacattttcaggcaaggattaaaacctcttgtaggctaccgattttatcttgttagactaaagcagtgacaaataaataatcgaaatttcagtggcatatctaggacaggaaaatttatatggcattaaggaattttccatacgaaggtttggtttgagtctgaagcaggttgtgataatctcgttcagtttagcagttaaaatgctattaatttcccgtgtccatctagctactctttttcttaatcaagttgcgaatgggtttatttttttcagaccatttaagatgaaatgtgacaagaaatggggaaaaaaatgatttatctaactataacctgacttaccaagcagtaatattacacaatggtttctgttttgaaaagagcaaaccataccatgataacagcaaactaagcctacgtcaaacaatatgaacatagttgtataccattgaacattttttttcattaatggagttaaggtcctctagcttcgtttaatacactcaccattactttttcagggaatatagaaagaagtgcttcagagtactcttccgttaatctccgtgctctgtccagtgtagctttaagtcttagtgaccaaatatatttcccatcttcacaaccttcacacatgacaagaaacagtcagggtatttctgagtcttgactacaataaaggtatttaggcatgggcatataaaatagatagatattaaagaagaaacagcaccttcactttcagatagacctttttgcttccaggaaagaatctcattccctatggcaatacattcatctgttttccaacctgaaaagctaacttgattgatgccaatgacaagggcatcaagagtagtatcccatagagtagtatttctagctacatcctttgcaagtgaagctgatccacctaaggcttcaagagtattgatgaatctgttatagtaccagagcaaagtacataagctcactgataccgccaagagtaatataagtttgcctagctacgattttattttgaagctataaatgataacatagagtcatggagtgaattaacctataaatcataacaaataagtcagcaaaaattgataccattttaatcaatgcaatgcattagcattatttggaaaaacagactgcaaagtctatcttttcactaaagcacaaaggaaattagttcactgttgcaaaagtcgaacaagtgaaatacactgttcttctcacttcacacacacacacacacaagtaggtgatggactgaaggtgttttcagtttgctacaatagctacttctgctagcttgcattactaccaattatagagaacatgtttcagtcgattctgctccaaaaccaacatatactacagctgcttgcaatctctgcaggtctctgattactactgatcctagagcaggaaaactctatcctgacttctatcttgtcaaaggaaacttattagcccagcagcctacaaacatttctagtgttcagacatcagttgttatgggttagggttcataggggtaaacaccgccgggaggatggtgacggctgctagggatgagagagggacttaggttgggagagactgattcatcgcttaatccaaaattccaaatgacgatacaatccatccttatatagatggataagatggagggaaagacccagtctaatcctatccaaccaactctatccaactgagctaccataggatgatggaactgatccctagggcctcaacccatcggctcactaggacctccacctctcggcccactacctatgacaacagttgcctacaatctattgtttgtacacatgagtaagctgctggttttatttaacaaatttgatgcctaagcattagattcacctaacaattatgactctgcatgccctcgaatagatcaatatccactctatatatgcacatagataatatggcttcactaaagatgactacatcacatgagagtgcaacctctacattcactttttatccatattcgtcagtattttcctttaatatttgtattcaacaagactccacaccacatgatatagataagcttgaaacaggggtcaaaaagaggtagggcactcgtccacatctatccaatgactttttcctatcatgatagagaggcttcaagcaattcttggtttctcattgcagaattctagtggtaaattagttgatcttattgggataactcaaactaatacagtaaccatacaacgtttctatcaaacccctagcaatttgtttacttaatccaatatggtccttctggatcaaaaagagaaatctagtatgcaatcaaatttatgttctgacataatcaagaaaaaattgcaattcatgcagccatcagttttcaccagagcagcccccacttcatatatacccaaagtaaatactttatttaaagattgattatggcatgttagtgtcaataaattttcgattgcccactagtttggaaaggtatgtgcttttttagagagcactgatgcattttacaagtgcatacaaactaatcaacaaagaacataaaatctcaaaaagtgacgactattgactagtaagacaaatgaagggcgaaactaacatttcagaatggaaagaaaaggcaattcaaaagtacaatttcataaggtttgtgagaaagcaccaattaaaatcacttagttgaaactaggacagttacctgcttaacagaacaaatgaataatcctcaagactaatttcacaaaggcgccactgcaaaacgtaatcaagtatcgcttgtgatatatgcagccaatttcaaccacttatcaattatgttagacaagataaccttttgtcgcattgctatagcattatcaggcgcatcatttctaaggccactttcaaggcccttcattagaaccgatcttagagaagataatgattgcaaggtagtcatcaaaatttgaatggtatcatttttatccaaatcttctgcatgatccacttggtccaaactctgaaaaggaagataaacacgaaaggaatatgagttaggcatgacaatgataagcaatgatgccagaccagtactacttgttcctctattgaaataccagaaagtaacaaatgtcggtatcaactgtcaaaacatagaaataacaaggacatagtgcaatgcaaggtgacataaattcgtatttataagtttatttgattatgttatgttaggtaaccagagcacagaagtgtctgattgagagtgatccctggtagagcattatccgcaactccaatgcaaaggaaataaggagataattaattgatgatcatacatataaagaaaaattaactggtttcagcaaagtttacccttttggtttccacaaaggatgagagaacttctaagcctgactcgttcagagattccttgatggactccagttgctcaaataggctgtgaaatcggtaatcaggttagacaatttatatttacatggacactatatgaccaacaggcatttgaatatctaacacactaaacatctgctttttttcaattttgttttataaatttattttgtagtaatctgttattacttcttaaggtttgattgcaggttagcagtacatggcaactttttttttttattctagtgtacatctaaaagggcagccacataggcattaggcagcacacggcctcctaagcatgtctgttgcctgactagaacttagaagttctaaccctggtgaacaattacatgaaacccagaattgacaatataaattgaaagtttaattccttatttcattccatgtcactgcgttgaagttgaatgcattataaggctcgttcagaactacaaattcccatcttctactcccttgttttacgagtgcacgcttcccgaactactaaacggtgcatttttttccagaaaatttctataggaaagttgttttaaaaaaatcatattaattcattcttcaagtttttttagctaatacttaattaaccatgcactaatgagctacctcgttttccatgcgggatgaatgagttacaaatcctcaggttcgaacacagcctaagggtgtgttcttttatcccctttctcaacttctactccctcgttttacgcacgcttccaaattactaaatggtgtgttttctacaaaaaaaattctatataaaagttgctttaaaaaatcacattaatctatttttcaatttttttagctaatacttaattaataatgtgctaatccaccgctctgttttgtgtgccagaggggaaggccggaagggttcccaacccttccaaaagaacacagccttaccttcactggtgccctgaataaatatattaaattcttaataccagcattattgcaagaaatatgtgcatatactagcagcaccagtctggtgtttttcacaagttaagaccttgatttatctttctttgtgtgaattcatgggtcgatgggggactaccatctgtctatctctatcaccgtaaaattaccactgcttctagttataagtagtcatgaattggaaagctataactggcataaggatgttttagtacacagtaggatagataagttcaaaaagagagtgacaattttgttagctttttcagcaaacagaaaacttatatctatggaagtaggaaaatggaaaattgtaaattagataacctgccagcattgaagaaatcttttagttcgctataaaatatcgtgaattgttcaacaaatgtttcactgtattctccaggggtcttagtaatcctagcaagcatgacttctgtagcaataagatcctcaggtccagcattacgatgaagtttgttttgtatagtatgcttgatttcttgctgtcgacatgaaaagatcaaactaagtaaagtaatccaatgaagagattgttcaaaactgcagaaagggatcaccaccttgagatcatgtgggatgtcattccggtgagcaatatcacgaattcgtgttagagggacagaggctgtaaactctgacttaaatgaaggtaaaaagggatgaattttgcgaatcacgagaacatcctgcacaaacataattggaagttggcaaataatagatataccttttcccaaatgttagtctggcagagccagaatgtgctcgagagtagggctgaactagtataatctacataaatttgtcttttgtcttccatttttcaaattttaaagtataatttcaatgaatatttgggcataggagtagggctctagccctagctgccctactcctatatccacctgaagatttaactaacagtcaagcattacatagttagcagagcaatcatttaatagcaattatataaaagttggaccattttcatgtgcttagcctcagttaattgggataactaccatacgaatgggaccaaggacagcacagagaaatataagggatcttaggtcaaggaggctatcaattgggacgaagaacatgattacatgagagactagattaattatttcatattgcttgcttaatcaaaggatatccttatatagatatgattgggtggagcattaaggggaaaaaataatagctctcactaaaataaagcagcagagtcctgctacaatacgtcgtggacactattcactctactttttaagggaacaaaattgtagtagttcatcttgattaaaggcattgtgatctgactataatcacaatacttgaaaatgctgatgctgatgtaacattttgttactacgatgaaaggggcaattaaccttggctgatgtggttttcccataatacatcatttcaagttcacggaatatttgcctcgatatctcagcatgtttgttaggccgatggtggccaccatcttcaaagcacgatatctgacctgtataaatccactgaaataaaatataaaaaaaatcaaagaaagctatgaataaactgttatacggtcttattaactccaaattatataatcctagagaggaaaattagatttataggaccattgacataaaacaattgtaaggagaaaccttcagataaatagctgagtatacaagggcccccagacgactctggtcatcaaaagattctgacaatatcccgcgaacaacctctaactgcgaaaaggaaaatatgaattaaattaatataaataattaggtagacagggttataatatacctccctacaaaacaactacctacaccggccctaactctcaatgcacaagggggactcccctctgtccgctcgcatttgttcattagattcaaacccataatctccacacatatgtttgctaacataaccaactagaccaacacggaagcactaaagtagagagcaagctaatttacattactaggatattacatttttcatgaaatagccagaacttttgaaaagatttcagtaaccactgacaatcatgggggtacaa

SEQ ID NO: 5696 - DNA, 8901 bp, Oryza sativa
ttggctgcttaggagtaccttccagtccaaagtttttccctgtgttaactttagtctttgaccttctatgctttcttaatacaaacatacatgtcttttgtatattcgtgaaaaatttaacagaactcttggaagaatagactagtttcttttatctgtgaaaagctcttgtgtctcctaaatgtgcggtaatgattatagaggcctgttatggttaatgctgacactgcctacattttgctttcaggttgctagcatttttgttccaattgtcatcaccttgtccatgattacattccttgtatggtaagttcaacatatactaacacaatttttgagtgatactatgtttgaaacttcaatttttctgacatgtacattggctgcttttgtaggtttttatgtggatgggtgggagcatacccaaattcatggatttctggaactagcaactgctttgttttctctctcatgtttgcaatagctgtagttgtgattgcttgcccttgcgcccttggtctggcaacacctactgctgtgatggtggcaactggagttggagctaatcatggagtacttgtgaaggggggagatgcattagagagggctcaaaatgtaaattacgtgatttttgacaaaacaggcacactaacacaaggaaaagcagttgtgacaacagcgaaggttttctcaggaatggatcttggggatttcctcacattagtagcatctgcagaggtgaggttgaacttaagttgcttgtatggttcatatcaagctgtagtaaatgtgtttcggtattgtaactatgcttcatatgaatgtggtaatgccaaaatatgttttgctcctcagggttttagttaaaaaaaaagtgttttggtcttgttcatattgacttgtcaaaagtaaaaaaagttcttttgttttctactcaggcaagcagtgagcatcctctggcaaaagcaattgtggaatatgcattccatttccatttctttggcaagctccctacatcaaaagatggcattgaacaaagaaaagaagacagattatctcagttgctccttcaagttgaagacttctctgccttgcctggcaaaggagttcaatgcttgattaatgggaagagagttctggtgagtcacataagctaccataactcttccttgcccttcttgcagctgagttgaaaacagtgtacaagtctaacccatctactgctgtaccatttcttttaagcaaaccactgattatctagacataactgttttgcaggttggaaatcgtactttggttactgaaaatggtgtgaatgttcccccagaagctgaaaatttcttggtagacctggaactgaatgctaaaacaggcattcttgtgtcctatgacgatgattttgtgggtttaatggggataactgatcccctgaaaagagaggctgctgtagttgtggaaggactaaagaagatgggtgttcatcccgtgatgctcacaggtgacaactggagaaccgcaaaagccgttgcaaaggaggttagtctctaatctctattaccttccttgatccataatgttcatcatttacctgaacacctcttcatatacatgtctgcgattttctgctcttgcaggttggcattgaggacgtgagagccgaagtcatgcctgccggaaaagccgacgtggtccgctctctccaaaaggacgggagcatcgtcgccatggtcggggacggcatcaacgactcccctgcgctggcagcggccgacgtcgggatggccataggcggcggcaccgacatcgccatcgaggccgcggactacgtgctggtgaggaacaacctggaggacgtcatcacggcgatcgacctgttcaggaagacgttcaaacggatccggtggaactacttcttcgccatggtgtacaacgtggtcgccatcccggtcgccgcgggcgcgctgttccccttcacgaggctgcagatgccgccgtggctcgccggcgcctgcatggcgttctcctccgtcggcgtggtgtgctcctcgctgttgttgagaagatacagaaacccaagcctgacgaccatgttgcagataactgtagagtgacattggacgagtaaagagaaggtgtgttgacggctgttaagtaccaaattaaattcgtcaataccagcataagaccgtaaatataaaacatccaacatagtggtagagtttatttctaacaatttccacgagtgttggtgtatattcgtatgcaggtgacaaactacctaaattgagaagaaatatatatgaaagaggaggagaatcaaactcgtatccgaacttatggagttttggacccaaaaacctaattaaacacctccaaatgtgtcaaacattcataccaatggattgaggggaccaaaataagtgtccaggccgaaaaccggagcgaacatagccgtctcgggtttggtcgaaccctcacggaggccgttggcccaggcccaagttcagttcggtagaaatccgcttcccaattacggttatggccgttttcaccggtagaaaccgtcataagcatggacacttgtcaatacaaaagagaagatgctctttggatgcttggagcatctccatactcccaagacacttttctacctataaatacccctctcatcctcacttgtaaacagacatcaagatgtagagctgaattataagaggctctaagtatacttagggctctttatatgttctatagtatacttagaatagggagagagtaaagtagaaaaaattggaggaattccagagttgtcggtaatcctctcattattcttgtactttgttaattactccactttaatagaaatatcattctgagtaattaagatttgcttagtgagaattaattcttggttagttcctaattactatatgggatcattgttcactatggtctagtaatatgtagtgattgctttaatgcttggccaacgttagagtagtaattaattgcgtagacgcggtgtctggctaattaattttcagtgattactgtgtatctcacggtacgtaggtgggtgtagaggtggtgacaaccctcaagagcacttaagtcctccacagtacgtaggtgggtgtagaggtggtgacaacctcaagagcacttaagtcctcgtccggtacgtattagagcgacatctggaaatagcgggttgacagttcctgaagtatcgtgttaggattaaaattaatctttctatagacactgtttttcacttgaaaatcctctctaccatttgcatatgtttgctttgtgtccttggatgaaattggagaagagctgagcacacacgttccttgtggaaatcgatactcggaatactgaatactgaagctacatcggtattctccgtgtgcttgtagattttatttgtgacgttaagaaataccaacaacaatctcgtttaccatgtacgcggattcgaggctacttcaaagttaatgtcagggatattcacttgataactcggtttatggccaatgggtttcctttaattggtaatatcccctttacatctttgtttacatttctgaatgatggcgaaatatattatcctccaatgctagatgcacattatcactcggtagtgttgattggttcagagattggaatcaacaatggaaaatcatcaacattctatgtagttagagacagttttggattcattcactgcagctaccaccttcaaaactatggcgcactactagtttatttgtgacttgtcttaaattcttattatccagtttagtaggtggacctatctttgttcttatgacgaagcgtcaaatctatgtatgcaattatatttgtggagttttgattctcatcatggaggctcaaatctatgtatccagtgtaatgtattagtgtagtatttgtgaacttgttctcttgttatggatgaaagagacattatccttaatttatcgatttatgtatccaatccagtatttgtgttatttcttttattttcattatgaacgaaatagttatcaatttatgcatccaatccagtatttgtgttatttcttttattttcattatgaacgaaatagttagtattgttctggacatgttcgtgcgacggaaaaaataattacattacttgcttcaaataatttgttgcgtgcatgctggaacacattgggcatattttctttttaattaagtactacactaattactactagtaatcgtattgcacgtttcccataatatataagcatactcaaagtttaatgcattgattttccaatgatatgtatatcacacgacatatacaaagtactaaaagtataaaattgtctcaaaatagtactctagtaaataacatttacatgatcaacaataatattctatcgtgtgaccagtagaaatttatatggtaagcaaaccatagaggtttatatctcagttactttcaagacattaattgtcacgtaatagtactctagtaaattgttatcggaatagtactcggtgtagttgccttaactgcagtgaacagaaggaaatgtcgagtgtgaacatgctggaaacgtcttaaaaattgaaatggcaactctgtatttctggtatggacttacagtgtatcccgtgaacatgtccaaactatattagttgagcactggaagggatttcacactgcacatgtccatcatcctagcagttgcaacccctcctaacgaaagaaaaataattcaataaggaaaaacttatcaaaggccaatgattttgaacccatcccttcgtccaaagaaaccccttctagttgtgattctaagttatttcactctacaagtaaagtgatattcaaatgagaacacatcatatatacatatattatttgtatcacaatactccacataaacttttgattgctgagaaaaatagcaattcaaaatagcatcctcaagcattcatatcatcaaagatcttgtaaaatgtgaggcacatgattttctagtagcagattagaatagaaaaataatatgaaaaacatgaattatttaaaaattacaactctgacaaaatgaagaactaatgaatgcattgaattccctcaaatctggacctaactacataacctaacagcacaggaatcaacacttcagggtatttatggcctaaacagaattcacatgacaccaattgttgggaggaattattccttaatgaaaattcaaaaatgatgaggaaaaagagcaccctctctttgaccatcgcctgtacatcgcaatgtttcatcatcaaccatccataaatcaagactattgataccatacatcagttgtcctcacacacatgatgtaaaattgtatctttgttaaaaaaaagtgtacatgttagtttggcaaggtaaaaaagtatcttgcagtgctttatagggaaacaaagaaaaatggagaaaaaaaagctacaattgacagttttttagaaatattgtgaattgaagaaaatcataaagttctacacgatttatatcaattaagtagactaaatacacattattcttgttctccatgaactacagtgtagtatacatgtcaataccaataaacatttgcactaaaattgacacatcgacactcaagaggtgtactaagccatttaggaacttcaagtgacaccctttctcaccttttcttttcgtttcctgattgcaacctttgcatagttggatttgttcaaaacattagtctagaccagatcaagagagccccagatggttcattgtaatgccatcgaatatattcaagtcatctaggctcctgtcatcgttgaacacctaacatccaatttatgcttcagaataatagaattcgaacacctgacatccaatttatgcttcaaaacaatagaattctcttggtcaccgtttctgcaagcacaaccttagagcagaatgattcagcaatttcactttaaaaaaataaaaaaaaaagtcctcgagctatttaaagtgtaatataagctcaatagtgtacagcgatcgcaggcttcagatttaacacgctatggacttttttgtattccacgttgaatttctaatcctacttgcgttatacttgaaaaatacgggaaataaaatttaagaattgctaaaagttgtttgacaacacaaagaaaaagttaggccctaattagcacatctatatcttgtatgacataacttaaaagtacatctatatcttgcaaacgatacatagtttgtcctttaaatagtcagtgtaccctaagcaagcaaatattccactaatttcctcacttgtcgcatagcacaatactcagtgtacccaaatctaaattggattcgacaataatcatatgtgtattccttagattacaaaataaatatcaaaaaagaagaccatttaactgaagatataaaaaagaactgcttcaatccaaggagctaaagctttttttttttcctttcaaaactctgtagaaactgcttccatctatgcatataaatcttttcacagatgaatacggaaacaaagatttaaacatgttcatgccctctcgacgggaggtaatactctactcttgtttgaggattgtatccgtcaaatattgtatttgatcaaatgatcttgttttggccaatgccctaagaggggtcccagctctgtttatatgggttgggggtatgtgttgcaagtagaaaatctagccaaactcgaccgaagcttccttaataaatattacaaaagaaaacccaaatagggatatagaatcgtaccttctcgcagttgtggcccaccttctgatagcagtcagatataaaggctatatgtaggtatcccatatctataatctccatgtgttctaataaatatgtgccataataagatgctaaaatgatgattttcaattatatccgtatacaagttaaagcctgaacttaatggaaaatgaactaatcctaccaaaatcttgcaaagtttctacattcctaaacaggctacgaaagtgtcgaccaaagtctgtctgcagtagatcttggtgtcatactttgctaactggccaaccctgatcaaggtagctagtacgaagagcaaaatacaacacacatacgcacacatggttagaacagaactactggttgagctgacaagtaattaccaaaagctattcaggaaagtattggacacgtgatggctgccactgttacgcatcagtccatcaccagatttcacaacccacggagaagaccgccatgccttgtattgtcgattggagactttcttaatgtatctgaaatccggctcaaaagtagcatgggttcaagattctatctgcaatgtttggatacaatgcgcctaaggctctgtttagttccctagcaaaaattttataccctatcatatcgaatgtttggacacatgtatagagtgccaaatataaacgaaaaaataattaattatacggattgcgtgtaaattgcgagacgaatcttttaaacctaattgcgccatgatttgataatatggtgctacagtaaacatttgctaatgatagtttaattaggcttaataaattcgtctcgcggtttacatgcgaattctataattatttttgttattagactacgtttaatactccaaatgtgtgtccatatatctgatgtgacttgccaaaattttacacccctagaactaaacacagcctaaagcattgtcacgaggaaagctaacaaggcgcatacaaaatcatctcaaagcacctacagctcatcatatatcaggcatcagcttgaacgaattttcctcagatgaaggcaatagaaatcaactacatatcagaacaaacgctacatccaacatacactagaaaattagcacgccaagtggcgcgctcattatagctcgtgtctactttctaattagtttccaaaattcaggtctataaaaggttggcaaatgaaagattcaatggtgttattaacttatgcaacaagtttagctaaattagcttccatggcacttctgctaaaaaaaacccttgaagaacgatcatcgaaaactggatagaactatagataaatatattttcatgaattcactaagataaaaaaaaagcctgatactaccatagttgttccggtctagcttctagctatggcacaatgaataaacacaacaatgtagttacacggaaaacaaaaataaagtttagaaccacagtctttcacacattttaaatgccagaggtcatgatttcgagcaccttgtaggcggtagcaatttccatcttcaatatcttacatatccctagaaatgtcaggaggtgaacacaaattagttggacctagactgactgatagaaggagatcaagagcaagagacataagttaagccagattgtcctggtgggctagtggcacaacagcaaaagcttgaaacaacattccttagtttttaaggaaaattgttgtttctcaattgttagttcttattatgggtgcattcaaatgataatggaacaacccgttgatagacccatcaaagtgataacatccacccaacagaacaaataggatgagggagcgatattcagaaaaaaatatctcctcagaaaatatatattctttatatatttgtcagataattgcaaaaatgcatattcagatacagagaatgtggaaagaaatatacagagaatgtggaaagaaatataacaagctcatgatgtattaacttaagaatgtggtcattatgaacagttgcaatcgatcgcaacttcagaatttctcaagtaatactcaggacattcccttgaataaaacacttgcaattagggcactaaccatttatgatgcaaatgtcagtaaat

SEQ ID NO: 5697 - DNA, 5507 bp, Oryza sativa
agaaagggtgatactataatttcacatgtctatcaagttagaaaattagacaggaattgtgttattctatcaccactggagattcagaaatcagaagttgaattataaagatgacaacattcaaatatcagaccattaatattatgaataatgttctctataaaaatgtgtatactgttcagagcatcaattataacaagaaaacaaaccttaagagacagtagagttttatcagtaaaccgctttactgaagagggtatatttcctgggagagtgttggccactctttgcagctcttcttcttgttgctttgcagttacaacatcagggccactgtacatatctatcagctccttcatatggggtgcccttgccattacatctttcacagcttcctattagtgatacggtacattatactgggtcagttgtatacatcaccaaaaaaaaaaaaactcattttagcagcaaggcgaatacagctgcaagttcaagcatgtactggttcatgtaatagtagaagcctatgagacaagtgtctaatgtggtgtcatacaggaatttccaaacagggacttaaagctgattagcagaaacatggaagcggaataatagatattcttttagttcaataagtccaggactgcaggaaatacataaaagctagaatgacccaatcctgttaaaatctctaatctaacgtagccaacagtccctctttacttggattttagaacaagttgaaacttatctggagattacagtttaacctcatcagaaaggagcaggcacaattactaagtaatcagctggacagcgttcatgcaacaaagataataaatcctttgtataaaccttatatccgctccatttgtaatgcataaatcagcttaccaaataacatgttctgaaaggtgaaacaacacaaaatctactaatatcattttcagcccgatctaggtatatcagtgcaaagctaggccaatctggctgtgaacatacttacgtaccacagcaatatgcatctgcaaactcattagaattatttctgaagcctcaatcaggctgaatgattattccaaacagggaacaagtctattaacatgctcgagttcatcagtttatttatgaaaacttgataatgcagctaggattctaatgccatccaactatagacttgcagcgttgcacccgttgagcatgctataatcctattgctggaaaaacaaagtatcatttacactatttatgcaggctttctccggcattttctaatgcaatctggttcctcaatgctgcaagagaacatatgtaccaaaacatctactcgcacaaacatttctgtggagaaaaataatatagtacaaggtccatcaaagaaatcacctcccattcctcctggttctggatgccctcatacgcaactatgaatggcttcaccttctgtagcatatcctccaatgacataggtggcttctcttcgatatctggattattgaaattcacatgatactctggctcaaactcgatctgcatacataaacccacaggaaacaaataattcaggaaccttgcatgaacggccagatctaacaactctaacaattttgcggattcaaccgcattgctgcacagaccatgttattggtgtgacaagcctccagatatgcatcctgcttcgggtctggcagcgcgttatctgcggcctcatcaaacgcttcgttaaaaatcttcatcttgtcctcgccgagccgcttctggagtctgtcgccatcggcattgtcccccaagtagatcccatgcttctcctccatatcagcagagcggcggccgcggccgccatcacgtcccctgccgcgcccgcgctccctaccacgggcaccacgacccctgccgccacgcccgccatcgtcgtcgccgccaccgcccaggagctccatggcgcgcttcacggcgtcctcgggcgacagcttcggctgcccgctgggagcgggacgcgccgccgacgcggccttcttcttctcctcgcggcgtcggatgaatcggttctcctcctgcggcatctccactggcggctgctgcatccgcggcacgccgcggccagcgccagcggaagggagcgtgcgcggcggcggcggtggcggtggctcggaggacgaggcctcggcggccggcgcgtcgaacagcttggcggggaccggttgcttgggggcgacctcaccgaggggcggcggcgatccacggccgcggccggcgccgggaagcggcggcgacgagaccgacgggatcacggcctccccgcggccgcggccgatgggggccggggaggagaagggatccgcgccgccgccgtcgtcgtcgtccgggacggggctaccgggggcgcgcggcggcgtcgcggagggcgggaggccgcgcccacgcccgcgcccggcgccgccgccgatgccggagaaggaggagaaggcggcggagtaggaggtggggaggtgcgcgtgccgcctcgcggcggcggcggcggcgccgatggctcgcatggtggtggggaatgggtttagggcttggaggggagcgcgtgcgtgaggtgctcgacgaaatggttgggctggtccggtgcgatgcggtggtttctgggccgttggatcgtaccgattgttcttgggaataagttcatctaaggttccttaacttgtcaacgaatccgattttcgtccttcaaccacaaaaccagatacaattggtccctcaactatcaaaaccggtgcatattaggtccctcggcggtttcaatggcggttttggctgacgtggcacctacgtggctaattttgactcggttttgatctgacgtggcactgatgtggcccttacgtggcaattcgatccggaaaataataaaccccgtgggacccacatgtcagtttcacacacaataaaaataataataataataatggtgggacccacgcggaccccacatgtcagtctaattaacccctcctcttctgcttcctctctctcctcctcccctctcttcgtctctctcttgcgctgggtcattctgattctcctcttcaccatcttctctgtcttcatctctctcccctctcctctttctcttctctccggttcacgggcgccggggagaggacggtgtccggctgggagaaggggcgcggcgcggcggccggtgggagggaaactagcggagagaaaggaaccagcccggcggcggaggcagcgccgccgcggccgtggctgcggacgatgttgacgtcgacctcggcatcctcggcggcgggatgaacgtgtcccgccgaccggccgacacacgcgcgcatcctcgaaggcggccgtccacgtgggcgggtgagggggccacctcgccggcgggagaggggagaggcggccgactgcgaagacgaccccagtgatgatgacgaccgtgcggcgcacggcggaggccgatcccgtgagcaggaagctcttcgtccacggcctcggctggggcaccaaagccgacgacctccgctccgcgtttatgtgcctaatcatacaaaggtagaagcaatagcgactagtactagctgactagagtatattttgcttcgtcatcatcatttgcttgtgttatgacggggttgatgaatgaatgaatgatcattgttttaggcaagaaaacactgttccggccggactgacgaggaacccatatcgatccgctcgccgcggcccatggaaacccaacaggagatggcggcgctaccttccgccgccggcgactactaatggtgggtgatgctcgagcacattgacgaactcgaggtcgacgacaaggactccaactacaactcctgctccaccgctgccgacgacaccgccaatcccgtgagtccatgacgacctcgctcacctccgacggccacgtcgtaagagtctacttccgcctcaaagcgcccccagcgacgtcacacctatgcccctggcagtcactcttctccatttccgccgccatcgtcatcgccggccgcatcccctagcacaagagagagatgaaaagaggagagaaagagagagaggaagcagaagaggaggggtgagttagactgacatgtggggcagcgtgggttccaccattattattaatttttttgtgtgtgaaattgacatgtgggtcccacggggtttattattttcccgggtcaaattgccacgtaagggccacgtcataccacgtcagatcgagaccgagtcaaaattagccacgcaggcgccacgtcagccaaaaccgccgagggacctaatatgcaccggttttgatagttaagggacccgttgtatctggttttgtggttgaaggacgaaaatcggattcgttgataagttaagggaccttagatgaacttattccttgttcttgcgcgttatcatcaccgttgattcgtgaatcaggtttttactccatgatttttgtttttttttttggattgtatggcagacgcataacaccacactcacacccgtgaatacgtctcgtaacatatgctctaaagatgaaaatcctgttaaaaaatcatctatacgtgtgtaatattcgtaagcaccaaaatttcagtcttcgtggatagaatcatgcactcacgactctactttttcttttttttcccctatgatttttccattgttatgatcgttttacctgcaaaaatgaacaaagtgaaaagaaattaaaatgatttatagcaattttatgtatatgtttctttgttgatttaaaagccaaagaagaaaataaattatggtaaaaaaaactcaaaattaaattaaaaaaataaatattggctatagctaataaggtaacaaacatataacaagaaaaagtgtattgatgtaagcataccagtgaatcttgacagagagaaaaatgggcatggacgtgtaacagcgtaagaacatcttcaacagcctttctattttactcttcaaaccaaagtttagcaacagtggataaaaattgcattctcttcatcccactcttcaagctatccgactggacaaactccttcccttacttaccaaacttggtgagccaactacacttgccatatgtgggtctaactacctcctattatctttcctcccacttgcgatgcagatcaagtggaactttgccgctgcgcacctcctcgccaccatggtttcccgctcgcaatccccctaacgagacaatcattgtcttcatcgtttgccaccgccatcgtcaccgccacatcccgcacctccccctctactccaccgtcgcagcctacacatacctcctcgccaccgtggcctctactctgtcgttgccgtcttcaaccccacacgaccttcacagcctccgtccctgcatggactcgggggccctcagctctcgttgtctcctctcaacggcgatttttacagcctttgcctccgctggcatggaggaagcccacggcaacgacagggttggggagtgtacggga

SEQ ID NO: 5698 - DNA, 7287 bp, Oryza sativa
ggggcataggtgtgacgtcgctgggggcgctttgaggcggaagtagactcttccgacgtggccgtcggaggtgagcgaggtcgtcatggactcacgggattggcggtgtcgtccgcagcggtggagcagaagttgtagttggatccttgtcgtcgacctagagttcgtcaatgtgctcgagcatcacccaccattagtagtcgccggcggcggaaggtagcgccgccatctcctgttgggtttccatgggccgcggcgagcggatcgatatgggttcctcgtcagtccggccggaacagtgttttcttgcctaaaacaatgatcattcattcattcatcaaccccgtcataacacaagcaaatgatgatgacgaagcaaaatatactctagtcagctagtactagtcgctattgcttttacctttgtatgattaggcacataaacgcggagcggaggtcgtcggctttggtgccccagccgaggccgtggacgaagagcttcctgctcacgggatcggcctccgccgtgcgccgcacggtcgtcatcatcactggggtcgtcttcgcagtcggccgcctcttccctcttccgccggcgaggtggccccctcacccgcccacgtggacggccgccttctaggatgcgcgcgtgtgtcggccggtcggcgggacacgttcatcccgccgccgaggatgccgaggtcgacgtcaacatcgtccgcagccacgggcgcggcgcgctggctccgccgccgggctggttcctttctctccgctagtttccctcccaccggccgccgcgccgcgccccttctcccagccggacaccgtcctcttccggcgcccgtgaaccggagagaagagaaagaggagaggggagagagatgaagacagagaagatggtgaagaggagaatcagaatgacccagcgcaagagagagacgaagagaggggaggaggagagagaggaagcagaagaggaggggttaattagactgacatgtggggtccgcgtgggtcccaccattattatattattatttttattgtgtgtgaaactgacatgtgggtcccacggggtttattattttcccgggtcaaattgccacgtaagggccacgtcataccacgtcagatcgagaccgagtcaaaattagccacgcaggcgccacgtcagccaaaaccgccgagggacctaatatgcaccggttttgatagttaagggacccgttgtatctggttttgtggttgaaggacgaaaatcggattcgttgataagttaagggaccttagatgaacttattccttgttcttgcgcgttatcatcaccgttgattcgtgaatcaggtttttactccatgatttttgtttttttttttggattgtatggcagacgcataacaccacactcacacccgtgaatacgtctcgtaacatatgctctaaagatgaaaatcctgttaaaaaatcatctatacgtgtgtaatattcgtaagcaccaaaatttcagtcttcgtggatagaatcatgcactcacgactctactttttcttttttttcccctatgatttttccattgttatgatcgttttacctgcaaaaatgaacaaagtgaaaagaaattaaaatgatttatagcaattttatgtatatgtttctttgttgatttaaaagccaaagaagaaaataaattatggtaaaaaaaactcaaaattaaattaaaaaaataaatattggctatagctaataaggtaacaaacatataacaagaaaaagtgtattgatgtaagcataccagtgaatcttgacagagagaaaaatgggcatggacgtgtaacagcgtaagaacatcttcaacagcctttctattttactcttcaaaccaaagtttagcaacagtggataaaaattgcattctcttcatcccactcttcaagctatccgactggacaaactccttcccttacttaccaaacttggtgagccaactacacttgccatatgtgggtctaactacctcctattatctttcctcccacttgcgatgcagatcaagtggaactttgccgctgcgcacctcctcgccaccatggtttcccgctcgcaatccccctaacgagacaatcattgtcttcatcgtttgccaccgccatcgtcaccgccacatcccgcacctccccctctactccaccgtcgcagcctacacatacctcctcgccaccgtggcctctactctgtcgttgccgtcttcaaccccacacgaccttcacagcctccgtccctgcatggactcgggggccctcagctctcgttgtctcctctcaacggcgatttttacagcctttgcctccgctggcatggaggaagcccacggcaacgacagggttggggagtgtacgggacgtcagtgagctcaagcgccactatagcatgggtatcgcgctttgttgacggccttcctttcatccgcgtcagccaccccgcctagcgcgctcacggatccgctgtcgccatccgccatcacacaaacatcgtcgccgcacggagggagagggatggagagtagctcagggtggccccagcggaagcaaaggaagaatggagaaataggaggaagaagaagagatgttagaggctgacatatgggttgcagtgtcatatgggttggagtggagagggtagatgaagaagctgttggcgtgagcaacgattttggcttaccaaatcaattggagatatagctgtataggtgtttggatagtctaatttgtatattctgttagagatactatcagcgcataggcaatgtagactgtctttagcattaagattgcaaataagcaagacttggggtgagttcatttctctccttttttttaacttatcttttttcacgtgcaagcttcccaaacagctaaatggtgcgtctttttttaaatctataaaaatgttgcttcagaaaaattcatattaattaatttttaaagtttttagctaatacttaattaaacatgctctaatgagttttttttttgttcacgtaaagggttcccaaaccttttcttcaaacacgttttatatcggtggctttgcaagcgcaatttgaagggtttttgtttttttaattaaaactagcaatttgaaatgtaatttcatgcttccgttatttattagtgcaaaagagcattttgttgtctgggaaaaagaaagaggttttgcctattttatgtgggcctgcgaactaaacccatatcagcgaggcctgcaacggtggtgtccttgattcaagcccagttccacttccacggcctcatcgcacgctacgcgacgcgagcgttcagcacgaaacaaacgggacagatgggcttctcctgctcggtctcgatcggcatctgctgccgcctgtgacacgggccgcatcagcttcaagcggccatttttcaacggaataagtctactttacattcctcatcttttcatcgagtttaaattggagttttagatgtcactggggagggtatgggtaacccatatctattttataattagctttcccatacctattgggtatgaaaattatccaatgggtataggtaatttatatgtgggctctatatagaaatggtctaaaacttgcaaaaagtgcttctatatacaataaatcatttctacgaattcaacccaatttgaaacgtttttataatgtgaacacgagttttaaaattttggattcgagctttacacacgtaaaatggtatggataaagtgtgtaatgatgggaacatatcatgtgcacacaaatctttacgtgtatacatcgtgcataccaaataacaaatatcataaaaaaaatctagaaactgcgtagacgtacttccaatagtattactcctacgcgtaaaatattaacctcaaattgattatattttagccgtaacaaaaaaaatcacagttttaaggtttctatcaaaaattttgcttttttttatctctatgtaaaatgaatttgaaggtacgactttacacgtagatatacaattgaaaatacatgtatgaacgtacttttatagatttttttgtggcatttgttaattggtatgtgcagtgtgtacactgtacacgtggggcttgtgtgcataggatatgttcccggataacaataggtattaccctcgcttctttatccaaaattaaaatagatatttttctccctatccataaggacataggtatggagatgggtgctatagatacccagtgcagacagtcctagactgcatgcacccgacactcaacacaaccaacctgccgtccctcctcgagagatcgatggtcagatggatcgaaagtgcagcacctcatctcacgcatatggctcaaagaaggtcaagaaagtggtacgtgtggtaaaaaagaacaagagagagagagagagagaaaagcacacaaacgcaaagaagccaaagcaacacacctctcaacgccgccaaagcacacaagagaaaaacaaacgaatgaaagtgccactgccaatgcagtcgcgtgtatacgtccaaagttgattggcctagctagcatgatacacacttttgttgccattcttgaaaaaataagaagaagatgatgatgaatccaacctagagaggcaaggcacctcggccatgaagtgctaactcgagacagaactagacactagtgtggaaaaaaaatatctgtgtcggacgggaaccttcatctgcatcgccgacaggccgcgttatggataattggtcaccgataacagtgatttgtctcaggccgatataaaagaccatcactaataattttaacccaacaaagaagtcaaatcaaagcctgaagataagtcatccgtgatacatggtaacgtactataaaccaaaaaaatgtgatggtcaccttttattggtatcgtcttgagaccattacggatgacttatcggtaatagcttttattttagatccaaagtttaattttgatgcgcacccagcagtcgtgacgttggttttttttttttttctaacacgagagaagctagaccgataaatgcaaaaatatgttgattggtgctcactttagtggatttccttccaaatcatctgtatggtctaggactatagtagtagtataatctgggcggttttgcaaagggacattttgccgacggccgaaagaactcgagtgtgtgcgtgtacccgttttgttcatacgtgttcagacattaatctaaacatcaaatattgggtaaccatgattacgtacttattaaagttgctacttaatgggccacgtaaagcattacatatattttataagattggcaagcaggagaagatctttgtggtcttaatcatttcatgacagagaaagcgtactacccatcactgataaagctaacatatatctattaatcatatatactccactaggaaataatttttccatacggacggcccgtatctaaccaaatgaatgtaaaaatcattgatttttgcaagcgagtcactatgacacccacatatgaagataatttttcaggggaaaaaatagcgcttgccgcctacgtcgtagctggtagcgatcgcgatcgtcgtcactagaagccaacaggtcatgattgaggtcgagatcgttgtcgcatccctagtcatggtcgtcgttgtggagccactgtactagatctaggagcggttgtcgtcaccacctcgactcacattccactgccgccctccaccttacgcccctcctcttcgtaccaccgcccttatcccagaaccgttgtcaccaggccactgccgagccatgaatctggtagcccaaattaatctgatcatctctcgccgcctaggtccgcctcctttactgccgctcttcaccatgcaccccttcccttgttgctatcgctgactcatctctgttgtcatggatctggcagtccatatttgcttcgcccctgccactccgcttgccatcgcccctctcctttgctgcttgcctagatatgcctcctctctcctcggcgaggagtagaggaagagtgtggaggtgggctggggaggacggtgaggatatctgtctccatcctcgctgcctagattcgtccctcctctttgttgcccccaacgataaggaccctcaatcttgatcagctgcttttggcaagaagggtggtgatggtgaggtagagtggctggaaggagtattgagggaacagaggctatagggacttagccaatattgaggctagtcgaagaagccgatcgaggtgactcacacttttaaggtggcaacatttttttacaggcgatgctctttagcacgagattataggagctcattggtattattgcaaactgatttttaataatctgccagtaaaaataataataataaataggtgcctacaaaaaatcgctttggaaagcgatagtagtacgtgtacgctttaattcgggcaagagaaaactcattaatcctagctagggtgatccacatgcaaacatttcacatgtcatgtctcatgggacagcatctcaaatgtgtgcttgaaactcaagctaccatccatagtaactggtgacagcgattttcttagtttaatgagagctaaaagttaaggaccaactttataaaggttgatatttaagtacgtatgcgcgcgcctgcttgcagctggttgctcgctgcacgtggattattttcatacatacatacatacatacatacatacatacatacatacatacatacatacatacatatatatatacatacatacatatatatacatacatacatacatacatatacatatatatatatatatatatatacacatatacatatatatatatatgtatatacatacatacatacatacatacatacatacatacatacatacatacatacatacatacatacatacatatacatacatacatacatacatatacatacatacatacatatacatacatatggatatatgtatatatatatatatatgtatgtatatatatatatacatacatacatacatatatatatacatatatacatatatatatatatatatatatatatatatatatatatatatatatatatatcttcttatatatgtaagatagtgagaattcttcatgtgtttattagcctcatttccttgcttattcacatggttatccatactatttattaacaaacaaaataatttgttttgtttctcggtaaaacttttatatacgtgttctcagctattgaaa

SEQ ID NO: 5699 - DNA, 23555 bp, Oryza sativa
tatatatatatacgtacatgcgtatatatatatatatatatatatatatatatatatatatatatatatatatatatatacatacatatacatatacatatatatgtatgtatatatatatatacatatatatgtatatatatgtatacatatatatcgaatctcacttactcctctcgttgcttatcagagctccgcaaattcgcgagctacttggacaagacaagtcaagtactgcttagcctccctatttcaattaatcgaactaaattttagcgtctgttcactttgatgccattttcaaccatgtcatttttttataaagttgttaaaaaatatatatatttaattagtttgttgctaaatttgatcaatacataagaaatcctggcaaaattttaccaagattactatcttgtcaaaattttgctaaacttttggcattgccaaaacttggtaaggtttattttaactacaatctgaacacgcccttacttataaatatatacattctattatgatgtgcgtttgcaacgcgagaatatatacagcgtgatccaccatcacatcatcgatcatatatatcattgcttagccaccctatttcaattaaatgaactaaattttacttataaatatatacattctattatggtgtgcgtttgcaacgcgagaatatatacagtgtgatccaccatcacatcatcgatcatatgtatcattgcttccctagttcccttcgttatttgcttctttattcattaattgtacgtctttctgtgcattgtgaatctagagtttggtgctatatatcggaaatgactaggttattctgaagtctcatcaactatgctaattaatattactctagattgaaaagttcatggtgcaaaatgattagtttttttaagtttaacgtgcatatataatattcgagtctgactgaacacaagttaagagttatttacaataacataacttaagacttaaatgacttttttaatatatattatgaaaatgagtaagtactacaaactgtccttttgtttaatctgttgattttatggttgtttatgcagcactaacctataaattttatattaataagcactagaaatcaaaaccaaaatgggtgtttcattggaagctatctaggaatctttgcttaattgtcaaagaagaaagcatctattccctctcgtgtaaagaaaacggcttgtccatccccctcatggaagagtaagctaggaacgattgagctagagcttaattgctttataatgttctcactcatcctctcccaaatgggcccctcaagccacaattttgaccaccattttttttgtttggatttgtatgtgtcataatgggatgcatgcttagtgacgtgtgcatgtatgggagacaatcttctattgtactaaagggagactactctcagtgagattgattgtaagctgctcacttttttgaccctttgtggcatcaatacctgtagacaatttgttcatcacattaatttgctttgaacaaatcatactagtgtgccaaaaaaaaacagaaatgaaatttatgtatagaaagttctttatttttttctttctgaaaaaacacactgtttagaagatcaaggagagtgtgcattcacctattcatcttttaagtagaaaaagagtagctagcagttccagcattatatatatgtaacatacaaaaggaaaaattgaaattgatggaaataaactaatttagctaccaacaagttcaatatcaatttgctatttggttcagtcaactaatcatgcatgaacctgatcaattcttgacaacaattaatttgtttgatttaccaatatggagtatattactatcaatttatatgcaccagtgaatatctagctagccagttcttaaaaaaaattaagtgccacaagatggcaattaatggtttatggttgtaggaaccaaaccaaaactaaaaactaaagctgcctgactggttgtggttgattggtccccaatgcacactatataaactttagggttttttttttcagtgtatatgttgtgatgtctacttgggcaaccaaccattcccacggggctcaatgcaaatgcatgtctttttaattccctcacaatctgcaagccatcatttggatatgatggtgttttttgagtacactcctttttccatgactaattgcatgatgtgtctagatatatgcatatatattatagagtttgacccacatatatataacgatatgatgattggatgcactagtgataaaagacgaagtcatctcttgtttccactaatctagcttctctgttggcgcgcataattcagcttaattaggtcgacaattttagtgttaattcgtgtaaccggaggacataagaatgtggagtatgttgtatctcctggtaattaattaagtaggtaaaaaaatccttctcatagcatagcaataagaatatatatattgatagatgaacaatgcatgtggaattaataatgcttcttattaataggggtgaaaatggggcgggtatttcccgccctcctgcccggccacattatttcgggacaaattcgggtacccgagacttttcacggatatcaggtccgaatacatgtcttttttggcggatataagatcgggttcggaaatatagtatccgatggatacggattatccggtaaaaaattcgggttttacccggataattatacggatattacctatattatgtttttgtgaggcattttttggtactatgtattggttctgctatgatgtattataccctatttatttcctaagttcctaatggcctaatataattgtattatggatatatggaattgttaaatggttattgtctatgtgatatataaggttgttgcttcgacttgatatccgaataaatattcgtaaccaatagtgtgtgtatctattttggtacgtatttgttccatatttttgcccgacattatacgagtttgtatccgtatttgacactatccttgtccgacccgattccgattataaaatgtgggttaggatatgaaaaggttgagatctgaccgaactcgatccgttttcacccctgcttattaatggataaacctttgcaaattgggtgaagtatacctgctagaatcgagaattcaacaatatatgatttacttatctaacaatctttataagttatacaccctatggtaacaaatattgtttgatttttttaaaaaaacttaataaatgcaggaaaaactaatttaatattttcgaggatacgtatatatgcaccggcgctctgagggtgtgtttgaggagaaaaaaagagaatattaagaaaaaaatagtgagtcattagcgtatgattaattaattacgtattaattatttctaactgaaaaacagataaatatgacttttgaaacaatttttctatagatttttcttaataaaaacacaacagtttcttctctttgtttttaaaaaacatggtgagacttccttttttttaaaaaaaataaataaaagttttcctctccttgtgttgctgccgaacgcagcataataattgttaatatatatatatattaagcgtcatataggagtttttatgtttcattagtacacaaacatttaaggtcaaagctgattaattatgacttaaaaactatactagctagctagtaaaaaaagcttaattattactcccttcattttttttctttgacgttggttagctcaaaaatacatttgtacaaggaggtagtactaacaaatactttctccgtattttaatatatgacgccgttgactttttattaacgatacggagggagtaatataattcaaggtctctctcctcacctctgttacaaagcgaggcggcaggacaaggagaccggcgaggcttcgagctagctagcagttggcggtggccgctttcccccccggatagaatatcacccggtgcgcgcgctttctacgccgagacctagagagagaaaggagaaagagagagaaacaaagcacctaaagcaacaaagagaggtgtagagagagagagagatgagaacatatcatcaagaaaagaagctaagagagatcaagtgatgtggtcgtcgccgtagcagcagtacagcttctctaccaacaccgtagtcctttctctcctcctccccctcccctcctcgttccgcgtgccgcgagaggatcgaaccctattcctttgttcttgaatctcttccaaatctgtaacagagagagagagagagggaggagatctagtgagtctagagagagagagaggttcttaagaggaggaggaaagctagctaggagaatagaatgttcccttcttcttctccttctccttctccttcctcctccaagaagcagcagcagctcagtggcggcgtcggcgtcggcggcgccgcggcggcggcgagctcgaatgatcggccgccgttgtgcgtccagggtgactccggcctcgtcctcaccaccgaccccaagccacgcctccgctggaccgtcgagctccatgaccgcttcgtcgacgccgtcacccagctcggaggcccggacagtacgtagctacgctctatacatgactgatcttgatgctgagaatttgatttgattttatttggttcgagttcggttcttcttaattaattacttgtatgtttcatgatcaaactcttgatcaattgtaaattacttgtatgtttcatgatcaaactcttgatcaattgtagaggcgactccaaagacgatcatgagggttatgggagtcaagggactcacactttaccatctcaagagccatcttcaggtgtgtgtgcagtacatatatagatccatgtctatatatggttttctagttgcactagctagcatggttagaactagggttagcttatgctctctctctctctctctctcatgttttgtagattgttgtttttcagaaattcagacttctgtatctctggatctctcatgtgttgtagattgttgttttttcagaaattcagacttgggaagcagcacaaggatttcaacgaccactcggttaaggatggtaaacacacgatctacttgttaaaatagcatattacattcctaattgtgttcttataattagctggctagttagcttgttagtttgttcgcacatgcatgtttttccttcctttaattccgcttgttaaagtttaccgacttgatatatgttagcagtgaatttctgtttcgtttgtactagctagctatttaaacagcttaatttacttaccatgattctttcagaatagttaatttcacactttctctgaatataatcaaaaggtgaattatattcaaacttatattcgtccattttcccactgcagcaatggacatgcaacggaatgcagcgtcttcttcgggcatcatgggaagaagcatgaatgagtaagttgatttttttttcatagagtaccctagctagattaggttgttcattaattcaaaatgtggtttttaataactatcttattattcaaaatttctatgaattgttagccgcagcgtgcatgtgaatgaggcactaaggatgaagatggaagttcagagaagattccatgaacaattagaggtaattaagagcattgtcagaaacaaattaattttctgtaattcagcatggtgtcaaattaatcacatactgaacttaatagcccaagaaattacttattaatttgctttgctttattctgcatatgctccttcacatgttgcctttgaacttttgcatgcatgcatgaacgttcttgggaagtttacatgcttgtggacagcttatatgtcaatgtttgtccttcacatgttctgaaaatgagatgcatccatgcaagaacattcttgggaagtttacctagctagcacaactttatttttttcctatactcatctgtggcactcatgagtttggcatatatgcattttctttggacacaaaagaagtgaatataactaactttgcatgcaggtgcaaaagcaccttcagatgagggttgaggcccaggggaaatacatgcagaccatcctggagaaagcataccaagccatctcgtcctcaggagattgcgccacgtggcacgcaggatacaaatctctaggcagccaagctgtccttgacattggcagctccatgagcttcccttctctgcaagatgatctgcagttatatggaggaagccatctagatcacctgcatcagcagcatgagcagatggagatcaggccatcaattgataccttcttggcattcaattacagctccagtactgggaagagcccaatggtgtggcccggcgccgacgacggcggcggcgagccggcgaagatctccggcgatcatcagctccagatggcggcgccggcgacgacgacgatgatgatggaggccatcaccatgtcaggaggagactccatgggcagtaaggggtttgagggtcagatgagctctaagcttgacatgagatcaccacctccacagcaaacagtgctacctgtaggaagtgagaggatgagtagtccaattgttggagccaaggctaggaacatctcctatgggtaaactaattgatgatgaattgaagaggtaattatattaactgcatgtttaattttgtggtgaaaccagcaagcaggctgaactgatcttgcaagatcactgaataagcatatgtaactgtcttgttattagttgggagagtatacaaaagtagtattgcattatgcatcgttcaattaattaggatgcatccatgcatgcaattaattaagttcttgagagaggagggtgatctagataattagtcgtgcctacattcttaattttggcttaaagtttgtaaattttaattttgtgttgtcttaattcatccatgcttgtctgaacattaacgaaagttttcttatatatatgtatttggagtcgtgtcacagtacggcatgcatgcatgtgataacatgtttttactcatgggtaaatattttaaggatataattaagtgcaagtgcttgatcgatcgtttcatgaaattctagaaaggtggatttacaagtggagaaaaaagaacgtacctaagataccgaaaatacagcagtgttcctagctgttagattttagttagttcccctatccatgtatctgatgtatctagctactacgtacagtcaacatatatatatcctggcactccaattaatggacgttactgccaattatcctggagactgactgcttacgggcaatccaactaatccagtcaaaggaggaggagcgctcggagttagctttccttgttagggagataagaaacctcatggctgggaatagggatattgttattctgaagattcatcgtaactagaatagtgttagccacgccctggctaataaagggcgtagcgaggctttaactgctttctgaccggccggatgatacttgtaattttatctctcacctgttgggtgctgagtatgagtaatatatccccgttcattgcaaaaaaaaaaacatatatatacttgcatgtcatctagattatattaacattatttctagaaattttcatgattattactcggggcctgggggtaggcatttaaaaagattattaatgagcccaagcacttaaaaatgttatatattattggcgttccttttatcgatcaactactagccaaaattactcgtttgttgctatggattattaaaaggaaaaagtataaattaccccccctgaaatattggatgagtacgaattatcccctaaacttgaaaaccagtcaattttcaccctcaactatcgatattggatgaatccccccagcagctttacaaacggttttggtttacgtggcaatccagtcagcaatttttttctttttaaatcagcgggccccacatgtcagtctctcaccctctcttttacccctcacctctctacctctctccaaaatcctcactcttctcgcttcctcaccttgaggacggcggcgggcaggagcgacgaagggggcggcggagctcgggacgatgtcgggcggagtgggcggcagcaaagggcgcccgcaaccaccggcgctcgggacggtggtgagctgagcttagggctgagggggtggcggagctcggggcagcagaggacagagttcggggcagcgggaggagggggcggcggagctcggagcggcgggtggaggggactggccctcgtcgccggtgctctgtcttcctctcaccgatagagaagcaaagaagggagagaaggggagagagaaagaccaacactgcataacagcacaattaagcactgttcccgaatcacgatgcaatggcttaatttaaagtagctagctcaaatatatccacagttaattagcttggattaattttgctccaattatatcagtgactgagccctgtatagcatgatgcatgcagccttttcttgctgagagtggaagcttcgtttgttctgcgtcgcctcctttctgcaatgctgcatatgtatgtacagtctaatgtctatacacagtgcccctggaattgctgaacttcacactgcttgtgctagtgtacaattcagaattcagatcatatcatatggtcagggacacaagcaactgttctatttttttttcagcagctgttaagattaattattcgaggtataaatgaatgaagtattataaagttaggaaatagatttaaattaaatagtatttactataagaaattcatatatgtacaaatttttcaaaaatcacgtattgttaagagtttgagaaacgtgtatgttaattcatgttggggaatcccaacaagaatcgtgttcgacctttaaaatcccaataataataaatagaagaggcaacatgatagggtggggcagttgacgcgatattaaaaaaatataaaacagaaccaaaataacgattatgtttgatttttaaaagcccaataacaataaagaggaggggcggtgagcaggttgtacaatagtaaagataacggcgggtatgaatcagcccatttcatgcaccccaattatattggctgtataaaaaaactggctgttttcatatccccttgagtacatgggacttgcaattatatatggtcccgatttctttcctgaaatccactagaaaggtggaatatttctggtttcaggaaagaaatatttgttcctgaaatgcacccgccctcgtcccttgtattattacaagcggttttccttggtagtagcgtgatctgcgcatgcaaattaacatatatgtggctcctctgatcatgctaattaattacctgatgataattagggatgattttagaatattaccatagacaaaccctttaactgcgccactgtactcctatatatatctcttattacaccggtcagagtactgattatttcatcatcttcttcgtgcattcgatcgatccatcgccatttcaattcccagtacttcagcaatggacaatcaatggaatgcagcgccatcttcaggcacgaattcagagtaagttgatttaccatggctatattaatttgttgttcattaattcaaaatgcaccctctttttagccaaacaatcaaaattaattttcttttgtctatactttctgatcgatctagctccatgcatgttcatatgttttcaaaattaattttctgttctgtcgatcttcacagccgcaacgtgcatgtgaatggggcagataagaaggcccagagccaagaacaacaagaggtgagagagcatatgtatttttaaattcatcattgcatactgatgactagttcacataagaaattagtacccctttaagttcattatttgctcctcccatttatctcaaaataaattagtacccctttaagttcattatttgctcctcccatttataaaagtagcagatatatgtattaggatcggagcatataaaatgtagtataattttattaggatttgataaaaaagaggatatttgcggaaggaatagcatgttgcttctgaactttacatgcatgaacgttccccattaaattctcacatgttctatctgaaaattaaatgatatgtctcttgcaagaggaacattcttgggaagtttaccctgctagtgctagcacaacttttttttcaataatctttcaactcatcatgagtattatatttggcatatgcattttctttggacacccagaaagtgaatatatttctttgcatgcaggcagaaaagcacctccagatgagggttgaggcccaggagaaatacatgcggtccatgatggagaaagcacaccaagccctcgcatctggtgccacgtggcccgccgccaatgagcaggcgaagatctcacctccaggaaggaagtgagaggataaatctggatttttcacattttggttcttgtgaaaaacttatttcgcaaatagacccctaaaaaaacttatcccataaccgccgacgtggcggggcgatgctgaggtgactagggagagcgcgccagaatggctggcgccaccccccccccccgaattttttatttttcttttatgtttttgatatttttttcacgcttagggatacataagaaccaaacatagaaaaaataaactcaaatggacgtaatatgtaacccgtagaatttttttctctcctctcctctctctccgaactagtgcagaggagagagatgtgcaacttttttatttttatttttttttgatattttttcacacttaggaacttacaataaccaaccatataaaaaataaactcaaacggacgaaatatgtggcctgtggaatttttcaaagctctaccgaaaaacttctctcctcaaaaacacaatcttgcaagtggaatttggaggttttaatatcgccgaacctggcaaagcaagggagaatcgggtgtaactttttatgtagatgtccgtggatatattatttgcctgattccgagtccgtatgagaaagttacgcctatttcaataaatgacatattttgtccgtttcggtgagttttggaaaattctacaagtcacattttgtccgtttgagtttattttttatatggttggttcctatgttctcctaagtgtgaaaaaaatatcaaaaaatgaaataaaaataaaaaattgcatctctatactgtttaacttatggctatcattttatatggttatattttgaattagattaagtaagtaatttcatatagtctaatttactaaaggatctctcctatgtttaacatgctgatcaaaaggttttactaaagaagttatggtctaattttagtgaaggtgcaaagtagactaagtggtagacttagctaagtggtagttcgagttgaaattttttttggtggttggttgtatcgtgatcctaagtgtgaaaaaacatccgaaaaaataaaacaaaaataacatcgttgcaactccatacagagaaacatgaatggaggtgaggggtgggggggcgccagtcatgctggcgccctcattcctagggcggcgccagccactttggcgtgctccccctagccacctcagcatcgccccgccacgtcggcagggggacggcgcggcgccagccaccctggcaccccaaaaaggaccatttctgggataagttttttcaggggtctatttacgaaataagtttttcaaaaggaccaatatgtgaaaaatccagaggataatagccttacctccgcttcaaaatatagcaactatattttgggaggaaggtaggtattacttatttagaggaacatcttctatggctatggggtatcataatttatgattaagaggtgtaataaacctcttgcatgatcactcaataagcatatgtgtgtgtgtatatgtacactgtcttgtttgatggtgttccaaaatggcataattaataatatgatatccgaatttatttgtagaggcatatgactcagcacctgctaactgctcccagagtccaaaaatgtaataacctataaccaaacgattttgctaaaaattaggcgcaaccggagtttcttttgtttttctttctctgttttatttttatttttcatcctagagtctccaataggcattgtgccattatcaacttataatatcaatatttattcgagatggtggtgaaactcatcctttataaactgcaatccctcgtaaaaaatatataaaaattagctataatacgaatcaggctgaaacgacgtatccagcccatcagggcccatactagagcccactatcagcccaatacagcgcggcctgcagccggggcccaccaaagacttcccaacgtcaacgcaatattctcctacctgatggatggccggaaaatggcattggacggacaggatgcacaagagggcaactaattaatcgcattttattttgtcttccaagatgacattgtttgaccttgacatttgaattttcaaatttcaacgagacccaaacctaaacggcgatgataacgatgactgttaacttgaaattaagtgtcaatgttctataggtcatggtcatgtgagataacgtatacgatacatcatttatggtcgttgatttttctaccgtaagtacgaaaatgagtgaccaacattgattccatatataatgataaattatcagcaagagagtgatgaacaagtcaaactacaactgtagaagattaattaattaacgactaacggtgttcatcttctagaaaggctagagggtagaggcgcagcacaaaagcaccaatatcttattgccaggtgtcacatgcatgaccaaaaatgttccgtatattgagttcgtcataagggccagattagtctaaggtgaactttgagtacctttcatatttttgttgtgctgactaaaatcacatgtgcagatttgtttgaaatgatacttccgtatcactatttctgccatagtttgtaacacataatcttgctttgtcagagtacagactgtccttctatctcgttttctccataatacagggactatatgtgctattatggtaggtatagtctgttccaaaatataactatttctagcacttaaaatttgttttaaaatacaataacttctccaccaacattctcttctcaaccaataacaactcttccaccattcacttttttcacctaacttaacttcttaatcaatcacaatatctctctatttaattctacctaatttcttaacaatcgtgtcaaactctaaaacctcttttattctaagaggaggtattaacatattatcataaaactttttagcaactacgtaaatatgagtatagtagctacgaaaaatctcaaagattttttttaaaaaaaacccattagtactaaacatgggaagaaaagtgcttgaaaaggaacaaaatagatctaactgatagctgtgaaaaaatctctaaaaaaaagaaaaacaaactatatattagtattaggccttttattttctgattaagttgctctacaatatcaaatcaactcatcttctaaatttataataatcaaaactcaataatcatatgttattattttttttcgtttttgcgtatactttcttaatcctcatatttatcagttgcaaacagggcctaaacctttataagaaaagtccttaaaaaagaaaagaaaaaaatattctagaacaaagacagtgaaaataaaacctgttttgaccatatgaaaaaaaaattaatcccaactcccaattcccaagccaaccaccacagcaaagcctcccttcctttcctctcttcgtcttcctcctccctcccctctctccacaggtcaaatcctccccttccttgcttgcaatcctagcaagctccaagatcgcggcaagctagcctcgagggaggcccgcctgcccgggcctcgggctccgggggcccggttcttgaggtttcttggtcgtggggtcgaggaggtggtgggtggtggtggctgcggcttggcgcgatgaacaaccacgcggcgggcgggagcacgagcaacggcggatccggggtcgacggggatggcggcggcggtggcggcgcggccaggaggaacaccaagatgcccaagtgtgagcgcgcgagatctctctctctctttgctcttctttgcttgcttcttgtctcgtctagccttagtgcaagatcaggatgcgatgagcagagctgttgctgagagcgaagtccatgtagtagttagtagcttgggttcttttcgcaatttcaccccgcaaaggtggtggtaatctggctagcttagggggggtctcagctctcgagatggatgctagctcatgcatgttttctttttggattagtatggtaggtaatgatttatgttgggtgtacttacctctagtgattatatagctagtttcaatagtccaggagaaaccttgattaaattgagctgtgcgcaattctaatattgtttggtttgttctttgcatagacgaacattttaggtcgaaaacgccgatcaagtgttaggggaagcgaatctgactagcgtttccaggttgtgagctgattcttactccgtaaatttttcatgcgcagattccaagttcacgcagcaggagctgccggcttgtaaaccaattctaactccaaaatgggtaagtttaattacttgttgcatacttccaaggattaatagatttagggtgttactagttttaggggataaaagatgaatatatgtgcggagccgttcactgatgttttggctttgtgctacttaggttgtatcggtgtttttccttgtcggcgtcatcttcgtaccagttggtgttgtttcgctgctagctgcacaaaatgtatgctctgtatcttttacacaataggacatgttctggaagtttctgtatttatctgtttgaaactgttgcaggttgttgagatagttgatcggtatgatgatgcatgcgtgccagccaacatgactgataacaagcttgcttacatccaaaacccaaacatatccaaagagtgcacaaggactctgacagtaatgagcttaattttctggcagttacctcatattgaatgattagggtatatagttggagcaacactgcagctaaatatatctgggacatttttttaaaactttaattagcatgtggttgtaagtggacattgtatcaaaatttgttggctaaatgggaactgttttgtttttatctccagattacagaggatatgaatcagccaatttttgtatactatcaacttgataatttctaccagaatcataggaggtatgacatgattctattcaaggttttcaatcaagaatttgattacttagccttcctaaccaatctggcaacaatgaaacctatgacttttttgccttatgataacaataacatgcatttgatacctagtatgtataactctttccaaattcagatatgtgaagagccgaaatgatggacagctaagggacgctgcgaaggcaaaccagacatctgcctgtgaacctgagaaaaccacggcagatggaaaaccgattgttccttgtgggctgattgcttggagtttgttcaatgatacatatagcttcactcgtggcaatgagaacttgacagtagacaagaaggacatctcttggaaaagtgatagggagcacaaatttggcaaaaatgtctatccaagcaactttcagaatggtttgctcaaaggtggaggaacacttgatccggcaatcccagtatgtgaactcttgatctttgctatcacgctgttgcacatgcatgtagttggaggcaaactgttacgcattttattacatatgcttaacatcttgattttctgctaatatcaactatagttcatttgagttcttattcacgtagatatataaaaaagttgcctagccttggaatttctatgagtaactcatatcagttcgcattctatgtgacagttgagtgagcaagaggaccttatcgtttggatgcggactgcggcacttcctacattcagaaagttgtatgggagaatatatgttgacctcaagaagaatgataccataactgtgaagctgagtaacaactacaatacatataactttggtggcaagaaaaagctggtcctttctactgcaacctggcttggtgggaagaatgattttctaggatttgcgtatgttatagtcggaggggtctgctttttcttggcatttgctttcaccttgctatacctcataaaaccaaggttggtaacatatgttccctgcaattaaatggaaatgcatgtgctatatacttgatatgcttgtaggccatgcagttaaccttctcattatagttcactatgtagatgcatatgctgtggaatgctacattcatgacatgggtgttatgcaaaaagctcatttcctggattattatgttttctgagaacatgtctactgtcgatcattttttggtgcatatcattcttacgactattagtgccattaagagtgatgtggcattgctgtactgggttgtatcattgtatcaaaataaagaaacaaagctaaaatgttcatattgaacatgcatactttcgttcctttgctgactgagattttatagaagaatctctttagttgcaaattttgttagggtaaaatactaaggcagcacagggcacagctagttagtatcatactcatgttgcattgatatgcacctgtatttacacacaaccacatgctgtatttggtatatgaaagtcgttctactatatttatctgcggtatttttgcaggaaattgggtgatcacaactacttgtcctggaacagacatcctggaggccgttaagacgtccaaaacacttgtcgcataaaaatggctcatccggtgacatgtatcatgtacttaatgatgatatactgaaaattgtcagggagtgtaatcaggtctttggtttgacctagaccttcatgtacatcttagcataagaaccacgctgttttgtttcattgtttcttttgttatttcggaactgcatatagcagtgatgaatagaatcggtactgattgttttgtgatgaatagaatcctatcattctgaatgcctaaaccgttctgttattggcttaagtggttcattcatcatgctgatatgcatgcttcagtaataaaacaaacaaactgtcttctgataatgggaatatgggattgaataatttttaacagatttgcttgtctaccatgatcaaatgctgcaaacctctcacattatctcaaacacgagcggcagaatcaaatgcctttgcttttttttttgttcttttttttcagacaggtgtggaatagaatgacaaacagaactgaaattgccctgcttttattgcttcagacaggcgaagatgccaaacaaaactagttttcttcgctgaaacacagttcatgggagactacaacaatgctctgccacactgatttgcttgacatattcagcaatcagcatcaacagttcaacaccaaacagcttacataatccagcagccaagaaccatcacataacctattccatcagtacaatacaaatacatcaatggcacatttcttttgcctccctcgtttcataactaggaaacaagagggaattcagctcagtgacaggggaactgaattttctaaggtcagacattttgttcagctgctactggctcatccttgagattcttgctgagccactcctgagcagctaccaggtcagggagcacagttgctccagacttcctccagctctcagcatcggcggtcttgaatcggtccagaagcagcgcgtgcattccgatgctccgtgcaggggtgtagtccttgcgcatgctgtcgcctatgtgaagcgcctcttctggcgcgaccttgcccgccatttccagtgcaatcctgtagatacttggatctggcttctccacaccaactattccagagaacaccccaaagtcccactcggagccctggttaaaaaaaaatcaagagaagtcatgaaccacaacatttacttgtgaagatgataacattagaggagcatgaggtgtaatttgttatgcggagaatatcgaacctggttcagtcctagagcaggcaagatgacgtctttgtaacggtattctgcgttgctgacaattccaaccgtgagccccttcccgcgaagccacctcatgaagggctgcgcatcagggaataccgagtacggagcagacgagccaaaagaagagtaaatccgtttgaaaatcttctcaaatgtctcctcgtcatactcataaccagcctacaagacagcacatatcaagcaaccgaagcacttagcctctgaacacaaagacatcactagttcctgaaaagcttcagacctacaaaacagtggcatcaccttaacaaaagaatccttgacgcacatcctccaccagtcgatattcggcatcttcgctgcaaatccaaagcatgggtattgccttgccatctcggtgtatgcaagcttgaagccctcatgcattcgctggtagtcaggacatggcttcccagcagccttagctgccatacagtagtaatcaccaagctgccctttgtaggcaagcagagtaccggtgacatccacagtgatcaaccgcagcttcgaaatgagcgacatgttttgacgatgatcttcttctgagcagcaaaaaaataaaacgatgaaaattctacagtggcggatctaacatggggaaccatcaaactgttactactactagtattaaggttgagggcagatctctagaacagaagctagaggctaacgcaaatttggagaagaaagacagaaagtgcgtgggtagagaggtgtgccgtgtgcgtaacggatgcgggcagaaggagcagaacgagcgacggatggggatcggcgcaggcgggctgcggtggcgggaggatgtgctcactcaccaggatggatgcggtgggaggatgccgacgaagcggcggtcgcgtgatggatgggggtcgccggaggcggaggcggcgcctcgcgtgatggatggggatcgccggaggcggaggcggaggcggagtcggcggcggcgcctcgcgggatggatggagacggcagcggtggccggtgggcgagatagaagcgtcaaaatggcgagggcagtttagtaatttcgcctagcgcatcccattccttgcaaattgcacatcccatccccaccgtacccgaaatatgaaaaatagaaacaatgtatatatcacttccaatcccatttttcaaattaagcccttgggattaacctttaacacggcgggtttttattttaattttttatatggttgagatggtggataaaaaatagctacctttggggcactgtccgattaggcacggctgaccgaacagccatgctgtgtcggccctatgtgctgggtctagagcccaggtacggtccagtgagatgagatgtcgggtcatgttgagttggcatggcacgattagtttacgtggactgtgttgaggccggttagcccaaatttaacatatactaagaaaaaaaaatatgaatagagtctgttctatcatgttgcacaaacttcggcacatgttgcacaaatgagatcccccgctcattaatagcacattcctcatcctcatcgtcaagcaatgccatggcccttcacttcctactttcttcgccccgagctggtgagtccatagtgatcgctatgcttagtagttgtgctcacgaattgggttggccataccacgatgctaccgtgcagatctatgtcgacaagcatcctccgtcgcttcctcttccctgaacccttggcttcttcaatttttccgttttcctttactccgtcggtcccatcgtgtcgcacgggccaagctatgcgctattcctgggtcatgtcgtgctggctcacacatgcacttgttgtgttggcatgacaacccgggtagcaactgaagcacagcctggctagacaggtcgtgccagcacgaccctccgctaaacggatcgaccatgttgttcttgagctgtgagctgcacatgtgtgctcggacggacacagaagtaataatatagtactttctttattaaaagtaggaatttcttctatttttatgattaatgatgcttccgaattttaccgtttgcttagaattttttaagcccctgtctttttaataaattcagttactttctttccgtggaagatttgcaattttttaagcccataagtttcttatgatataacacactgttttttaatacgctgtttttttgtactactgcaaccggatcaatggtgacacagttaataatagtctagcacatctatttgtacatttttaatagaacaactagcctgtgaatgtggacgtcagagaatacaccatacaaagtggtatgcttttgactctgatactgtggactgtccgaccattcaaaaatgagatatttacttcggtaaatatacttgtgcaggagacccatggattcgattgcccaaaagccttgcaaaacatcttcatttcccgaagagatccgtaccacatcacatgtacacataccggcacccatcataacctacacaaattaatgaaacaaaacaatgtgacaataatcaaaacccattaaaattcatcaataaaattcatgcagaaaaggagaaaattttcagaactaccattccttccttttcatatttgaattttttttatcaactttttttttaaaaatttgaccaactttatagaaaaatatagcggcatttccaaccccaaacaaatttattatcaaaatatattcaatattatatttatgaaattatttgttgttataaacatggtcgaacctaaatatgtttgaataggaaaaatgttttataacatgaaatggagggggaagtaaataaacaagtaaaatgggaatgggccgtccttgggcctaatgagcagaagaaggccttggcccaataatgcaaacgatcgacatggctgcgtacttactgggatccttggtgatgagcatggcggcgccggcgaagtcgcacgtgccgccggcgaccttggtgcgctgccagtagctgttgaaggcgtaggaggcgtgcgccatgagcgtgtccggcaggaagcacggcgccccaggcgccgccaccatgtcgcagtccgcgcccgacgcgcacgcgtagtccatcgccgtctgcgccaccgcgctcgccaccgtcgggttcgccacgcaccacacccccgcctccctcgcccccggcgccggcggcgtcgtcgttgctggcggcgggcttcccgttcccggcgcgatcgatggcggcggcgcaccggcctgcgccggcgtcggtgggtttccagctggcgcgatcgatggcggcgagtcgccggggctcgccggcgtcggcggcagcggggccggaagagccggcttggtaggaggaggagggtacacgcagtacggcggcggcggaacgtcgtcggcggcgaccggagttgatgggcccaccacgtctttgaacggtggcaacggtgagtactctcttgaggtgccatttgctccacctacaatgcacacaaaagataattaaacaaggtaattaactagattaattggaccaaattagacgaaatcatacatatatatgagcaagtacaaaatcaaatcatacatgtatatattagtatgcattttgtagctagattgaattcttgatgcataattaccacattgaatggagaggatgagagctaggaggatgtagcgcttgatgatgatcaccattagcggcacaatgaatttcatctagtcagatgatcctatatatgtatattaaatttactacggccgcgaggctaccaaactgatgcttgtaagacattggagtacggggagagtgagacattgatatagtgttgcaaaggaatataaggagaaggattctaatccttctatggactacaccctctgtcccaaaaaagacaaatcttagcatcccaatgcaaaattaaaggagaggataaatgaccaaataacccttattattagtaaattagtattggtgggtagatagataaggggtattgaaggaataaaattttttgatttgcgaaccgagagtagataagaaggtagatgttgatttattttgggacaaaaatttgaatttcagaagttgatttattttggaacggagagagtcctctattctaaaataaacgaatttatgttatggtatgacattaccataccttacattatcttgcacctatccagattcgttgtactagcaataaattgaattacacatttgcgcgcactaactaattatttgaagccttattatttaaggctggttacaccttatgtcaatgaacaaaggaaaaaaatatttataggtaaaaattttgtatctgtactagtcaaggctagggaaaaaactatgtgtgaatggaaaagaaagcgccaaattcagccactagcattaagtttcaaaatttaaattttggttgcacccaacaaacagatgatgaaagacacaatattatcatattgtttgaatatattttttaaaaaaatataacgaatttttcctatgtaactatatgggatcaatcactaatattttagatgttaggacagaggtaatatgtataatatttgagtaaaaagatacaagtttaaaagagcttgcaacaaatggttaacaagtctcaggtgagcaggcaaaggggaagcaggaagaattttccagctgcatgctagatgctagccagatttcgctatgcaggctaaggtgcataagaatattggttacttggttcttcagaaaattggttatgctgcaaatgtttatttcttttcactgttgttttcggcgcattttgttcggattcttgatcttttctccaggtgcagttttggcacatgtgcttgcttggtcaatgagaaattcaaaaaagaagaagaagaagaagaagaaataaataaataaaaagaaaagaggaaatttgattaaagttgcacgtatgggatgggtcctttttcgttgctttggttccactcaagcagagacaactggctgatacatcattgcaaacttgtttgcacataaatatggaatacttcatattttcacatggccatttcatcgtttaatttgttagagaaattaagaaaataccggtgtgaagattttacaatgtactcatcgcaaaaggtagttaatgcatgaatggtctgctaaatgtcaatgacacataaaaacaataatttttcaactccctgatttatactatttgtataggtatgtgttttcatcttaccaagctataccaagtactccctccgtttcacaatataagttattctagcattttccacattcatattgatgttaataaatctaaatagatatgtaagtcattct

SEQ ID NO: 5700 - DNA, 7934 bp, Oryza sativa
ataagtgcgatggtgaacgacgctacagaggagatgatgaccatggaaggagcaaccgccacacgagatgaaagtgataacaggaaaagaagcccagacactggtagtaggcatagaagataagatagggagcaccgtgagtgagacgagcaaacacagggaaagaagtcagagtgatgatagtatattgctaaggtagctcacgtatattttgtatagttctttttctgttactttacatacgaggatttcagacgaagacgggtgagagagattttgacagttttttgctctcgtgtgtaaacttctcagctgaatctcacatttcatcatctggagtctgattacacctttcatctctgatcgaattgtctgcgaactaattgcgaatggcgtgcatgcatgcatgagctgtaatttgctagccattttactttggttatcagagagatctgaattacttgctagctacctattatagaacatacttcacatccgttacaacatataagcattcacctagccagaaatgcttatattttgatattttgaaatagatggagtatcagttcctagtactgctgatttgcaaaatgtccaaaattattagttacgtgtacttcatattcatacatgcgagtataggttgaagaaatgctgctgccagcgctatgctcgacgattgatagtttttttatttcctctatgacctatgataataattaccataaaatttacaccaagttgttaagatgaaaattacgatctttactacaacagcatttcgtggattggatttcacatatcatcaacgcaccacggatgaagccatgtagatatgtaggtcctgtttagagaagcttctaacaaatgcggtctctcttggaatctattctcacccagattctgataatgtagttatagaatgaaaaataaaagaaaataagtcaagagcgcaaccaactgtttcttagaatgttaactctcagaaacatagccgtaatatgcggttgtgggcctggacagtttggaagagcttctgattctgggagaagatacaactggtagaagcttcccaaaactatctagcttttcatcgaattatgagaagctatagttatagaatctataaaatgagtcttagggcctgtttgggggagctcctaactgctactagcatccttctagaatcagaagctcccccaaacagcccagctgtcggaccagattctaagaagctgtagttatagaatccagaaaatgaactagaaattagaagctggaaaacccagcctttctaaattttcaaaagctggttaccaaccagctgcttctcagaattttaagctccctcaaacagactataagctacccaaaagaccctgtgcaacagtgcagggttggacgaaaagcatagcatgaccaaattgggccatatacgcgggcaaggcccagatatttcttggtcatggttttctggcccaggccgagaattcagggtcggcccttacatctccgtagcacgcagcctagtgcggtagacggtttaagcgctcagaaatcaccaattttttgtcataaaaaacaaaaaagaaaaaaaatagaaacacctcgtcggcgtttagaaaggcggttggggttcggcggcggcggcggaggccggtgagtatccgcggccgcgcgaaccagtcgcctgagctcccagaagcatccggcgctgcggctcctccgtgatttgtgtatttttccccttgaatcccgcgccgtcgcggccgccgtgtgctcttgccgccggcgagaaggggggaaaacgcccgcggagatgtcggtcctcatcgtgaccagcgtgggggacatcgaggtggacctccacaccgacatgtgccccctcaccaccaagaacttcctcaagctctgcaagtaagctttcagtttacccgcatctagggcttgttctatctgtaagtgcgcgggatcatctggctagtaccaggggtaacgctgtctcgcggttgaggggttagccctcacgaagcagtttagcggccaattttggcgttgcagagggtgctacttggtgtggatttggtgttgtattctagaaccgcgaagggtgtatgaactatggagtctgctgggttaagattaattataatttaagctgctgctgatgtgtcgtgaatcattgtgaatgaatttaccttcttagtgtagtcattaaaatgtaggatggaaagattgggtcaattaggggatcgctctttgattattagggttgttatctgaattgaaaaaaaaagtatgcttactgatattgcaaaataatgcacaatagcagtattatgaatatgaaatagtaattttatggttatgaaatatagctgagttgactatttatagcaatgggagtaatcatcctcattcctcctatgatttgacttaccaggatgaagtattacaatgggtgcctgttccacaaggtggagaaggatttcttggcacaaactggggacccaactggaacaggagctggaggcgattctgtatacaagtaaacaattgctcagatgttttactgccactgattgttgaatacatgcctgaaaagggattcatttgtttttctgtaggttcctttatggtgatcaagctcgattttttgatgatgagatccgaccagaccttaggcattcaaaaaagggaactattgctatggcgagtgctggtgaaaattgcaatgcctcgcaggtgtgataccatattcctagccttcctaccgaacttagctcagctgttttgataaccagtacttgataatccattttgaggtccttaactccttgctgctaacctgctatttctaacctttgatttatgtttctgtgactttattagttctatatcaccttgcgggatgacgtagactaccttgatgataaacacacagtgagtagtaccttattatattgactcacagaatattttctttggaaaaatccactttatctacagtgattcatatgtatgtccttatcaattataggtgttcggcatggttgctgaaggctttgacacgctgacaaagattagtgaaacatatgttgatgataaagggagaccatttaaggacatcaggtaaaataccttttttaaaaagtctaaactgaataattagaacatgcttgctaatatttacttactttctggtgttactttctgttgtttctgctttatttccaactgctgaccttctgcaaaatgttcaatggacaggattaaacatacgtatgtcttggatgatccttttgacgatcctcctcagctcagtgaacttattcctgagaattctcctgtagggaaaccacaggatgaggtaatatgagttctgctattttgctcatgttggaaagatgataaaccaaaattgtctcaccaaaatcacaggctgtcttttgtttaattcgttttacctccacattcttgaaaactatttatttgtgcacatacctttttaaaagaatatggtatgaatttcagttgaggcagccactgggtgtaggtgtattttttttccttgttctgtctgtacaaattatcccgatccctaaaatatctagacaggcatgtttcagattagtcctagaagggtgtggttttgccgtgattctcctgaatgctatgtgttgtccttttaacatggtcatgatattttcttttcactgtcaatgtacagattgcagaagagcgcttagaggatagctgggtccctatggatgaaatggtggctcctgaagaacttgaggagatgatccgctccaaagaagcacatacaaatgctgtgattcttgagagcgtgagtcctgatgccaaataaaaaattaacagttcgctcattattattcatcgtgttataactgataaaaatacctttgtcttattcaggtgggagatattccagatgctgagatcaaaccaccagacaacgttttatttgtttgtaaactcaacccagtaacacaagttcgtatcggttcttaattgattggctttgttctctacttccactacctttttatgtatagattcacagatcagtttggaagtcatataggtattgaatttatagcaatatagcttgaaatattgtttggtaactaaacggctagtgttcattgttttgtaggatgaagatttatatacaattttttctcgttttggaactgtgacatcgtaagcgcattttcctaagttcaattaatgtgcatatcttcctgtttcttattttgttaactttttttattattccttgcagagctgaaataatccgtgattacaagactggtgatagcttatgctatgcttttattggtgagtttcattcctcaaaagctggtgtacattgacatactgtgatcaagcatcggattgttgttagctagagttatgctagtccgttcatcgaacgcttgagcttcattgatagctttcccaggcattcatcctccaattctttaggcgtgttgaacatcatgttttaccctcttagatctgttatcctagtaaggaacaactgagtgacctaatttgcaacaaggttctggtgttttgtgtaaggctgagttccaaatgttagtggctatggatatactttagttgcagcatgtaaagcacaccttttagtttgttaatacttaataaaccagcaaatgggttaaatgcatgacgtggcaaaaagactaatggtgtttacttgtatctcctcaaaaataaacattaacgatttaagaaaacaaactgagtagctccattgcacacttctgaggtattaaacaatataagtttcttgatagctcaatttttctctcagggttacggtgtcagtgtgatatttggcacagactgcagtagacagtagatggcctagaaagaatttattgttccaccttgataaattggcaagatctgaatgctattataaaatgctaaattttatcttgctcttttgtagaatttgagacaaaggaggcttgtgagcgggcattcttcaaggttagttgcctaaaatcctgtttcatgtggcagataaaacttggttcttgtaattgtactttatttcccttcattacttagcatttctttgctagcatatttttataagtcatttttgcttgactagtgaatgttacttgattgtttgtgccttgacaattcagtattgtctatatttgtaattattttaccagtgttttcatgggagcattgcttactcaatgatatgcttgcagatggacaattgtttgattgatgatcgaagaatacatgttgactttagtcaaagtgtttcaaaactgtggggtcagttcagacaaagcaaaagaaatgcaaataaaggtattcttatttccatggccttagaatatgattgcagttttcagtttcttttttatttaagctaactgcatggtagctttcttttttcttaaggaaaagcagtaggggagatcctctactgttaccctttcctacaaggaaaagaactatataaatctatccttcatcaaaattcttttcatctagactttggtggcactcaatttcctttcagaccataattatagcatcctcctgtatcctatagaaatttatttattcctataaggaatttagtgttttgtaccatgcggaagatgtctagagaagtgtactgattattattcagcacagttaaaccgtgtcaagtgtaaagatggcaacaatgttcccaataagccacaggacaaagaagaaagtaaacatcaatctgagcaagacttccaacatgttttgctttctccttagcatctctttagtatcgcatctctgtctttaacatgcatttgttctctggagttcatctgtaaatggcagaagtgtgatctgaatactgtgtcttagtatattagaagtctgcagagcccctaacagaatatattattactagtctttatattaccagtttttggctaaaccacttgccgcggatggttcagattgtggcaaatagcaaactggcctagcgtcatcatttgctaggcattctgaaactcagattgttggtttctttgtatatgtaatatacgatcaatttcaaatagccctgtactcaacttagccattaattcttccagtaccaaactaacagaccatgttttatttcttacaatatgagctgagcaatggacctgaatattcatatctgcttaagatcatttctctactagagtaacttgcacaattggtgagccatggaactgaattctcataagagacctttgccatagaatattaaatcatgaaattcctatttttctgtagaaaaggttgatttatgaaataattttgatacgaaacatctcatcttatatttctaggttgaccacatccaagcccattaatctataggtactaggaagtaggaaggtgtacgcagatgcccacttcattgcggaatttaacattctcaactaggactcttgaactctagttagttgtgagaccatacttttttactattttggagttagaattaattcacatgaaagctatatgatgcaattctctttgcagatggatgcttcaagtgtggcgcccctgatcacatagccaaagactgtgaccagggcactgagcagaaaaacaaaggcccaagttatgtcctgaaagatgaaaacactcagcgtggtggaaataaccgtcgaaggtcattttcttttccctatctatcatatttcctgatcgtctcattttctgataatcttctgttgttttgcagctatgatcttgtctttgatgaagatggtgaaaattatactgatcagcaagatcctggaagtactggccgaagaaagattcaaagaacagatgatcgcaaatcagggctgccacctcggggtgaccatgacaggattagccgggagagaactcacagtgatgagaatggtagagaaggtggtaaagaaggtgatagggaccgagggattcgtaagcacgaggactaccaccgttacaataaatctggtgaacggagctctagtagatacgatgatcgtggctacagcaagcacgagagcaggggcaaatatagggatggcaatgatgattacagacgacaaccgggaggtggcagtcgatatggcagggataagtatgaaggtgaacggcgctacagagaagatgatggccatggaaggagtgaccgtcacaagagagatgaaagtgataacaggaaaagaagcccagatactggtaagcatagaagagaagacggtggtcaccgtgagacaagcaagcacagggaaaggaggcagagagatgatagataggtcactgcatcaccgtcagttttgtcttgcctgtttctcatcatacattgaattttgtcattcttaatccaaagatagcaccagaacactaaacatgtagcttagaatctgcgtgtagacattatgagagctccactggctacagattgttgtaacttgtagaccttttcttttctatacatgctcatggacgttgttctttttgggggacgatcaccatctgattgttgtcgaactgttgccacaactagcagcttgcttttttaattgctcttgttctagaggaagcccactgcaagtgttctacatatttgtgagtcttaacacgcctctagtttccttcagctacacgctcagactgttttatacccttttactcagagatgtaaatcaatttgatatcatttactaaaagttgtctataacataattcatgtactctgtcgggagactctggacaacttctcttcttttctttttttacattttaaaaaaatcatatttaaaccgtgtttcaaatacattcttttttttttcggaatttcttccaatcgggcgttgggtgggttgggg

SEQ ID NO: 5701 - DNA, 56842 bp, Oryza sativa
cgtgaaaaaagataagttaaaaaaaaggagagaaatgaactcaccccaagtcttgcttatttgcaatcttaatgctaaagacagtctacattgcctatgcgctgatagtatctctaacagaatatacaaattagactatccaaacacctatacagctatatctccaattgatttggtaagccaaaatcgttgctcacgccaacagcttcttcatctaccctctccactccaacccatatgacactgcaacccatatgtcagcctctaacatctcttcttcttcctcctatttctccattcttcctttgcttccgctggggccaccctgagctactctccatccctctccctccgtgcggcgacgatgtttgtgtgatggcggatggcgacagcggatccgtgagcgcgctaggcggggtggctgacgcggatgaaaggaaggccgtcaacaaagcgcgatacccatgctatagtggcgcttgagctcactgacgtcccgtacactccccaaccctgtcgttgccgtgggcttcctccatgccagcggaggcaaaggctgtaaaaatcgccgttgagaggagacaacgagagctgagggcccccgagtccatgcagggacggaggctgtgaaggtcgtgtggggttgaagacggcaacgacagagtagaggccacggtggcgaggaggtatgtgtaggctgcgacggtggagtagagggggaggtgcgggatgtggcggtgacgatggcggtggcaaacgatgaagacaatgattgtctcgttagggggattgcgagcgggaaaccatggtggcgaggaggtgcgcagcggcaaagttccacttgatctgcatcgcaagtgggaggaaagataataggaggtagttagacccacatatggcaagtgtagttggctcaccaagtttggtaagtaagggaaggagtttgtccagtcggatagcttgaagagtgggatgaagagaatgcaatttttatccactgttgctaaactttggtttgaagagtaaaatagaaaggctgttgaagatgttcttacgctgttacacgtccatgcccatttttctctctgtcaagattcactggtatgcttacatcaatacactttttcttgttatatgtttgttaccttattagctatagccaatatttatttttttaatttaattttgagtttttttgaccataatttattttcttctgtggcttttaaatcaacaaagaaacatatacataaaattgctataaatcattttaatttcttttcactttgttcatttttgcaggtaaaacgatcataacaatggaaaaatcataggggaaaaaaaagaaaaagtagagtcgtgagtgcatgattctatccacgaagactgaaattttggtgcttacgaatattacacacgtatagatgattttttaacaggattttcatctttagagcatatgttacgagacgtattcacgggtgtgagtgtggtgttatgcgtctgccatacaatccaaaaaaaaaaacaaaaatcatggagtaaaaacctgattcacgaatcaacggtgatgataacgcgcaagaacaaggaataagttcatctaaggtcccttaacttatcaacgaatccgattttcgtccttcaaccacaaaaccagatacaacgggtcccttaactatcaaaaccggtgcatattaggtccctcggcggttttggctgacgtggcgcctgcgtggctaattttgactcggtctcgatctgacgtggtatgacgtggcccttacgtggcaatttgacccgggaaaataataaaccccgtgggacccacatgtcaatttcacacacaaaaaaattaataataatggtggaacccacgctgccccacatgtcagtctaactcacccctcctcttctgcttcctctctctctttctctcctcttttcatctctctcttgtgctaggggatgcggccggcgatgacgatggcggcggaaatggagaagagtgactgccaggggcataggtgtgacgtcgctgggggcgctttgaggcggaagtagactcttacgacgtggccgtcggaggtgagcgaggtcgtcatggactcacgggattggcggtgtcgtcggcagcggtggagcaggagttgtagttggagtccttgtcgtcgacctcgagttcgtcaatgtgctcgagcatcacccaccattagtagtcgccggcggcggaaggtagcgccgccatctcctgttgggtttccatgggccgcggcgagcggatcgatatgggttcctcgtcagtccggccggaacagtgttttcttgcctaaaacaatgatcattcattcattcatcaaccccgtcataacacaagcaaatgatgatgacgaagcaaaatatactctagtcagctagtactagtcgctattgcttctacctttgtatgattaggcacataaacgcggagcggaggtcgtcggctttggtgccccagccgaggccgtggacgaagagcttcctgctcacgggatcggcctccgccgtgcgccgcacggtcgtcatcatcactggggtcgtcttcgcagtcggccgcctctcccctctcccgccggcgaggtggccccctcacccgcccacgtggacggccgccttcgaggatgcgcgcgtgtgtcggccggtcggcgggacacgttcatcccgccgccgaggatgccgaggtcgacgtcaacatcgtccgcagccacggccgcggcggcgctgcctccgccgccgggctggttcctttctctccgctagtttccctcccaccggccgccgcgccgcgccccttctcccagccggacaccgtcctctccccggcgcccgtgaaccggagagaagagaaagaggagaggggagagagatgaagacagagaagatggtgaagaggagaatcagaatgacccagcgcaagagagagacgaagagaggggaggaggagagagaggaagcagaagaggaggggttaattagactgacatgtggggtccgcgtgggtcccaccattattattattattatttttattgtgtgtgaaactgacatgtgggtcccacggggtttattattttccggatcgaattgccacgtaagggccacatcagtgccacgtcagatcaaaaccgagtcaaaattagccacgtaggtgccacgtcagccaaaaccgccattgaaaccgccgagggacctaatatgcaccggttttgatagttgagggaccaattgtatctggttttgtggttgaaggacgaaaatcggattcgttgacaagttaaggaaccttagatgaacttattcccaagaacaatcggtacgatccaacggcccagaaaccaccgcatcgcaccggaccagcccaaccatttcgtcgagcacctcacgcacgcgctcccctccaagccctaaacccattccccaccaccatgcgagccatcggcgccgccgccgccgccgcgaggcggcacgcgcacctccccacctcctactccgccgccttctcctccttctccggcatcggcggcggcgccgggcgcgggcgtgggcgcggcctcccgccctccgcgacgccgccgcgcgcccccggtagccccgtcccggacgacgacgacggcggcggcgcggatcccttctcctccccggcccccatcggccgcggccgcggggaggccgtgatcccgtcggtctcgtcgccgccgcttcccggcgccggccgcggccgtggatcgccgccgcccctcggtgaggtcgcccccaagcaaccggtccccgccaagctgttcgacgcgccggccgccgaggcctcgtcctcagagccaccgccactgccgccgccgcgcacgctcccttccgctggcgctggccgcggcgtgccgcggatcagcaagccgccagtggagatgccgcaggaggagaaccgattcatccgacgccgcgaggagaagaagaaggccgcgtcggcggcgcgtcccgctcccagcgggcagccgaagctgtcgcccgaggacgccgtgaagcgcgccatggagctcctgggcggtggcggcgacgacgatggcgggcgtggcggcaggggtcgtggtgcccgtggtagggagcgcgggcgcggcaggggacgtgatggcggccgcggccgccgctctgctgatatggaggagaagcatgggatctacttgggggacaatgccgatggcgacagactccagaagcggctcggcgaggacaagatgaagatttttaacgaagcgtttgatgaggccgcagataacgcgctgccagacccgaagcaggatgcatatctggaggcttgtcacaccaataacatggtctgtgcagcaatgcggttgaatccgcaaaattgttagagttgttagatctggccgttcatgcaaggttcctgaattatttgtttcctgtgggtttatgtatgcagatcgagtttgagccagagtatcatgtgaatttcaataatccagatatcgaagagaagccacctatgtcattggaggatatgctacagaaggtgaagccattcatagttgcgtatgagggcatccagaaccaggaggaatgggaggtgatttctttgatggaccttgtactatattatttttctccacagaaatgtttgtgcgagtagatgttttggtacatatgttctcttgcagcattgaggaaccagattgcattagaaaatgccggagaaagcctgcataaatagtgtaaatgatactttgtttttccagcaataggattatagcatgctcaacgggtgcaacgctgcaagtctatagttggatggcattagaatcctagctgcattatcaagttttcataaataaactgatgaactcgagcatgttaatagacttgttccctgtttggaataatcattcagcctgattgaggcttcagaaataattctaatgagtttgcagatgcatattgctgtggtacgtaagtatgttcacagccagattggcctagctttgcactgatatacctagatcgggctgaaaatgatattagtagattttgtgttgtttcacctttcagaacatgttatttggtaagctgatttatgcattacaaatggagcggatataaggtttatacaaaggatttattatctttgttgcatgaacgctgtccagctgattacttagtaattgtgcctgctcctttctgatgaggttaaactgtaatctccagataagtttcaacttgttctaaaatccaagtaaagagggactgttggctacgttagattagagattttaacaggattgggtcattctagcttttatgtatttcctgcagtcctggacttattgaactaaaagaatatctattattccgcttccatgtttctgctaatcagctttaagtccctgtttggaaattcctgtatgacaccacattagacacttgtctcataggcttctactattacatgaaccagtacatgcttgaacttgcagctgtattcgccttgctgctaaaatgagtttttttttttttggtgatgtatacaactgacccagtataatgtaccgtatcactaataggaagctgtgaaagatgtaatggcaagggcaccccatatgaaggagctgatagatatgtacagtggccctgatgttgtaactgcaaagcaacaagaagaagagctgcaaagagtggccaacactctcccaggaaatataccctcttcagtaaagcggtttactgataaaactctactgtctcttaaggtttgttttcttgttataattgatgctctgaacagtatacacatttttatagagaacattattcataatattaatggtctgatatttgaatgttgtcatctttataattcaacttctgatttctgaatctccagtggtgatagaataacacaattcctgtctaattttctaacttgatagacatgtgaaattatagtatcaccctttctaagcttgctttcaaaaatagagctgtattcaattagcatttgaaatttgaattctagctacacaaatgatcaatttagctttttttaatgcaatgtatctacaatttaatggttcgttccaaccatcaaggcataaagtccctctgtagtctgacatgccctgtggtctggtcttactaagctagttctataacatgtctgtgtttatcatcacttgccatctgagatgatatatttgatagtttcttatcctattgctctcaaagatggcgaagtgcacatgctttaagttggctagttcacctgactgaagtactctacatgttggagattctgttatcatcacatgtgcaaaatttaccatactggttgtcatcatcttgtttgataaaatattttcatagccattagaactttttacctgtattcatattacaaaaagaagtctggagaccctgttcagtgtgtttatgtattcctatttgtttcaccttcctttgaagaaacacaaggtgctgcttattgagatgaattcgttcttgtttctccttatatcttttgcagaacaatccaggctggggttttgacaagaaatgccaattcatggacaagtttgctcgtgaagtttcagagctatacaaatagaaaactcccatacactgttgtaagatctcacttagccccaggaagattttgtggtttattttttctattttgagaaaagtgaggttttctttagtctgtgcacttcttttcctttgtattggtatgctaattagataaataaaatcactgataaacatgtacatttcttttgggagatgtttacttgggtgctctagtatgagatctgctatgatctcagcccttcaattcctgggccatccaaacaacgctgattgcaactcccctaccctttttgttaatattttaagttcttaaggtgctatatcgactggtcatattttgaattgaccatggggttgatctgattcctgcctcatttttatatttggggtagtctagcaatagatggaattttgtgctcaaggccagctctctgcagggagtgctccttcagttagcaagtaatggaaatgtttccaacaaaacctaatctggtaataatgtcctgcccaataagtgccactgaagaagaaggttttatgatcactccacatggccctgatcaagaatcttttattagatacttggccgtcggccgatatcatagcccacaagaaaaccagcaagtgatcaactctcttatcatggatttctgaaaacaagagcctggtgttttcaggaaagcatgccaaaacaactccaaatagacagaaacaccttattttatggtttttgatacaccgccatccatatttttcttaatatggttatctatgactatgatacaccgccacctgtatttttcttttctaaaaattctgtgtgtattgtattgtatgtcgttccacatgagagcagaaatgcctacctagctacttctctattgctcaatcactgtggctcggtacaaaccatttcttttactatacaaaaatgaagctaaaatcattggaagcacacttaagtatctgctgagtatggtctgggatcaccataactagttcccttgaactcatagcccatctttgtatcaatctcttcacaaggtatatagctaaccaaattctccatcaaatggccaggtccctagatcacagacattttaagagatcacttattagcttatctggtattaaatttagggcacaattgtgcaattgtattggttgggagtaaattgctggagttaccttaagcctctgaatcatgctgtcgaaggggttggttctcgttgttctggctgtcaagcggcatgtactgggacatgatggccatgatctccgagtccatgtacgactgcacaaatcacatcaaacatttttctttttcaacatcacatacttgcaacagtttcagtttaattatattccttttcttgttagaaaaaaacataccctgagtctgtacttgtagaacacatagccggcaatccccacgccggctacgcacgacgccaccaatatagtgatgaaccagccgaaccttgacatgctgttggctgcattataaacccaaaatttagctatgtttcatattttcatgtcgaaaagcaaagtgtttcatgccatcgtcacatgaaattggaactatcttcatccgtttcataatataagactttttaacattgctcacattcgtatagatgttaataaatttagacacgtgtgtgtctagattcattaacatccatataaatgtgggtaaatgctagaaagtcttgcattatgaaatggagggagtagatttttatgtgatgtattatcacctatgcatgtgtcctctcctcttatgtagatctggttgcccttgcacttgcactcgtagttgccccaggtgttcttgcagtggcagttagggcaagtgcacgcaagcttctccttgcattcatccaaatctgaaagggtaacacatggagcacagaattttgttcagtatttcatcagttctgttaatctacacccaccactactagcccatcaatcacttgatagtccagtagtaattgtatgccaatatgtcagtttcagaagttatttttcttcagagaagtttcagaaatatgtttaccttcacatttgtggccatctccttggaaacccggggggcatcggcatccagtcaatgcagtgtcctatgaaattgtgcagagagtgattagcaaagatcataacaaacaacgagaggtttttctgcaagtgaaggctagagagttacagagcaagcagagaacgtctgatgacccctagtctctgaccagcagcctccgttgtccaccgtacacctgcctggcccaacagctgaaacaaaaagaacaaacatgcaattacattaaaattcaaaacatggtgagcctgaaatcgaggttcctttggaatgcatgaattttacagaattttcatggcctatcgaccaactatacctttgcaaccgatgtacccgtcgccctcgtactggacgccattcaccactgggcactcgcacaccctacccctgaacgtgtcctgcgtattgttgtgaacacgacgccagaaaaaatcagattaaaaaagctttatcgatatcagacaattacatcgagatgatacaattaatctataaaaccatgtagtaccttgcaagccgtaacgttggttttctcgtctctccagcaaccgccgttcctgtgcaggcactcgttcgtctcgatatctacagttgaagaaatgaaaacagagatttcattagaatttcattccaatttttcagaattccacgaaacaaaacaatatgtttctctgcgttttctacgcaccattgctcaagcagacgcgaggttcagtgccctccttgaagccggcacagacagctttcagcacggccgtcctctccagtttcccttcatttttcacaaccatttttgtttttttaataatggaatgtaacatctatgtctttactcaaagagctacagttaattattacagaaagctatttttattgttgttaggaatctctaatcagcttcagtgtttgcaagtaactaatttgttcttaattatcattcttggcgaaagagatgtgccaaccaacctctgtactggacgttgttgatgacgagagtaggcaagatggtcacatcccctcgcgatccacggccaatctgatcaaaggcaccaaaaccaccgacgttaatggcttaacacatcatgtaatgcaagagacctgcgagattgtgactggccaacatctctgacacctgaagattaaaacgctaaaaaaaattcttctcctaatgacaccatgaacagtatagtttcagtcactttgcatatatacctgatcttcctgctctttggccaagacggcgttgtcggtgtcggcctctggatcgcccatacattccagcaccttgtcaagcgacagacctaaggaaagaaaaaggtcaagaacaaaagaacatttgctattataaaagcaccaaattcaaattatagtgtctacagataatacgcatgtgcggatatgtttttaatacggagttaggaaagtggatcttttttaaaagttacatatgaacaattgcacatatgtttttaatatggagttaggaaagcggatcttttggaaaagttacatatgcagtatgtttttaatatggagttaggaaagtggatcttttctaaaagttacatatgcacatactacatccgttctaaaatatagtaaccgacgcatcctagtattcatatttatccagatttatagtagtaagatgtgttcaattcagctttagtttgatacacgaaacgatttaactattttttgataaaaaatatgacgtcataaatataaaccactcccattagtgaatttaagtactttttgctggcctctatatctttgtagacatactcaaggtacatgcgtgtgatatgcataatactccctcctttttaaattgatcatcatataaagaaatctaaattttcttaaattgatcatcatataattgcatggacatgaatttcatcggaatacaattaatatagcatgggagaatctgtacatactagggtgtaattgatatggtgttttaatcgatacatacattgtgagagaatgtgtatatgatgtcttgattgatgcaatttaaattatccttgatcttgatgcataagcatatatgatgatcattttgggatggagggagtataatactcaaggtgcgtctttcgtgtaatggcaaattagagcaagtaacgaagaacgatgaactgatcgatgagcatatgcacactgaatgtatggtaccatggatctcattctcacctagggccttgacgacgtcctcggcgcagcccttgctgtacttcttctccttcatggagcacctgatcttgtagtccatgacgtagtcccaccacgcccatggccgcccggtctcgttggccacccggtgcacgcacagctgcctcaggttctccaccaccacgtccttcccctcgtacccctccccgaaatcctgctccgggtccggcgcacaatacctgcacgcacccatcctcaccggagctcgatcaaccactccatcgattcatggcgcatgatggtgtccccaccggagacgaagaagaggatactatgatactctttccgtttttcagtttttcagtgtatgacgtcgttaacttttttttatatgtgtttgatcatacaccttattgaaaaaaaaatgtaatcaccatttatttcattgtaacttaatttgtcgtcaaatgttttgtaattaagcatgtcttaatttttttaggcaaaattggttatatagcatcgaaagttcacatttttggttttatagcaccgaaagttaccggttcactttaatagcatccaaagttcaccatgttcctatttttagcacttccgtcaatttttccgtccgtcttgatcgttattgatcgccacacacatgatatgacatttctacccctcattgacatacattatacttatacttgtgaggggtacaaacgtcatatcgtatgtgtggctggatcaagacggacggaaaacgatcgagaattgacggaagtgttaaaaatgggaacatggtgaactttgggtgttcttaaagtgaaccggtaactttcggtgctataaaaccaaaaacgtgaactttcgatgttatataaccaattttgccttttttttatttgcataattttttttaataaaatgaatggtcaaaagtttgtaaaaaaaaagtaacaatgtccaatattttttaaaaaagaggtacttcatattataagtagtctaagtttaaccaaatttatagaaaacttagcaacatttccgacacaaaagaaaaatattatcaatatacataaatgttagttttagtgaaaccaatttggtgttgtagatgttactaatttttctataaacttaatcaaatttaagtttggatataagaaaagtgaaaacgacgtaataataatataaaatgaaggaagtatgattaaaaaaaaagaaatcgaaacgatttataatctgaaacgaaggaagtcacttgcctgccatggttgatgcactgggacttgcactgctgggtgagcttgaaggcctcggggcagtaccaggtgatgtagtgcggggtgaagagggcgtagccacctctctccatgatctgggcgtggccgcggaagccgcggacgaactccatctgctcgtcgcaccgggcgccgcactcgtcgttgctgttggtccacagctcgtactccacccgctcgtcggggtggggcatcgactcgcgccagtccagcttcaccaccacctccaccgccgcctctgacgacggcgacggcgacgacatcctcttgagggactcgccgaacgcgcggttgaccagcgcggacgggatgctgatccggtcgatgtactccgtctccggcgactcctccggcgtgtccatcgtcagcagctgctcgtccacgttgtccgcgatcagcaccgccgccgcgcccgcctgctgcgcgttccacgccttcagcgcgaagtagcactctgaatatcaacaaacggaacagtttgtcaggctcacatacatacagggggcgtaagtggctaacccggcgtaagcccacttataggtcaaaataaacgggctcgtggtttattttgatttactacagtggatttcgcgggttggtcacttacatcccacatagtcatagtatgtaaggttatcaccgacaaaagaaattaaaccataatgtttattagcgattaaaaataatttattggtaaattttttatatacatgttcttagcgatttaaaagttaatgctgaaaaataaattacggtaaaaaataaccaaaatatacttaaaataaagatttaaaattcaaatagttgactgataagttaaagaataaaaattcaaacgatgaagctgattatctgcattaaaaatattaaaattgcttcttctttattgcaactaaaatgcactgaattgagtgagaatttcagtatattagtacagaataagtgggtcaatttgcaattcctatttcataatctgatggtaaaagtgtcctggtgcagagttcagaatctgatggagagtggcttggaaacgaaggatgaacaggttgttcagtgctgcctttggcttgaaggaattgagagacacctgctgattggtagtggaggagttgtgatcaagtgcgttgcagtggttggatcaaataccgaatcaggtatgagattcaaaattcaaagttgcaatggataaatgtacggcatatgtatcaagaacctattctcgctttccttggttcagagttatctgaaactctgacggaaagaaaggaacaaactcgtcgaaatgcttaaagttgagccgaatcccgaaagtaattaaactaagtgtgtgtttgaatcttataagtagtgaataagaagtggttaacatgtcttcaataatggctctgaactaagattccgtcctagttattggtattatgttaggtagtattctgcaatattggacttgtttttccaggcgaaacaaacaaaacaatttgattcagagtaagtgatctcagttctcaaacaatttcaaaaataaattaaaaagttttggtctaccatcgttcaactctgctttcagaactgaattataaattcccttccctcgccacaataaaaaaaatatatatgaatgcaatctttcagacttctaaagttggacaacaatccacatcaaagaattaaaatactatacaacttaaccatcatgcctaccttgatactctcttgctaaccatttcttttgttgtttttttaatcagtggactagctaaccattggattgacacaacccattaacagaacaaaaattggcatgacttagaacattggaatcaaatcatcaccaaaccaaactctcaaaatccaaataatcatcaaaaactaatactacttctcaagtttgttcagttcagacttgcagactttggaacacaaatttcttgaaaaatacttatgcaaatcaaaacaagcacaaactaattgaatcaatcattggaagtttgaaatcaatctcctacctccacggtcgagcaggaggatgaccgggcggcgagacttggacttgaacttggcgtcgaactcggcgcagccggtggccttcttgtcggggtagacgacgacgccggtgagcgtgccgccgtagtccggcacgccgaagttgccgatggcggcgtcgtggtgcccccggatgtgctccggcgagagcaccctcacgctgctcttctccaccacgaacctccccatcgccggcacggcggcgcccaccaccgccaccacgacgacgatcaagaacggcacggccccaatcccggcgagccatggcgccctcctcgccattgctgcaactcgatcacctctctctctctctctctctctctctctctctctctttccaagaggcgacgagaggaggagggaagaagacgacttcaaagaagaagaagatgatgaagcttatgcttggtgggcaccaagattaggtggctctcgctcgcaagtagtataaattaaatagaaatttaaggaaaaaaatgttcttgctgttaattaacaactgtgagacgagctcaaccgtgcaaaggggaatggatggatggatgaaaaaaaacaaaggatatcacgagaagaagatgaaaaaattgtgatcttttgagaggaaaaaataaatgggattggattgcttgggttgtactgaaatccgtttggttcgagaggggcaaaggtgtcaacttttgtgacgtagaagagaaggtgagaggaggagaggtgtgaggcagcatccaactactagcagatggggtggtatatagagtaggagcgcgaaagcgacaatttttttttgacaaactgatgaactggaaattttggaattgagactgttttgagatgaaattcacttggggattattaattgatgatgctttcatgatgttaagagttggagtaatatctacaagatgaggtcaacatgaccctgacctgttctctgatgatagaaaaacattttttttccaggatgcaggtatctatcagaactgctgctacacgccggggcgggctcacatcaagaatgcttacttgtaattgcagcaaaaacaaggaaaaacaagggaaaaataattaattaattttgcatgtctgatggttcacaagttcgatcatattgtccatatggaatatatgccttgtagtgatacgatatttcttcagatgtaacactgcacttgttctgaaactatattatttgagggggtgttatgtgggtgattgcttaccttaatggacacatcatgcccaactaaaatccgtctctgaactttcaatttcttgttgaggacacagtacgtacttgcattgcttgcttcaaagacaactcttgtctgagagagagaggagatccagcagcagtgttctgcaattctatgcgtatggtagaagggaaaagatcaacacacttcctagtctgttcttctggatgggcatattgcaggaattgtgtggatttcatcagaaacaataggtgaaaaatgttgttttttttctggtaaaaagggtcgctttggtaattaacttggtcggctgagtcttgatcgggtttggtctcctgttattagtgcaaccgggcaaagcacggcaggttagagtcgagactgaccgattcttcagtggacacgagtgggttgacggtcacgcgtgctcgttgggtttgggtttgtactgctccgtattcactatctattgacattttaggaagacttgcaaaaagtgatagtatactactacctccatcccaaaatatttgacgccgttgacttttttaaaaatatttgaccgttcgtcttattcaaaaaatttaagtaattgttaattcttttcctatcatttgatttattgttaaatatatttttatgtatacatatagttttacacattttacaaaagtttttgaataagacgaacggtcaaacatatttaaaaaagtcaacggcgtcaaacatttagggaaggagggagtagttgctgagttgagttaggaactccacctccacatacggaaaacaaatattattattaacacatgattaattaaatgttagtctaataaatttaaaaaaatggattaatatgatttttaaaacaactttcttataaaaaaacttgtgaaaaaaaaacatatcatttagcaggttgaataaacgtgtgggcggaaaaaaaagtgtgttgggaaagaaggacgaccatagccttaaaggagattttcttccttctttctcaacttatctccctcgttttctatgcgcgtgcttttcaaactgctaagcagtgtaatttttttttaaaaaaagttatatacggaagttgctttagaaaatcatattaatctatttttaatgtaagccagctctcttgcacactgctatttctaaaagtctggtctcattctaaatgttaggatttgagtttaagattaatttttagtggattttttcggcgctcttaaaaaaattctacctaaacttattctcaacaatcacatttaaaaatgttagcatttgagaaaaagcattgtcaagcgacgccaatgttctaggtatgattccttataatgatcgaatggtagatttttagatatttttttaagaatggttctaacttcgaaatttaattttaggtctagaatgaaattttgaagttacctaaacgcagctatgcctatctaatttattttgtgagagctcttcagccaactccattctatttttgagtgaagtttggttaagcttatgatctaagagtgatggagctgaagataaagccgtgcaaaacgggcctaaatatgtcttaaaaaatactacaatgaaacgtcttattaaaaaataaaataaaattttgtaatatatttttccaatttttgcaatgaaacgtggagggcaatatccacacgagccacgcatcatccagcaaccaaccaaccactactaccactggctacactatgccgttatcctctctctccctcctccccctccaccgcgctccgctcccgccaacttcaaattacccgccaccgccgcctccctctcgcgccctcctcctccccctcctccgccactcgccgctcgcgcgccgctcgcccgtctcccgggcgcgtgccgtagcagccgacggcatggccgcggcgaccgcggcggcggagacgccgcccacgctgctcgagtacatgggccaggctggcgcggccgacgacctcgtcgtcctcgtggcgcacgtccagagcgcgtgcaagcgcatcgccgcgctcgtggcgtcgcccgggaacgccgagctgtcgcgggggaaggcggggggtggtgtggcggtggcggccgggcgggacgcgcccaagccgctcgacgaattgtcggtgcgtgcagtgtcagggttgcgtgggttattattgtctgcattctggttctcgcatctatctacatgcatttcatccttcttcttttttttaaaaaaaaaagaataggtccattttttgtgagattgttatcacatctcagtcatacgcttagcagctggagtagcactcatttggagtgtaaaatgttcatttactaattaagtttacttgaggtaagttgtgcaaagtgcacacaagagactttccccacattttcattcttgcattctcaacaaaatactacttgcatttgtggtgaaccatcaacagaagcacttcctatttgcaaaaaaaaacagttattgtttgtctgatgctactaacttgcattatagcttccaacaacatcaagactaacatatttttcaatttagaatgagatcatcttgtcatcactccgaagatctggaaaggttgcagtgatggcttctgaagaaaatcatctccccatttgggtttccaacgacagcccgtatgttgttgttacggatccgcttgatggttctcgcaacattgaggtatccattcccaccggaacaatatttgggatatacaataggctggcagagcttgaccatctacctgaagaggagagagctcagctcaattcactgcaaagcggcactcaccttgtcgcttcggggtatgtgctgtattcatctgccaccatattctgtatcagcttcggtgcaggtacccatggcttcaccttggatcacttgactggagaatttgttctaacacatccttccatccaaatacccccaagaggtaactaataagctgtaattcaataatttgctaattcccttagtcttcattaaatgttaaccagatgtcacctaaattcacttacactagtagcgcaagttttctcaatttatggattggtggatgaacagtttatcaatgtcagtaatttgaggagatgttttagttgaacagcggcaagagtgcttgcattgtgtttgagaacatgacgtagagaaatttcttataactgaacgactgaaatattaactgtgttgaacttagaaatgcatgctttcatctttgctgaaaagctgtaatcctgagctatgccaggacagatatattcggtgaatgatgcgcggtatttcgactggcctgagggcctaaggaagtacattgacacgatcagacaaggcaagggacagcatccgaagaagtactcggcacggtacgtgtgctcgctggttgctgatttccaccggacgctgatatacggtggagttgccatgaaccccagggatcaccttcggttggtctatgaagcaaatcctctgagtttccttgctgagcaggcagggggcaggggttcagatggcaagagcagaatcctctcgattcagcctgtgaagctgcaccagaggctgccattgttcctgggaggcatggaggacatgcttgagttggaaagctatggagatgtgcaacagaaggttaatcctggatatgaggtgtgaagatatataaccttagataatgaggtctgaagataatgtagcatgcgaaaagagaacagggggacctactggagaactctgtatttgcaaaaccgatgtttttacctgtcaggttttctgtttttgtctccgcgactatgcggtttcactgtgtaatatagcagaaaaattaggctgcatttctcccggtacgaaatggaagggacaacacaaatttatatgtaatgcatcctttggctacatggacacttttatctgcaacgtgttctgaaatttcttttgtctctgcagtctgtacacttctctgcaatgtggtccggttagttcgatttaagagcagcaataagagtaacttttactatgaaccctgcaactttgtaaagcccttgcttactatagaacttggtgtgattagccttcagttgaactggtcctacctatgaggacaacctgcagccaaattgctgttcttattaggcagtgtaaagagctctcttatcctgaacttgaactgtttttctcaggcaggctggctgacggaacaatcaaaactagagggcatttccggacgtgtgattgcgatgagacgtgttgcaatatccagaccagtggctagacgtgttaattttaacttgatgaaacgtaaagaaggctggatccaaactttaattcttttccatcacatcaacctgttatacacacaatttgttatacacacacaatttttcagtccaaaatttacgctgaactaaaaacagccgaagtttgagttggaaaaaaactttatttggatttgttgtgatatgcccattaaacaacttaaccaagcgattaaagactgctgctatacgtgtgatccagttgtatgatttatgtataattagagatatacaatcatataattagagacaccgtccatttttgtccatgtgtcataagcatagcaattttcggtgattaatcgctaatcgactaaggcgatcacatcaaatatttagacacatgcacggagtattaaatatagaaaaaaaataattatatagattgcgtgtaaattgtgagacaaatcttttaagcctaattgcgccatgatttgataatatgatgctacagtaaacacttgctagtgacggattaattaggcttaatattttatctcgtagtttgcaggcggaatatgtaatttattttgttattagactacgtttaatactttaaatgtgtgtccgtatatctgacggagcacacacaaacttttcacctgaactaaacagtgcctaatttatcggactaatcggccgttttattgcgtccatgaaacaaaaaccgttctgaactgcctcgactcccgtctcctcgccggaaagccgccgccgccgccgcccttctacttccgccgcctcctccttcttctcgagaaggctctgcaccacagacgagagctgagccgcggagcacaatgtcggcggactcggcggcggcggggagggacgctctcctggacgagctgcgcgcgctcatggcggcccactccccgtcgctccacgcgctcgtcgtcccgtccgaggacgcccaccaggtccgtccgcgcccgctgccacctcccgcggagtcgatcagatcagatcgggcttggatttttgttgttgttgttgttggattttccgttttgcgcgatctcttcttcctctcgatgatggttgaggatttgggtgtggttttgtgggtgattgattgattgattgcagagcgagtatgtgtcggagcgggacaagcggcggcagttcgtctccggcttcaccgggagcgctggtatgttgcttcctcaattcatcccttctcgtttcccaggcgatgaacgctgtgtattgtcctagaccaccagccgatgagtctgttgcgatgagttcattatacaatagtgcaattggattatgcaacgttgttcagggttgcaatttttaccattttggtgatacacaaagtggagttctttttgctctgcctgacatgaatcagaaagcagttgactagtaatagaggctaatggttgaaattttaggagcagttatgatttatgacactgttatgtttttggaaatttaggtgattaacagacatttttggactggattgttttatacattgcttcgaccaagcaaatcgtaataaaattattgatagcttcgctaccatttatagttatggtttaatctagctggactaaagtatggaatgataaccacctttgtactgggaggagcttaattgattcctattttgtagtaggatggagttgaatatcataaaatgtggatgtaacatattgaacttgttgatttcttttgttttcccccagttgtcgtaatcagagagttgcattaatttctcagaccgagctatattgcgttgctacacaggtttggcgcttatcactatgaaggaggcgctactttggacggatgggcgttacttcttgcaggcagagcagcaactcactaatcgctggaaattgatgcgcatgggagaagatcccccagttgaagtttggatagctgatgtaagtgttgacatctcttcttgatcatgttcatgagtttaatttcccaagtcttacataataaaaatattggttcacaaaacttgtccatggaaatgaatttatttggttataccctctcatttttttttgaacagccagatcaaaggtttatccttgctttttgaattctgccacagtttttgtgttgtgaaatcccaaaagtggttttattcttgttaattttagctagttttatctcccaaatatggtccttttcattttgttaaccatattcagttgttttgttaataccccaagcctactatctttcttcctgtctgctgtagattcaaggaactgcatgatagttggtttgatatatgggagttccttccaaaattatcagaactaccagaattttgggcacataaatttattttgatcataccaaatgcaagcagaaatttaaagatctacttgaggcttttattttgctagggagaaaactaagaatagtcatgccaattattcaatgattagagagaatgggtttagttatttgttgatctgcattgcatagcaatactcatgattagcgtttaattttattctgaataatgttgtttctaactaacttttgtggcttgtgtttgttgctgtgcaatcagaacctgtcagatgaagctgtcattggaattaatccatggtgcatctctgttgacactgcccagagatatgagcatgcattttcaaagaagcaccagacactgtttcagctttcttctgacttggtagatgaaatatggaaggatcgtcctcctgttaatgctctacctgtatttgtgcaacctgtagagtatgctgggtgtagtgttaccgaaaaacttaaggagttaagagaaaaattacaacatgaaaaggctaggggcattataattgctgcgcttgatgaggtactattagacttatttatttcttggtttcttatccactacaatatattcaattttgatttcttgagaattttgtcaactttgccagttttaatagttgtccttttgttattcttatttaggttgcgtggttgtacaacattagaggaaatgatgtgcactacagcccagtggtccattcttattctattgtaaccttgcacagtgctttcttttatgtggataagagaaaagtatctgttgaggtcagctaatccactgaacacattttcttcaattattccactatgtcgttcatagaatcgtagtcatgattttgaggggcatgtagtgaactgtggctcttgtttggtccaggtccagaactacatgactgagaatggtattgacatcaaagactataatatggttcaatcagatgcaagcttgcttgcatctggacagctaaaaggttctgcagtcaatggtagctctcatggggaaaatgatatgaatgagaattcaaaagtttggattgattcaaattcatgctgccttgcactctactcaaaactggatcaatatcaagttctgatgctgcaatcacctattgctcttccaaaggctgtgaaggtttttttttcttttgtttttaattcataccacgcctgctgaaagtttcagaagaacggggatagaacattttacactagaagtgtattttgttcaagtattccttttgtttcattctatttattttaggctttttatctatggaaaatctgctatctgacattaaaagctttatcatttattaatctatctctttttttatttcttctaatgatggtatactaaaatcctgtcgagctggatggtttgaaaatctgctatatttgcaagttttatcatttattatgcctatatttttaatttcttgtaatcatggtacagaatcccgtagagctggatggtttgaggaaggcacatattcgagatggtgcggctgtcgtgcaataccttgcttggcttgacaagcaggtcagtatgaatttgtctctcatgcggcgtattagtcttggacttcaagcaagtgttcttttgcagctgcaaatttgtttagttgtgatgtagtccttctaattattttctactagctcagatgatcttgttttaatgacagatgcaagagaattatggagcttctggttactttactgaggccaagggatcacagaaaaaggagcatatgtgagtatgcactgatattaaacttatggttcttttgggaacatactccctctggccacaaatgtcatttgactttcttttccagtcaaacttttgaaactttgtcgatcaataaattttaaaatacatagtttgaaaacatagaaatggtatgcatagatattgtcttgaaaagtattttaatattatcatgaaattattagaatttaccataataaaaaaatcatggtcaaagtcacaccctgaagacaaaagagtgtcaaacgaaattatatcatcattgtatggagtattgaccttttattcacctatacaaattggaaccatctattatcaaaagatgcccagcttttctttgtagcttaggtctattatcctcattaggcccagcttttggctgtcagaactgtctaaatcagtggtttcatgccttcctgataattataaattttagaatatttttctaaggaggttgtgatagagttttcttgaacttcatgtgcaatactgcaacgtaacttggttgcaaacttgagacgcattttttttaatatacgttgttactgtcattgttcctttttgtataatatttaaaatgtagttccttcatttttttttcacttctgcatctcagtagtgtgtgcttactctgaacacgctttcagaaaaaaaaatcttctgtattcagatcatagaccaaggttgacatgttccttctttgttttacctatctggaatttttgtttgtccaattttctcatttacactgcccatttatttcctttgggaggtgtgcacattgttttgttgttttcactgaccatgatagtatgacaccgtgtgctctgctcagacagttgtatttctctgcccccttgtgtattttttctaaaattcaatgttgtaccaaatgtacttggtcttacttgtgggctcttgtactattgctacgataatacatatggagtacgacttttacatttggcaaatcccctgaagtctgaagtttcaatgctccatgattcctttgttcttagcctgatttttgttatatatataaagaatcttaccattttcttgatacgtcatttgttctatgcattatattaatcaattatcgtccactttattaattatgaataatagtgtgcatttggttgtgttaatgtttttgtttcactcctgtaggaatgtaaaacttacagaggtttctgtgagcgataaacttgaaggtttccgtgcatctaaagaggtatgctgctaacgtgaccttttttcaagcttaagtatactatattactagagatcttttataactgccataaacagctatagttactgccattaccatttttaaaagtcaaaagccagtaagtgcacttttggtattatggaaattgttaaaataaacaagttcctcatacttacctatgactttgttgtagcaaccccaaatatccattgaaactttggaactgatatagccaaggcccatcggtttcatttgtatccgttaaagagacaatggaaaaaattctactatactaactattttgtatttcttgtgcaatttttgagaggaagtttttactgttctttgtaagcatattttttaaataaaagaatactctctggatgacattatatgtattgttactatcacgtaaacacatggtaagtggagatagagggaaccatcagaggctcctcaatctcagtgcagagcccagagtgaatgcataaatcttttgcgtaaacagtccaaaaataaggcctattttttgcacaaaaaattctacattcactgacttcgctctgagctcttcattcaggaatcaggacattgagggtcttgagtcgtcccctctttctctgcttactgtgtgtttatgtcaaagtaaccaaaaaaaaagacttgttttcgtggaacatcttttctttggttgctagatgaatgtaggctgtgttcgataccatgggttgggaacccaaatcctgtgcacggaaaacggagcggtctattagcacgtgattaattaagtattagcaattttttttcaaaaatggatcgatatgatttttttaagcaactttcgtatagaaactttttgcaaaaaacacaccatttagcagtttgaaaagcgtgcgcgcgaaatacgagggaaaggggttgggaacctcctcatccgaacgcagccatagaaactacagagccaaatgagggcattttgcagttcatagtctcctgctatactacatcttttgactaactggtaatatttctgcagcacttcaaaggtctgagttttcctacgatttcatccgtgggaccaaatgcagcagtgattcattataaaccagaagcaagttcatgtgctgaacttgatgctgataaaatatatctgtgtgactctggggctcaggttgagtacatttcagtcaaactcaaattttgtggtaaaagacttgcttgagtctaattctttctatggtggtatgtttgcagtatcttgatggtactacagacattacaagaactgtacattttggcaaaccctctgagcatgagaagtcctgctacacagctgtaagtttattttttcgtcacttgctaaaattttcttttatttagaacaaatgacatgtcaaatactaagttctatttagaacgaatgatatcctaatagtgtaattgttggtcaaagtaatatgccttatattttgaaatggagggagtatatgagtgtccaataatcagttgacttgagctggagccttaccagtgtaaccgcttcatgtgttttactaaatacggtagaccagcatgcaggacatagctgcataactgctagctatctttatttatttgacaactgtagtattattttccatgaatttaagagcttagtggctgacatgcaacatgttgaaagtttgttttctgacacgttgcaatgttattggtttcctcatttcctgtattgcattacttgcccctacttaatggagctgaaaattccattgttgaatattatgtcaacagtggctggtcaagttttctttacacacttgttactttatttctcttgtagaaataaacatcatattaaatgcttgaatctaatagtttacaagatattgtctgtgaggttttaattttctttgctactatttaatctatttctaatgcaagtgatatcgaacattggaaataggttttgaaaggccacattgcactggacactgctgtatttcccaatggaaccacaggtgagtgagtgttttgagcttttatacttccatctatatgaactcaggagatttaacattgatcatgtgtcccaatgataaaatagctgccagatgtaccatggagttttaacatcacctaatagtgtagtatgtgataacattattgttctttatgagtgcatttacttataaacatgcgacatcatgttttctcaaagcctcgttgcctcagagatcatgtccatcgtttctttaacatttagaaactgtaagaagattccactaatcacaaatgttatttagtgatagactccattgtttctttaacatttggaaactgtaagaagattccagtaatcactaatgttatttagtgatagactatctcactaaatttgaaaaaaaaaaagatgacagaaactagcaagtgatgaagaaaatgatttatactaccatgttttgacaccaatttatgttcattgtgttatacttactttttcaagttatatttcaacaaaatccatgatatttgtgcgttacttaaaccttaacagggcatgctattgatattctcgcacgaacaccactttggagaagtggtcttgattaccggcacggtacaggccatggtattggatcttatttgaatgttcatgaaggtcagatactcaattgctggttcatcctcttctatgacagtaaattatctgattgtagtgctaccttgaaatgtttaatccattctgtttgtgcttacaacccaggtcctcatctaattagcttcagaccttctgctagaaatgtaccactacaagcatcgatgactgtaacagatggtcagtaaatatcctaaattaaccactatttattttaataggactatcaacagtttaatgtgaaactactttgtaattcttacttcgatgatagtccctcttgctgcaatgatcgatgtaaagttcaacttgcacaatcttttcttgcagaacctggttactatgaagacggaagctttggtataaggttggagaatgttctgatagttaaagaagccaatactaaatttaattttggagataagggttatttggcttttgaacatataacatgggtaagtttcttcaatctccattttattaaattattaactttctctttggtaatctccaagtctccgtatcaatttcacaagatatcccggttgataatacattgtattcttgttttgttgctctgtttatacctgtatgaccattttaaagtcagcctttgttgccagttcgactggcatttcatgatctctaaatacaaaatgctgctcaccatgtatctgcgtcatttgttttgctcatgttcatgtattgatgaatttcttgtgctatgcagactccgtaccagacaaaactgatagacaccaccttacttacccctgctgagattgaatgggtaaatgcgtatcactcggattgcagaaaaattttgcaaccttacctgaatgagcaggagaaggaatggctgaggaaagctactgaacctatcgctgcgagctgttaagccatcaatcaactagctggttgacgctacatggacacatgacacagggtcccaaccggttgcaactattcgtgctagatgtgcagatgatttctggcatgccatgcgcgtagataaataaatggctatccctcaatttaattacttgcaataagtgtgaatatatagcagaaaacatcacaatcgattcttttgcgttgtcattctgctaatgttgaatgtgaggatggaagtagagataataaggccgagtttagttccaaactttttcttcaaacttctaactttttcatcacatcaaaacttttttacacacacaaacttccaacttttccgtcacatcgttccaatttcaaccaaacttctaattttggcgtgaactaaacacaccctaaggccttgtttagttctaaactttttcttcaaactttcaactttttcatcacatcaaaacttttctacacacataaacttccaacttttccatcacatcgttccaatttcaatcaaccttccaattttgacgtgaactaaacacatccaatcaaacttccaattttgactgaatttgcaggttgcatttgtacagttattcagatgcttgcttgaatgccctgagcagtttggttggactaattaacagtaatcgcatcatttcaaagcttaaaattgaacacggtctgtttggaaaattcctatcccaggggcggcatcacactgaagtttaataaagagtaaatatcacattggaatttgaccaacattttcacttgacaccacatatctttacagttgcagtttggaatatcataggtgtttgtcagagaatgtcaaagaaatggttcaaaccatcattcttagtgttgtagtatcacgataaatatctttagaaactcagaaaatcccatcaaatggtcttttagaaaatcagaaaacaaccttttttttaaaaaaaatcacactaaaatggtgatgtgaatatgtttaaaagtgtcacaaattaatctatacggagggcaactgaataaaaatagaatagaaagtataacttaattagataccactcaaactaaatagaatgtaaaaacatagtacaatgctttgttttttatatgtatccctgtgtaaatctcatatgaagttccctcacatatttcgtcggtacccttacccttaatccaaacaaaatgatgcatagtgttaagtgaaaatgttagtttaactcttggtcaaaataaatgaccagatgtgaaatttaccctttaataaaagatgagccttggccccattcgtttctaataaaaatgaaagttaggatatggataaaacaaaccaataacacatgattaattaaattttaacacataattaattaaattttaatcattacaagcttaatttgaaacagatttatttgatgttttaaagaaatttacatacaaaaagttttttcgcacgcatagaatctgtatcctaatcagaagctaatggggcctttacttgggccgatatttgcacgactgaccctccaactattcgcattttgcatttcgatcctccttttgcctttcctctctcctctactccacacggcggcggacctccggcgaaccccgccgcgcgaggccggtccacgggaatcgatgcagccatgcagggttaacgagcgcactcttacctgctgcgcctcgcctgctcgtccgccggagaggcttccaggcgacgggggagcctccgcctgctgcgccggagtccgcggggcagctgggggatccgacggcggcgacaaaaaaaggtacagtggagtacaggtgcaacctaggattcagaatatccattcgaaattggtgttgcctgtgataatcatggttggttgattagcattctagagaattgaaatcgagaaggagcttttttatccaataattagaagaaattatgagtgtgtttagaattaaacacggaatcaccccccttaccgctacaatatcaagtgcatctcttctattgaactgatttacctttttgaaattcaggttacttgattggatctaggagctttttttttttgtttgacatggtgaacaaggttcatgcagagatagaacacacaggcgagggctgaaatggtccatcgatcgaataatggtatcacaacatgcatttggccaaaatgacaccatggtgatcagcaacaaagggagcaactgataaactgaacccttacatccatccatacagcctgcatactactacacctttggaaaggaggaggatcacaatgttgataatgatgatgatgtacaaaagatggcagtcaaaatcaactcaagtatcactgctccaaggcaagcttcttgtgccggtcgagatcgttgaggtaacttgagcgagtataatcctctgaatcgccggagtcgaacatgaggggtttcatgagttttggtctttgcatttgcatcatttcgagtgattccctatcccccttcaagaaacggaccacctacaggcatcaaaccaacaggtcagtttacaatccaaattgtttcttttttagcctttacaatggccgtatagttagcgtgttcatcgcactcaccgatttcatgctaggccgcgagcttgagctgtggtgaatgcacatggatgccactgctaggatgtgagccatttcttctggatcatatccaacatcaagagaaggatccactagttccttcatgttgttcgagtcgagcaatggttttgcctatgcacatgacaaacaacagcttgtgaattcaagggcttcagatgtatgtgattataccagttcatgttatccattcaagtattgtagaattaacttttgatcatcacttgcctctctcaatatgaccagacaatgatataaaatgagctgatttgaatttttgtataatggagcatattagagatttgcttttattacccatattactaggctttgtctggaggaatccacggctttccgtcctgtcactagttcaagaagcaaaactccatatgcaaacacatcagtcttctcatttatgatcccgtgcatgaaatactctggagacatatacctaagaaagggtgtaaagtctaagttaaaaccaacaatggcattgtttctttttctgggtacgattaaatcattgtgatgaaactgaaaaaaacttatcgaactcacccgaatgtcccttcaatggggaacacaacatgatgagtccatttgtcaggaagccactttgcaagtccaaaatctgagatctgtgcaatgagggagtaaaaactgttgcatttaaaagaaccctaggaatcatataacagataggactacggcaagagactggtagtagaatacatacctgaggttggtaatcttcagttagaaggatatttgatgctttgatgtctctgtgaattatgcgtcgatggcagccttcatgtagataaagcagtccttcagcaattccaagagcaatattgaacctagccttccacttgagggctccctttgtgcctgttcagctgaactccattttatcaccagactaagggtattctaagtattctcttatattgattttttttttagaaagaggatgatgcttgagttcagatatgtgatacggcctatagtatatgcatttaagaggcaattgaaatgagggctacaagaagtgataatgtaaaatttgtatgaagcctaccaaaatggaaatcacaaattcgcacatacttattggagaactacatttcatagttcagatactgcctaaatgaatatgttgtactacatggtagcatgaatgtcaagagatatctgttctctagttgattcctaatagtaaggtctatatatttcttacttttctaaaaaatgatatatgatgtaacatgccaccacatagcagcaatgcagcatatctctcagaaattggattcattaagtaaagaatatttagaggaaaccataccatgaagaacagaagccaggcttccatgaggtgagaactgaagaaccaagtgcaagcccccttccacactgaaccccaagagctgtgccgcatttggatggttaacatgagctattattccaagctcagataagaaatcgctaatcctgtcctctttgttaccaccttttgttagtctcttcactgctacaaattgtccatcagcaagatgtcctttgtacacctcagcatgcccgccttttccgatcaaattttctagtaatatcaagcatgaagcaaaagattcagagaatatttaacatagatgaagataatataattaggccaaaagctgtactttgtatcacatgacccttggagctatgatatagaggcagagcataacagctaagatttctgtattatatgctagagttaccgcaatgtagaacaaaatcaggccctatttgttaatgatttggtattacagtgttatgcacttatactttaatacttctcacttttctaacttctaatcagtaatcagtcatcattacactaaataacagttcatgatttgaatctcaagccctatgtttccttggtgaaattatactgctgcagttataaattcatagcttagtgttaaagctacatcccataagttctgcaatgatagtaacatggcctaatcgagtgacagcattgcagcaacaaagaagtaagttttgcatatcacctgaactgaatttgtcagttgcagcacaaagctcactgtagtcgaagcttctccatgatggcctccacttgctgatctcaggaaggatctcaggagcaatggcgccgcaatcgatctggttcttgccgctccgcatcctctccaggtacctcttaagccctgtggtcttggttctctgagggaatgtccccgctctcgccatcgacttcctcctcctgagtatcaatccactgatcaggttcctccactgcgtattgtgattcgactccgctggctgctcaacggaggagctctcatcggagtcgacactaccggataccgagatgtctagcaccgcgcgaggagagctctgatcggtgcactcgctgctgtcatcgttaccggccttcgaatccatcttaggcgcctctttgctacctccatcagaatcagcagattggctgctactgtcaccaccactactactgtcactgggttcttcagtactgctcctgtcactgggttcttcagtgctgctcctgtcactgggttcttcgcttgatacgacggcttcggttactgacccgctattgctgcaatcctcatttttcgcttcgtcggaatctctgatggtgttttcttggtgctcccctggccctgaacacagcaaaggagatgtagacatagcatgggctattatcataggtttgttatgctacaaaactgaattttatcaagaagacaaattaactacctactactacaaacatcaagacaaacaaagtgcaaagcaagtcaaggcaagaaacacatcatcatcacacacacaaacacaggctctcagatcccttgacagtggatgataaggggggagaggcttgtgtttgtctcgtttcccatgaaaaccacatgctgccagtcgacagtatctgaggcatttctataattcagagatttgcaccaagaattgacatgcgcaccaccctctgcacccttccaaaattgatgctttctttctatctatcacacacagacagacacacaactaagtctgaaaataacctgtgcatctctgtgatttgcttgcaatttgcgaaagatcatcaagagggtgcttaaatcaacataaatgtcgatttcaaagattttggtttggtgagaaaaattggaagaacttgacaatctacccatcttctatatgatgatagggaatggaagcctgcccaacctaatagcatatttaaaagttacaaagaagaccagaatccagcagctgacatctctcttttttttaatctcttgttgccctcttagaaaatgacatgttagagcttcaaagctgtgagcatgcctggaaaaaaaagccatgatttttccaggactaatggagcacttagactaaagcaagaaagaaagagaagatacagacaagcactaattgtgccacacatgcagcaaagagatgaggaaattaagcagtaaaaaaaataatcaaaatcaccacagctaaccttccttaacaagcagatcctcctgcctcccatcttcattaccgacctctgcagattcaatcaccaaatactccttcagtttcgtcatcaccaacaatttcttcttctgaatttctctctctctctctctctctctctctctcttccccaagacggacagaagaagaagagagaagagagcagaagaagaaagaaaaaagaggagcaaacttgtatgcgagaaacagaatatttgagagagaagagaagaataccttcgttggaggccatggacgacattaatccctcctcctcctcctcgtcgccgtcgccgtctccttcgctttcaaacgacgacgaaaaactcaacgggaggagcaattgctgccgatgctttcttgcattgaagtcgaccaaccgttgaagcagagaagaagcaaccaaaccaaaccaacccaactgaggcaaacagtgcagagctaagctcgcacggtgcccaagaaaatggaggatggaaagaaattaatactggagctagagagagaattgctaggacagtagagagagaaagaagatggcgggttcttttgaaaacttggctgtgcctgcacactgcacagtgcaagcagtgccttcctttgtgttgcagctattcctctcttctctcaaaagaagagaacatttgtagatagagagagagagaggggcaagcaaagcaagcagcctagagagagaaagcagcagcagcagtaggaagaggagacaatgcaatgagagcaatgaggctggtggtgtggtggtacaaccttttgtaggagtgtgtactactagtgacctctagacctttgtaggggacctacagcaacatgccaaagggagaagaagaaaaattattcagaaaacataaaaagaaatggactttgtaattagaaaaatgagctttgtaataatggaatggtttctcttggagaagagaagaggagatcatctggttggtggtggagaaagaatggatttggatgtgtctttgtctgtgtgtgttatctctgtactctactactcctcctcctgttcagtaattaatcgtcgtggtgcatgggattggatgttgctgttaggggacaatgaggttgatgtcgtgtgattaagtaataaacaatgatttattagtgacagtagggttggtaggtgtggaggataaatatctctcaaattagagagcctctcttccagtggagtatttattgtcctttgctaattttgctatggctctattttaggtgaggccttggaagattttgtgatgatctggtttttctcacaattccacctcttcagattttcaattttagaaccaaatttataagtttattcgcttgttttttgttacccaactctcttttcataattgcgatgaagacgagtaaaaattatacctgaaattatttttaaaaaaatcaaatttcaaaattatactcaagcatgtgtattgaaaggaacaatgaaaatgcagtggactattttattgtagaaagtcggcaaagtttatggatcatgatttgctctaaaacgtggcagcaatcaaggttcagttggaaagcttgcctaaaccattccattctttgaagataatgtatcatactacggttttgtctaaggatttcatgagaaaatcgcatgagaatgagatactatcattttttttacttggatatgccagcttattcccagtaatttttttttttgaataacctaatgagtgtgtatcataacagcgataccgttgaaattgtaagtgaagtcactttacagaatacagatactttagatttgtaaacaagtcacgagcaggaaaaaaagattcactcccttaggtttgcttgttggcttagaagccgcatcaacctttaaaatttcaaacttaattttaattttaaattatcctagatgttttattttcaccatttttttggcttctgaaccgttaagaatataaatataaaaagttttattctaattgtttttaagaaaaattatattctattttttcgttacttctttttttttctaccgcttatcaaccaaaatcaatcaatgatgctgggaaaaagaagaaaagaaaaactggttccgttagtacaggagttgttcggaatattgggcgcggctacagtaagataacgtttatctcaaactcaaattccacagttgggaacttcaaattccaaatcttcgtatctcaaaattccaaatttcgaatcccatgggagcatttaccccacagaaagcagaagcaaggacaaattgtagcattctcaccggatcatcagaataaatcctcatcagaataactcccatatctaattcagatatgagaagattcacatgtcctgcacagtgcagatcgccgacgtttacctcgcggatccattaatacgtcgttcataccacgagtatacactattgattgcatccgtagcactgttccttcttctactacttcttcttcttgttctgatatcttcttctcatcaataattcacaagactggttcttgaaatgttcccatcaatctctgtccagatgctcacccaggtcgaagatttttgttttttggaagaattttggtgaaatgatcgctgaatgcgagccagaaaagattatttcgcacattgattccagcaataaatttcacaaagatcacgtatgaatgatggcaaacggccccatcttttcgcttaagctcatgcttatcagccaaaattcaaattttcaaccttaaatttgaagctgattttgaggtttttttattgaagtttattttcaacctttatctttaggtcgctaaaagcatgtatataaaagttttattcacaaattaattctcgtttgtaaatatgctgtttggccaaataatggggccgaaagcttcttcgagaatactattgaattgtggatgaacgagtattcagctatagtatcagacatcgatccatggtttggtgtcctgccgttttcaggctcaaagccagttgacagagctcccattcgaggacgaaaatcaacgaaactccttaaataaccaccgtttcgaattgacacgtgcaccatgaacacgacacaaattctaatccaaatcgcctctcccaatctccattctccgagaatggatacaaattgctgtccattattcaactctgacggctgacgatggcaacgatgcatgcatggcaatatggcatgcagaagaggcaagttggattaggtaggtagtttagttaagtttaacagtgccatcaaggcatcaactaacctgaaaagtaattagtatgcagagttaagcaaagggattattgtactagtactgcaccttttgctgttcattgctgatgttgtactgcttgtactgaacctgtgtcgccaattaactgaagaatcatgtatggcagagaaattattttccattaataataatagacattcataaatagatatacatacatagttaaagttataattggaatacttagaccccaaaccttgtaactaaggataaaaaagctattacaagactaagctatatttgcttcaaccttactatgttcttatgcaacaccaacccattacatcgctcgtctacgtagaaacctggatattagaattgttgccagagaaaatgcgcaggggtcttccggttagctccacaagttggtgggatagacgacctgcgttcaaagcctcacccccttctaattatttgataatgatcattccctaatattcgcgttttattagaattgttgctagaaaattatcatctgttgctactcgaaccatgttgaatagaaaccacattgaggcacgtaatcgattggcagtgaaaagaatggagttggcggaccgaatcctcgccgtttttaatcgtgtcgatgcaactcgccaactgaaactgaatcaacctgtggtatcttcaagggatctccactccatcgagcagcatattttctttctcctcctcttcttggtctttggtccccttcttttaagcgaaaagtagcatcttttatgttctgaagaaacatgctaggaaaagacaaacaacaataagaaaaaaaaagtattactaactggatgctaaactgctaatgtttttcattgctcaataaattatccatgagaaaaaaaaagattataactgtcactagaatgcaatgatacccctctattcttttttacctttagttttggacatggacatggacatggttctctaatgtatatgtttcattcatcattacgttttctagttatatgtttataaaacttgttaaaaatattcccatatagtgttttttatgaaaaatatattaataccattttttccatatcaaatactaatgttttttaatctctgaatgttctaagagtttaagatttgactgcatgcatttaggacatcatccttttaaaaacagagtgttaaaaaaatttccatattaggtcgctggtttgtcattgaagtgagaggtaagttgcagcggcaaaggagaattagctcgttttttacagtagaaaattagccattccaacaaatcctagtctcagattgtttatgcattgaaaaacgtcgagaggttttccagctagctctactaagacattgcctgagttcaaagtctcaccttttctatttatttgatattatgtcattttctagtatttgcgtttttaattgtttacgcgatgaatgataagctgtacgaaataaacgaaacaacaaaaattaatctatagaatttattttcttttgttcttaaaagctgatactgaaaaataatttttgatgaaaagcctccaaaattaagttttaaaacttaaattttagtaactgctgataactcaagaagcagtgtgctcggtgcaaaccactgttttcactccattacctacatggtgaccaacgcatttgagcgctagcttattcagttgatggcaaagcattaatgcaatgcacgacatatataccaggatacagcttcctctgtcccaaagaccattatggataatcaattttttaggagaggacacaatatggtcctagaaaaaccacaattacaacacgcccagcactaatactgtcttggtaccattagcacatggcttcctagtgataggaaaattaaataaataggcctcatttttaaggcatcacccaaaccaaacggctccttaaattgccttcgtactgtactgatacccccttcacacgtcaacaccaaagaaaaaattagctctcctgatggcatcaaaagaaaattcagaaaaaaaattaaatcgagggaaattagctggcaccaaatttaaagaaaaattaagatgtcaagagatgacgccaaagaaatcgaggacaaaaaaaaagaagcttgagtttttttttaggaaaatatattgctagcaagtttcctgagctgctaaacagtgtgttttgtgcaacaatttctatatagaagttttgcaaaaaaattcagcatatctatttttaaaatttaaagtaattaataattaattaatcatatattaacgatatactccctccgtttcaaaatatttgacatcgttgactttttagtacgtgtttgaccattcgtcttattcaaaaaatttaagtaatcatttattctttttatatcattttatttattggtaaatatactttcatgtacacatataattttatatatttcacaaattttttttgaataagatgaacggtcaaacacatgctaaaaagtcaacggtgtcaaacattttgcaatggagggagtatctgttttgtgtttgactgaagagttccagtcattcgcttaaacgaacgcaccttaaataatgtgtggtggaagaatgtctttttttagaaaacttatgtttctaagcatgtaataaataatatgttttaataattcggtgaataagtcgaaaagagcaaatcaagggaaactagcagcctagcaagctccaaaataaaattaagatgtcaagagatgacgccagtgagatccaggaccataaaaagaaagcttgagattgaagtggtttggtgtacttggtagtgtcgcaacagcagccggtcaaaatacagttgagcaggcctgccgtctgcactgcactgcacttttgtccctgaaagactttttttgggtgcttcagtggataaggatagtatagctttggtgcatctggattaagtcaccttccgctaattaatcactggattttgacatgacatacacaatgctgctttgctgatcactaagctaaaaattggttgtgtggatgctcctgtcatggtttctgaaacatggagttggagggctttggcatatgcaggagaagagcagatgatctgagcttctgacttcatgtctgtgtgtgtggttagcaaaacaacaacactaatctttttgagtgcaagttttgcattagtacaagcttaagatgcagtgaagcaagcaacctaaagcaacagaagaagagagatgatggatcacgagcaggtgagcgactccaattatccattctggtaatctggcccaagtcctgggctgtgtcacttgactcactagatgtcagagatgacgatatgctcctgttaatggtgccgctgtttgcaacgcatgaaacctaacttcgcaagattgtctctcctttcttttctttttatctaaacaaagtctaaaattgggaattaatcatttcctacaattgtcaaggagaagatcagaagagaagatgagcatcaatcaccatgagttacttgtcaacagaacggtagtactgacaccgacaagtactggattttggaccacgatcacaggagtgatttgtgatcaaactgtctctccaataacaaagatttttattttgtttttcctcgcagaccagttcaaacgaaagtacaaaacctgacttattaaccgatgtatcgatggatgtggatcgagagtttggtcaggcacatgctgcagatcgagccattactgcggcggcggcgtgtgtggaagagattgagagatcagaattgcctgtgaaaatgaccgaaacctaacgaagttttgctacgccatttgtgcgtgcggatttgaaggctcacacgccgaactccggtggctcgccggccgaagcggcggtctttccggcgagatcgtgcgttcgtgtaactgaagacagcgacggtgttggatcgccatgagtgtactgtatacgaggatatcgatgggttttattatatcgcatttgttcagaatcacgttggttgcctgcagaaatttgatgaaggatgtcaggtttgggtagttgtatgggctataagatgaggtgtgttgggtagatgggccggataatgttgagcaggccaggaaggctttggcccagaaattttcagagatctagggaggaataagtccattttcattcctcaactttccgtcgagtttaattgataactctaaactgcaatatcagacatcttcaaccccatcatagtaaaaccattcaagtcagatcccgtgacaatatggatacttgtttttgctgacgtgtttcagcaaaaaggaaattaaaaaacaagtgggcccacatataagtggacttccacatctccccacctattccatctctcccctctctttcataggagctcgtcggcaaggagagcggtgacagctggctagaccgtccgcacgaggcaacggtgggaggtcggtgatgaggtggctctggtggtcagccatagtggaggaaaagagaagggaggcgagggagccagccatccgcgagaaggcatcagtgaaggagaggatccaatgccccagcaactccgccttaggtactcctgcggtcctgtgatgctggagtgggctcttccccaccactcatgctcatcctcgtgggacgttcctccccaccactaggggtgggctcgccgcctccacccaatcatgttgagaataggaggaggagccgtggaggtggaacttgagctttgagtggtggttgcgtcaccatgtcctagttcccgtcccgagccgctcgttctttggcttattcaccgaatcttggttcgtctccaccagtgggacgcgctccacagcgagtcaacggtggcggtccggccaggcacctctttgtcgctcctcgactggtcgacagaagcgatagagctgatgaggtcgaaggtaaaggtagcatcggcatggtccgccgtcttccggtaagacactcacactgtttgctagataagttcaaaggggaggtcccaacatagatgacggccgcgacttctccttcgattcggcagcccttgctccaatttgaccgcgcgcccccttaggagagagagagagagaagctagagagaagaggggaggacagtgatgatgacatgcgggggccacttttggttttgccacataaattcctagttagcacgagtggaacagatcaacttgccaattgccatgtcaacaaaatctcagacctcagattattggttgtggattactcgtgccatgctccaaaaaaattcgatttctacaaaatcttttcgaaacatacatacgcatttgctcacaatacgtgtactctcactcctatgaatgcacacacgcacaccctaccgctatgacctttcggaagactatgtcgacatatctcgagattgacgaagtcaccatgttgtctcgctgtcggcaggtacagcacctaccactgaaagaataattagccgtgaatgtgagtacatgtgtcaaatctagaacttgtacccaggtaggctggttccaccacgaagaatctaaacaattgagcaacgcttacttcacgatttctccgtaaactttaaacgttagaactgttcattgtttagactgctttgtgtttaaatttatttttaaggtttgtaatatataatatttgactaattcacataaacaaatccatcatctttaatccaaattacatggttctttgaaacgtagtattgaaaaaaaatggaataatggaaaaagagcaaaggatttaaacgtgaacataaatgcaaaatagagtacaacaaaacataagaaaaatatagaaatagtggtttgtgtagaccgcggaaaaaacacatgaatcgaattagataaatagactcgcatgaaatttttcaagggtttagagttcttgtaattttcctctaaattttttttgtagaattgtccattttatatgattttaaaacaaaagtataggattaaatctttgtttcgaagactttcctacgattttcctataatatagaaattctccaaatttatctccgtttcaggttataagactttctagcattacccacattcacatatatgttaataaatctagacatctatatgaatgtgtatctagattcattaacatttatatgaatatgaacaatgctagaaagtcttataaactgaaacggaggaactatatgtttttttttagaaggaagtatatgtttttggtacggttcaggaggccctcatggggaaaaactaccaggacgctctccaaaaggatgaaaaagaacattactttgggcgcgttggatccaatacagatggtcgagattgacccacgtcgtccaaggattcgtccacgattcagaagacgttgaaccttatccgtttctgcaacgctacgctgtgtttctctggtttggggagctttggaatgaactgaggcagcagcagaggacggagccggcaagccatggctccctccgccgccgccgccgccgccgccgccgccgccgccgccaccgcctcgccgctgtcccgtctcctgctcagcctcccaaaccccagcgtgaaacttcccgtgtcttctccgagccggaacgccggcgccgccgtggccgccaagaacagcacccccgtcgtcgccctccgccggcgcgaggccgtggccgccgtgctgtccgcatccatcctctcccgcgtgctccccgcggcggcggaagcgtccggcggcgagtgcccgctcgaggtggcgcccaacggtctcgccttctgcgaccgcgttgtcggcaccggcgccgccgccgagcaagggcagctcatcaaggtcagcacgacagcacgcacctgcccgcccaccggccgccgccggcgaggcgaggtctcggggttcttgctaacctcgccgtgtgtttcgttcgtcccacgcaggcgcattacaccgggaggctggaggacggcacggtgttcgacagcagctacaagcgcgggaagccgctcaccttccgcgtcggcgtcggcgaggtaaacacgatcaatcaatcaagcacactaacagattctgcaagatattcaaacattgtactaatcggcaacagattacgcagctacacgatgaattagactcatctctgataccaagatcactcacattgcatattcactgataattcttcaggtgatcaaaggatgggaccagggcatagtgggcggcgaagggatcccgccgatgctcgccggtgcgtctccctgcctgaactgaaccctgaaaaatgacaaaaatctgaaatgaactcaccatactcgatcagattcacctcgattttgtatcaatttagagaaatggtgaagctgaatggaaatgtggttgaatgttcaggtggaaagaggtcgctgaggctgccgccggagctggcctacggcgcgagaggagccgggtgcagaggctgggagcccacctcctgcgtcatcccgcccaactccactctcctcttcgacgtcgagtacgtcggcagagcagtcggatgatctctccctgcagatttggtttcttgtgttgattgatgtatgcagaatgttcagagtatatatcgataccgagttgagagtttcagactgagaacatttgcagagagatttaagcagcacgatcgtggtctacgggtttgaaataggttatagattgtgaaaattccaaaagctttggtgagtttgggcatgatcaagcacatcatgcccaaaacttcaattccaaactacaacattatcctttttcattagcaccatttctcgagctgctaaataatgtgtttttgtaaaaaaaaatatttctgtatataagttttttaaaaataaatcaaagaaatatttttttttaagaaggagagcagcgctctcccatttcatttactgaaatgcagattacccaaaatcaaagaaatctatttttgaaatttataatgtttagtaattattcatgggccgtctcattttatgtgctaatatgctataatctaataaggagtttcaaacgggcctaaaaacatttagggagagaatttaggaacacgaccatgctgagcgagtttgaacaacattgccaaaatgcccaaaaaaaactttggtgactgatttcggcaagatcgtccacaccatcaagctttcatattctctcaatgattggttatacgtacgagttctcattcagatgattttcgaagaattttatctgaaaattgtagtatgaacgaatccggaaatgaaacgattttgctaaatttttgccgggtgattttttttcatagtatttgacgtttttctagccgcacgatgttttccaagatttgtgcaaaagcagggtcagttgagtccatgaccaagtcaacctgactttatatcgatggattcatgtacatcacgcatgtcagattgtcagtagccatttacttcttctatctatttctttctttcttttttctaggtaccaaaatttacagtgcacttgtactaaaataaattacagtacacttacataccatatctactgtttttacaaatataattttagttataaagcactgtatttagttataaatgcaatatttaacacttcagatatctgcacggtttctcaagcaatgtatttatactaaaacgacaaatattctagttacccaaatttacaacgcacttgtactaaaattatagtgcacttacatgccatatcaactgtttttacaaatgtaattttagttataaagcactgtatttagttataaatgcaatatttaacactttagatatctgcacggttttctcaagcaatgtatttacggagttgctagaaatatggcgccatatgctacagtcgattttttttcagccacttacacagtagttacacctcatttacaccccaatttacatatgtaattttagtacttacatatgtaattttgagacttacattgtaaatacactaaaattacatatgtaatttagggacttacaatgtaaatacataccgactattttttgatgaaaaatatggcgccataaatatagctacacccatgtatttatactaaaacgacaaatattctagttaccaaaatttacagcgcacttgtactaaaattacagtacacttacatgacatatctactgtttttacaaatgtaattttagttataaagcactgtaattttagttataaatataacatttaacacttcagatatctgcatggtttctcaagcaatgtatttatactaaaacgacaaataaattatagtgcacttacatgccatatctattgtttttataaatgtaattttagttataaaacactgtaattttagttataaatgcaacatttgtcggtaattttagttataaatgcaacatttgtgttaatctttattgaatactactctactaataagtacaatcacatgctacttggacggtttctctgtattgttatttttttttttaccgttggatgcagatacgaggggagaaaaaaattgggtgatttttttctcaaaaataacacgccacatgcctagacagtcccatcaggaaaagttcttcgaagtaaaggcccattgtatgacatatccgggccgcaattgtggcccatccgtcgcaagtttcccgggcaaagcgagatgggccgagattgcgatctgtcaactctcttttgtgggcccacctgtcagtctccgtgtctcgctgacttcctctgcatctctcgcgccgcctcgccggcgaaggtcgcctctccggctccgccgccgccgtcatcacgagggctgccacggtcacgagcaggcgggcgccggcgaggtggaggacgggagtagcggttgcggggagaagaggaggccggtgaaggggaaaaggagagggtaggcttgccggcggcggcatcgggcgacggcgacgtatcaggtgagagaatctcggcgagttctctcgccatccgattcttcgattctcttccctgtcagtacgccccgcaattccacagtgctcaaattttacggttcaagacaaatcattatgctgatgcagaacgcagctagaatttttcaggtttgcagccgtttttttttttttttggatttccggaccgctgtgcaagattctgcaggcttgtgaggaacacaagaggaatggataataccccacgattttcaggaggaggagatgattgtgagttgatgcagcagaaacaagaatgggccaagtataccctcagaaccattcaccaatcaagaggagtcagttcacatctcatgctggttttttcctgtgctgtagaacacaagacatgctaaagagcaagctcattcttgaggatgattttgggtggaatttaccttcaatgggctcaaattcagatcagagcaatgctaataataagggcaacctgaagtatataggaggtgttgacattagcttctcgaaagaagacccttccacggcgtgtgctgcactggtagttttagatgctggtaccttagaagttgtccacgaagagttcgatgttgttcggctgcaagtgccatatattccaggatttcttgctttcagagaggtattgtgtgtcctcttattttggcgtgtttggtttgatcaaaacatatgtttgctagatcatgagcaacagtttatccatgccttctgtattattattcaggggcctagacattttcattttctgtagtgatgaacaggcagacaagcaaacaatgaaacaaaatcaagatgggtacattcatatttattgtgtttttgctaactattctttcttcttatctgtataaccatatatgggtctagcatgttcaatgcaaaatcaagttatgattggacgtggataaactgttgttatatgctaactattcttttaattattctactttgttagatggtttaaaatatacatcaagtatattgttatacagctaaaagtgtcaacatgcactacttgttacaggctccaattcttctaggactcttggaaaaaatgaagacaaacaaccagcatttctaccctcaggttgctttgtcgttgcaatttacccttctgtaaataggtttactgtggctttatgctttgtagcattccatgttgtcatatgttgtttccattttgactgtgaaaacagtgtgaattgtctgcgctgatgtataatcatttgtcatcataaatatcatttattctagaattttgatctggaatgcttaatggcataagcattggcattaaattttagatatgttagcgtcttctagttttacatttaacactagttatgccagtgccttctctatggtttaacttgatgaactgacaggtactcatggttgatggaaatggattacttcatccacgaggtatacctcattagtgattagtatcatggcaatcttagtttgtaagactaagatgattcatgtgattagaaaaaaactgcagaatcacacacataacatgattatattatattcttttagaacgaactaccttgacagtccttgtagtccctagtcaattgacttggtgatagcgtacagcatgtctagttatgcatatacactgcaagctgcatcaataaactacttgaatgcatgaccctctaacttacatatgttcaacaggttttggtttagcttgtcatcttggtgtccttgcagacctgccgaccattggagttggaaaaaatgtattaatattactgccattgcaactactcctatggaagttctctcatctagttgttttccgaccatttcaagtacttgatggttttctgatgttctgatcctctgagagaagactaagtcctcagtgttttgaatgccccagctgcaccatgtggatggccttaaccaatctgaattgagaagacaattagaagcaaaagaaaactgcaacaaggagttaattttattgactggacagtctgggacaacatggggagctgtaggagattctatattggacctctgaatgcatccttcacttcatttctgtcatatatttcctgataatgaaaaggtttctattgttggaactaaactattaacttatcccaggcaatgtgctcctgccctagtttgtcgaagccgatctacatctcagttgggcatcgcatttcacttgactcagccattgggatagtgaagttctgtagtaattatcgcattcccgagcccattcgccaggtagaattttgtaaatagtatacctcaagtttcatcttgtcagcacgttgtatcttgggtactaatttgacgtttcgtttcatccttcgctaggctgatataagatcaaaggtgttccttcaaaagcaccaaaaacttgaagagtaataacaagattgaaatgggagttttatcttctacctgagtcaaattttccacagcatgaagtaacttttccgcagctctttctaatcgtaatagattgcacattgcgccgtcgttttctttttcttttcctttttttgtacatgagggtgattgtcacttgtcaggtcagtgttgtttgtaaaatagactgcaggtcacctttgaacaatctgaaatctgttcagctgttgatgtccgcacacttgttagctaatttaatcaaagatttcaatttacgactgcagaaatattgctctgttacaatactaaacagtggctcataaaccagctgggggtgtgtataaacttggaagtcattttaattctgtgaaacgcaatagtaaaaccaaatattatcgtgctgatgtagtgcaggcatcttaattccataaaggtaatatgaacctagttgttctaaaataaatgtgaacctaatttgttaaattaaatataaaaataggtggttgatttactctgccatgtgtcaaattgtcaatgagtctaaaaacggtcacaaatagtcacatggtaaaagagccctagcatggttatctttggcacataattaagtgccttatccttgtcgtatctaatctaactaatagagacattatggcatgttaaacttagaagagtcataaatgcatatccttctagaggcttagattagctgaatgctactattcaccaaaattaccctctttatttactatcgtgctgctatatatacacatgatcagagatgactgcgatgcagcatcactcaaagtctcaaaccatcttgcttccaacaaatccaatcagaagagcattcagcagtgggttgcaattaacagcgagatggctgccaccttctcttctgttatgtggaagatccttgtcattgctgtagccattgctgctctccttatcccttcaggtacacattgcaagattttctaagattagcataatgcccgtgtgttgcaacatgcttttttcttctaattgtctaatatattatcattttgtttatttttctatcattttgtaaagatgaaaattttcataatattctattgttatatttttctttctataagatctatagcatgtgggggctaagagataagcaactcaccgttcatgggtcccgtatggtagttgggtggtggtggtggcagactcatcaccaccactactatcttttatattagtatagatatagataatattgttcctctcaaatcactattacgattctgatttttacggttcataattactcagtatcgaaagagaacatcggagtttcaaattatgatttactctgtttggatgtggctgatttgtgaactaaacattggcatttttcttttctgatggatgcaggagagggcaagttcgtgtgccgaggcaagtgcgaggatatacgtgactgcgacaactggtgcaagacggccggaggctacccacagggagggcagtgtgtgccgcccctctaccaattctgctgctgcatcgagtagcagtatggatctccatcgtcttggcctacaatgttggctaaattaagagcttgatttgacaccaaaatctgcaaaaaatgaaatggaaattaagtaagtaggccatgattgagattaattacaaaacgggaatcaatttcagagaatcgcgagaattattcatgttttccatacgaagttttgttccgaccctagctgcattcgaggataaagatttggaaccttttggaaaacgtggtagctcattatcacatgattaattaagtagaactttttttgcaaaaaaaataacaatttaatagtttggaaaatatgcatgtaaaaaatgaaaaagtagagttgaaaaggttcgatttgaacacagttttatcgatttgaacacagttttatcgttaaacctatagtggcttataaaacgtaccgttttttagcggcaaaagaaaaaaatctataaggaaaaacctttttcatatgtattcttagcatttaaaagctagtactgcaaaatgaaaaacatcaaaatcaactgtatgactatggttttgaagttaaatttaagctacggcataaaccgaaggagtctatacggaagatgagaatcagcagctcatttgcgtcactggaaatccggattctgtcacgttgatatactagtttttggttctgatttgcttctgattcatgactaatttactcttaaaaaatgagcaaccttgtctcaccatttaaaaatgcccacgagcaaaattcacgtggatgacgtggttgccgttcatgtcaacagatctctccgaagattcaattaccgaaaatcgcaatattttataaccaaaatttggatccgcttacacctcggatctgacctaaaagcggtagctgcgtcatgtacacatgtgttgcctctattggcagattttgattttgccgaatcaaagtagactcacgtttcattggttttctcaaccaggccaatcaaaattcaaacaataatgaattcaaaatgttcaaatcatctacactggacaagtggacgctggacagtgactcatcaattcatcattcccatttcagggtctatttatatatgtttctctttatgcttctttaggaaataattaaagttagtttattgggtaagtggcagaagaaacctagtactgatttcttatttttcccttttaatatctagaattgtacttttctggtgcaaacaacaaaatggtaagtgtgcaatactaagggcacaaaaaatatttaaaaacttgaataggtattagaaaactgtagggtaattgagaagcaagggaaaaacttgtgacaatgggttgatcatcttatcatcgtcattatcacacataaaccctcctatcaaagaattgttcttatttttcacgacgaaaagacaaccgaaagaaacggaaaacgaccaccaatgcctccttttatgatgacaatgattttatactctactgctgacataggcaattatttctcaacaatcacatgagcaaattctacacgtttaagaaaataagagaagtcgatcggcatgatcattttcatgtctctataggatgcatgaaaaaaaaagtggtgaaagccctctttcctagtacaaaacatgatacaaaactcgtgcagaaatttgatgttcgaattaacagtgttgtgtttgaccatcgagattatatttccatgaaaaccaagaaagagaaaaaaacaaaaagactcgttattaataaaagagtaaattttacgcaattacagttttttttatcaaaatatcataaaactatagattatatataaaaatgtatcttaaaattacagatttagcatcaaatttatcattatcactaaactaaataattaacatcaatattaccacaaaattttagcttctgtaacttgaaaaaataatagtgctatagatctaaatttgaaaatatctatagttatatgataacttcatcactaaatatttaattttctgaaacgatctaaatctatagctttgtgataaatttagagctaaatctatagttttataatataccctttgaaatctgtagtttcatgataatctagtcagggaatttgctcttaataaaagctagcggattttcatatgcgtctcaatgatggtcaaagtattgtatgactatcggcctaactactagtagctcatgcaacattgagaggcatacgatcagcaactaccaagtcaatcttcttttcaaaaaggaaaaaaagaataaaaaatcctaccaagtcaatctttcgcatttgatcaactagtagctgaaccagagcctcccaagtcccaagtcctaagagcaggtataatagcaggctataagccagttataaacatattttaaaaagataaaggaaaagagagaagagcagcgggttacagatctgtagccagctgcagcacatgtttcaagacataatgtgtgtatgataggtgggaccaggtattaatagtatagtaagcaattattgtatgaattggctattatattggctatagatgatttaaagttagtaatgggctatactattaaaattgctctaatgtccaccttcccttgtgtacatacttgttcgagaagtcatgaaacatcctagttattgtactgttcgcacagacattccctccctaaattggtcgtagcccctgtacttgtcatttgtcaaaagaattgaaaattttctccatctcttgagtcttgaccggctccatcttagggtttttttggcacctatataatgcaagatgcattccgttctctgaactttctgagttactccatccgttttttcttaatatatgacaccgttgatttattgagatatgtttgatcatttgtccatcatttaatttattgtgacttgatttatcatcaaatgctctttaagcataacttttttatatttgcatttttgtaataacatgaatgatcaaacatttataaaaaaattaatggcgttacatattgaaaaacagagataatatttaaaaaccgcccatacgacaaagaatggattgtaaatctcaatgacaagtgagctccaacactagtataggtcaatacattacacaaccaaaaatctatgctctctcataatgtattttttcattagcatgagaaatattcctttacatcctaccaagtaccattatcaataaaaggttagtagcattcctacataaggcaataggttctgaaatatagcagggtacatttttttaactatagacattccctaatagttgtagaattgtagttatatactctgggtattccatactatcaagtacacacgcaaccctagttgacaacgaaaatactaaaccatatagttctgtgtctaaatatgagcatactgccttgtctacatgttttaatatacttcctttcgaaatcatgtattgcatgtttagatttacaatactagaatatatcatatctagtgctagattaacttattttaaggtaaatgtggtagcaccgtgcatgaccttctagaaggttttcaaagtttagagacgggttgagaactgagctcagaatatagatattggttaggtcgttactgctcctcgttgacatgcataatatagtatttgacaaaaaaaaatcatatgcacatcagcgtcggcacacggtttgaaggttttttttttatggttttgtcatggcctattgcatttttattttccttctatagctctatgctatatgcataaactaatacaaccttatataacaatctctgcttacaaatactatataattgtcactgcttacaaatatttaacgtttagagcaaaattcggtcaaacttttaaacttttatcatcaattttatattaaagtaagtttatgaaatctaataagtttgtatattgtggtattacttttgaagaaaaaaaatataggcatatcgttttcttgtttcaaaactaaacatttaagaaaatatttatagcaaaagctttaaaattttaatcaaatattatcataaacattaaatatttatacaaactagtcaactgcatccttgtttgaatcatctcaataaattcaatgtacgcatctaatagaataaaagatctcgagggtagaggactaaaaaataattttagaagatagagacgtgttatttatgcatacatggatggtttataccaaggaaaatatatagtttaaaccatatacacagtgaaaactgaaaactaccgttgtattaaaaaatagacgcatggtatttgtccacatcaccaagaattaaaaacaaatctcaagcatctatttttttaatccaatgatagttttcaagtatttactacattgcgatttacacttacatattttcccgaacaaatgtagtctattttggagatagagggagtaaaattaacactatctccgttttctaatagatgacgctgttgacttttttgaacacacatttgaccattcgtgttattattaaaaaaatttatgtaattacaatttattttgtcgtgagttgttttatcactaaagtactttaagcatgatttatatcttatgcagctacataaaatttctgaataaaacgaatgattaaacatgtattaaaaagccaacgacaccatctattaaaaaacagagggagtaataaatataaagagctgatttggtttgaggccctaccaaaatgttggtagtgtcaagcgtagatttattactagctaggc

SEQ ID NO: 5702 - DNA, 28070 bp, Oryza sativa
catactctgttgcaaaaaatcacccacatattttggaaaccttctattaagggaatccgttttattctttgttccacaaaaaatatttcacctagtgtacttacaatatattgttatgtatatatctaatgttatgaattgaaacattcttttgcaacaaatcatccacatattatggaaaccctttattaagggatattatggaaaccctctattaagagaattcatttcactttttgttccacaaaaaatgtttcacctagtgtacttataatgtttcactatgtatagatcaaatattaaatgaactgaaacattctttcgctatttgctgaaatattgtttttatataaggtgaaacatcgcctgatttaaacgattgaagcattttcgatctacttagtgaaacaattacgatatacttggtggaacatcgtacaatatttaaaaataattcaataataagctaaaaaaattttcgtcggaatatatccatgtgtagtcttgtttcaaagatttaattgcaacgaatttaatggtgcaatcggatcatgatttggataaataatttaaaagaaaaaataatttaaagtagtttttgcatgctgacgtcagcatgacatgggcgtccgattttcccaccttggatcgggcgcctgacgtgtagttgcctccttttttttttagctttctttggtccattttaatacaatataacactacctatttggtgattcttgcatacacaactaactctggaaattacatttgtgtcgcattgatgctttccttttactttgattttattaattgggagatgaatgtatatttaagacgataaaagctccaacaataatgcatcaaaaccatttctagtccaataaatgcttccttcctactacattaatcaatctatgcaagtccaggacaataaattatgctataaggtgtgccatggatggataattaatgtaaatcctgctaattaatgtagcacttcattgaaagaaaatctgccagatatatatgagatatgatattattcaaggtaggcacgcaccaattctttgaagcaacattaaagccaactcttctactacttatatgagttcccaggatcaacatgttgcttgaaccagccgtcagtgaaatggaagtacacaactattcttgcaaaatgctgcaagatttgtgccttatgctgtctatatttgtgggctttttaaatcatttagctctatcatcatcctattacgcgtacccagatgttggcccaattagaggccaagcttcaacaaaaggattgaaagaaatctcatatgtaagttcactttatctcaatccatatcatgcttttcaacctcatttcttcccttatcgtagtgaagcatatgaatgttatggatcagttgcatgttcttgtatacatattcttgggtcacttctttttttatcttttctctctaaacatgatgtttctgtttaattaccaaagcgtacagtttcttatgacaatgaaatataattgattttttttcttaaattatgagtgttgataaataataattgttaaactgatatgagttgatatgacgatggaaaggttgaattttgagtcggtgatgaggggacgtttttagttaaaagttgggaagttgagttttatctttttaatatattgttcctattcaaactcgtgaatttgcagctgaactggaaaagggaatgaaaaatccatatgtactttttaaattacagagatgatttacatctcctgcctctatcattaggcacacaaccatgcattgggaggatccattcatatttattctttatgttaagatgtctatatgttcaagtagtgaaaatgccactagaataacatatatatgtatattattttttcctagcacgcgttacatcgttcaacagatgcccctgaaaatggatatagcggcgccatggcaactctggatgtttataattttccatatttgaagaaaatggaagtaagtgctgctattgttagagtttcaaattaccaagacgaagccactaaagctggtctcaatgatatacaggccggatgggtggtaagtgaacaactaaccttaattgtctatgttaacatttggaggatgtgtagtacaatcaacatcagctatgatatatatatctcatctcaaatgctattttccctacatatatagattgatccaaccacctatggtgacagcaaaacccacttctttgtatcttggacggtatgtgtccacttatattcattgtttgtgcacttgaaatacattgcttaattaccatgcatatgtctttaattacaaggttttgatatggatgcatgacatacaggctgattattacaataaaaccggatgctttaacttggactgtgacggttttgtaccagtaaacggtgccccggtgactcctggagatacattagaacaagctaataaccaaactaaaatatcattcaagatatttaaggtaatgtaactaataattatttgatcctagactgtatttagtgtgtacatacgtatgctacacaacacatgctgatcttttttccgtaatatagtaaataaaagtacattttcatgaactgattatttccctaaactttcatatgcccgggtatgtagcttgtagatgggatctcttgagctgaaggctgaaaatttccctgttatcttaaagaaaatgtaccttgtatttatagtaggaaaatatctaagtgtacagcctttactttctcgaatagtaactcttccgaatattcttgcgcgatgatatttttccatatatgtacacaggacaaaaatgatggagattggtggctttactttggatatgacatcaacaatctcaatcgagttggattttggccaaagaatatttttaatcgtatggtagatcatgctactcgtataaggtgggctggctatgctcaatcctacaaagggagctccagtcccccaatgggcaatgggcaatttccaggaaaaatgtcagcatcctttcagaatgttatgtatgttgataccgatggccagccctatcctcctcctgtttggcctgctggtctcgaagtttatgcaagcaatacgaaatgctaccaagctagcatttttgaggataacatgttttactatgtggggccaggtagttgtactagttaaaattagaatctcttgaaaatattaatggcgagggccatctcttttcccaaaaggaagaggccctcgcgtcgccctcccccaggcggctcgggaggcgatgtgcgcgccgccgctttcctcctcccccgcctcctcctccacctcgccgccgccagagcgggtgccggcaatgccgcgcagccgcaaggacggcggcggcggggtctcgcctagccaaccctacgctcggcggcggggggggagctgcccggggcggcggtggtggcggccagatccgcgccgtatccagccggatctagaggggggatggccagcggcggggactgacggtgatggtggcgacgacggcggcggaccacggcggctgaaggcgacgtcggcggcggaccatggcgactgaaggcgacgtcggcggcggaccgcggcgcgtccaggacgccacggctgggacctccgccgcatcgtcatggtcgtctcgctccaaccgggcgccgagcggcgcgttccgtcccccggatccgcgccatcctggccgaatctggacaggcggcggctggtggcggcaaccggtgatggtggcagctggcggcggcggctggcgacggtggcgtggggacgatcggcggaccacagtggctgacggcggcggccgtggtggcgatggctggcgagggcgcatgtgcggtagtcggcgcgtcgacgtcagcggcaacatttgaagacgaggaaggagttgggcggcggggaaggaggagaccgggagcgggcgtagcgtgggcggcggctgcgtgtggcggcgttgcacggctcgggagggctccgacgagctcggcggtagcgcggagtcgaggcggactccggcagggttgctcgctagcggcgagcctcctgctcgcgatgtgtggatgtggatgcgatggcgtgtttggttacgtcgaggtatgactgcttgtgagacgtcatggactattcagtggtcgtcgatgtggggtgcttgtgtgtgtgatgtgaagacgttggcgaaagccttgccgtgcctttggccggttcgacgatgacgatgcccacgggcgccgttaaccttcttggaggcgtcgtgatggcgttccttcatattccccacaaatctccaggtgaaaaccttgttccgatttcggatgagcggcggcgacgttatgcatcgtgtcctccttgggggtgtcgcttcggagaagctcctatgtatcgacgaccgtggatggtctttttcggttctaaagccttcataccttggcgttcggcgaggccttcgcctccttaggtccgcttcgttcttgtggtgggtgacacgctcttcagttgcttctgctgatgaagtcggagcggctcgctgatgacgtgcggcgatgcttggcaacgatgacaagttgcagtctcttccaaggagttgttgttggccgtgtgaaggaagtggctctttggtggcttggctgatgtccattgttggatatcggagctgcttttcgctctagcgactttcacggcttcagtgtcgatgcggttgtaaagtcggcgctgctgggttgcttgggcggctagctcgacaacgataacacctcttctgtgatgttggagctgtttcggtcgcttttgtgtattagcttggcaatgatgtcctatatttgggctccgccgtcgttgcgagttgtgtagctaggtcccttgctttcttctgtgtggtgagttttagccggttttccataattaaccgtgcaattgtatggttttcgggcccggttttccttataaactgggtcaattctcttcttctaaatataaaagtggaacaaagttccgccttaggtttaaaaaaaatgttaatggcttaatcagttgaataaacaatttattgctaattggcgcttggtttcttccaccccgtagcctgcctacagcctgtggctgcttcatgctataataggcaccctggctgccttgtagtgctgcactaggaagccaaatggtgactatggggtgtttagatccaggggtgtaaagttttggcgtgtcacattggatattatatagggtgtcatatagtgtgttcggggactaataaaaaaactaattacagaattcgtcagtaaaccatgagacgaattttaaggctaattaatttgtcattagcaaatgtttactgtagcaccacattatcaaatcatggagcaattaagcttaaaagattcgtctcgcagattagtcgcaatttgtataattagtttttttagcctatatttaatactccatgccggtgttcaaatgttcgatgtgacatggtgtaaaattttgaggtgggatctaaacaggccctattatcaagctatgtgcagtaaaaaagattggtttactagaagatcacttgctagtcaggaacgataaccgctctgttccttgggcttctttcgtcgctctccttcatgctcgctttatgagtgcaaccaagttcaataaactattcatactaatttataaactataatggtttctatctaagagccatgtacgtgagatgcttccttctcatacacacatctgaagcaacatttcaacatttcaacatttcagcaactgaattagaatgacgtgtgtgtttatcaaccggccgattagttcccatctcgtcatctttcttttgctatatacctgtagccagccatatattaggtccacattacacctttttttctacaaaaaggcagtcataattaatttagggggcaatggccaattacaatcaacatgtcctccaggctcctgtgatgcactcactacttgaggtgcactcgttgttcttcaccttatcccatagtttatttttttaacagttctatctgctcaaaatcattcatgttattaatttgcaaatgaagtttaattatgagggcaataacaccaccaatttggttgtttgcattgtattgactttcgtgttagaacctggttaagggggtttaatttgtatttactttgacgtgcatgacatgcatcttcgcagttgtgcaaaatgtctcaaactaggataacgatgtctagattcagcctagggtgggaaacaaggatcatgagttcattactctaataatccagattcattatactagaaagaggtcatatatattcctttttagattggctttttttttacaaagaaagcacaggtatctaagaagagaggtatcaaaacaaatgttaatattgggtgtaacagccctaaaattcactaagttttaaaaccatttttctttcttgttggatatatatattaattgggtgcttttccatattttcccagcgctgctatttgccgggagtgcataggttctggatgattatgatggtacagggctttgcttggtcagtcgaaaaccccagaaaaaaaaacacatgtaaaccacattattgcttaatttatataaaaagcatggccgcgctcaggggcagattcaacgtgggtgcggggggcttaagtccccctgcacccacaagacccatggataccccatgagcacccttttgattttttcaccatgaataaaaaactaaaggtccgttaaagaaactgcataattgagccccctcccatttttttttcctggatctgtccctggccctgctctagacttcctttctttaaaaaaaaatacaacgcatgtcttgttatttcttttacaaatactcacagaaaattttgtttttctccctttgcaaagaaagcagagacgcctatgataactttgtcatgctagcataatctttaggatgtactcatagggacaggatatgctatatgcgcgtgtatatttagtaaaagtgaagcgcatgcattatgagcatgtctgcgttttaatcgtgttttaaagaaaaaaaaatggaaaactaaattcattcttcaagccgcgcacttacgtacgtgacgtaggcagttcctactcgcttcgccaatcagaaagcgaggcagtacggttctgatatcgtgactttccgttccaacatcggaatcgtcgatctcgctcgcctcggccgcctgggagtagctcgctcgctgtcatctcgttgcgatcaatatatcccggccgccgccgatcaagcagggctagctgcttccgttgcatcatcctcgccggtgatcacccagggctttggttttcgatcgtttgctaaaaagtttggctgctcactaccgaggtcatgttctgtatatgcagtggaagagagcattatttttttctttttgaaattgctaaaaaattgtcacaagttttttgggcaaaaaaaaactttcaaatgtaattgtagtatagttctaatgtaactacaatgtaattacactatagttacattgtattctctatataagttacatatattattttaatacttatatacaagttatattacaatatagttatagtggaattatattacagttatatttgaaaattattccctatatttgaaaaacttgcgacagttcctatattttttaaacatggtcaccacataaacacttaggtgggccaaggttatcttgtggttagtactccctccgtttcaggttatcagatgttttgaccttagtcaaagtcaaactactccaaatttgactaattttgtaaaaaaaagtataatatcatttacgaatttggtagtcctattttctttccgcttcccactcgagtaagttctcgatcgactgcaggcatgcagccaattgtgcttaattccatgatttcaacctatactccatttttccatttagggcgcattctttggctaccttctcgatttttgttagcatattttttaaaccgttagccgttaaaaggtatgttttgtagagataaagtttagaaatggcacgtttatgcatgctgcatgttttttcatgaacaattaatttttattttataaaaatatttaaattaaacccaaaattatgaaatttcaatttttatatttgaaatatccagtctagctattggctctaagcatttcttttgtttatgcaacttgatacaattatttctctcattattttttgtagatggattatagttatgacggcaatagctctgagaatgtgattacttttatcttgccatttctcatggtagcagcggcggtaggagtggtcggatacctactctaccgtctatgcagcatgcaccagcgacaatcgtgactgcaggatatgcctacaggaataggaggtcggcgacactattgccagtctactctacggacaccggtttcaccacaggtgtgtcaccaaatgattcttcaaaagaaccaacggttgccctctgtgtcgcgttgctgtctagtactgtagctctatgggatatatacgtgcgagttatctttttactgactatgtatgtgagtttaggatattttattgtgagttatcattttatgtactgagtactttatatattgtactactagtattactagtattgtattaagtagaacatatacactaagtatttactactactttatattgtatttactatcatttttgttttagacaatgtgcaccccctaataaaaatacatccgatgtctttagtatgaagactagttaatactttatcgagttacagttgcacacactaaactttggagctttcctcgtcgacattgagattgaactttcagaagcagaggcggagctagaaattataagactgtagctaagataggactctactaatgaagtattcatttcctataaaatttacatgatgaattaacaaaatttaaataagtttttggagttaggcctagggcttaagggccctagctaccctaggcctacctccgccctttcagaaaggataccttagctaactaagcaaacttgacatcaaaatcgtacatgcatttgccaaaattcacctgagtttctagcttctcgaaataaatttgtcctaacatagcaaaccaaacctccagctgctcaaaatacaatggtctgcctgccactgctgcacaccttctagttccaccttctttcctctgatatggcaatacataacatatgaaaagtttcagcacacaaagaatctgaaaaaaatattcttctttcgaagaatcatatatgtaatatggatcaactaggaaactatgtataaacagcatgttgtatattgtagggagagatatactgttgtattgaacctcactttttttaaaacggaaaatcaatcatatcctaataccaaaaacacatgaccactcgacagaagagcaagatagatgtacaggatggatccaggatgaactagtagaaggacagaataaattatacaaagctataacctctcttctagtggataaatgtatggcaaaatattttaatgatggttaaatggaggctcatcccatagttacaatatcttagggggcacaggacccctctgtcctcatgatagatctgtcacacagagtccttgtatattggcataggacagcaaaatctccaccgcctcaccatcatgcctcgctgcgctaattgagtcgctggatcaaggaatagcctcgagtacgtgcttggcccgttaaagttgggccagaacgtacgggaaagcaatgaaggtgcgacccatcaggaactgggcaatggctgacgtaaggcccattagtgttgggccagaggcgtatatgaggcctgttgtgtttgtcgccgggccgatgtgaggcccattatagttaggcacaagttactgctgctgctgctgtgattctccacagcccgaactgttttctctttgttttgcacactgcggcccatatgcaagaggtggctggcaaaccgaagcagggacatgtttagtaccataccgcttgttttggacaagatgagctagttgttccgctacttatatagtcaggaagctactagttgaaaactcaagcagctgcgtggtgagcacaaaagcgaactattcttataccttttactaaagaataccgtgtacgcgccacaaatagcagcatacttttatttttggagggtgttttctcttggaaaaaattatctctttagattagactcaatttccaaagctaaatttgttagttttgtttgacactactgtacgcacagttttggagggtgttttctctcgtaggaatacaaatcaaagttcaagatctatcttttaaaattcaagctcaaagttaagtttgctagttttgtttgacagatgatgtggttggcctgctaatcatgctagttagggatggcaaaaatgagctactcaatgtaagtcattctaacatttctcacatttatattgatattaatgaatctagacatatatatctatttagatttattaatatcaatataaatgtggaaaatgctataatgatttacattgtgaaacggaggaagtagttagtgtgaactaaaacaacattttcaaattacatagttacattagtatttttagtatgccacagtagagcagagtatggtcaagaaagcgttgcgtttgccttcaaaactactacataaaagcttggcttagttgaaactaacttgtgtattgtcgcttgcatttccctttcaggacaaaccattgtcaactgcagtaagttcaccataaaaaacaataggaaatgcacatgatttcagtaatcctctatcgagcacaagttacaagtacaggatcatatcaagatattgccgctattatttttctgagaaaaaaactgcaaatatatgtgctgtattgctgcagaggaaaatataactgatccagcaatgcaaaagaaatgtccaccccaattcattcacctcagaccatggagcagcttgtctctctccaagacttcatttttattatctttatagctacttagttctagggacagcctcatgttgttctggtcgaactaagataaacaataagacaatgtttggctaatgagatagcgaaatgattttccacccaccaaaagacatctttaaatcctaactatttattatctatcttctatttaatcataacccttcattcatttcacaatctcaatcccactccccatttcacattatctaaacacaccctaagtataaacatagaaagatgatacacaatgaaaccctctctcaccccagcccatttaagatctttggcatttgtctggtttacgcacagatcgtatctcgccgaataaaagtaataatagttgcattcaacaccgtaatttcgagtatgattcaagcttgacatgaccacctagattcgattatgcattgtaaaaaaaaaaaatcttttctgggacaacatccatggcattagatctctcgcagttgtagttttcttaaatgggccaagtacgttccggaagaggaataagttcatatgaggtcccttaacttgtcaacgaattcgattttcgtccctcaaccagaaaaccagacacaacaggtacttcaactatcaaaaccggtgcagattaagtccctcggcggttttgagggcggttttggatgatgtgacgcctacgtggctaatttgactcgtcttcatctgacgtggcattgacgtggcgcttacgtggcaattcatccagaaaaataataatacccgtgggacccacatgtcagtctcacacagaaaataataaaaaatggtgggcccacgtgggccccacatgtcagtccaacccacccctcctctctctccccatctcccctctcttcagttcagaagagcggtgtggccggctctcgatcttggtcaggctgatgtcccgaaacgcgaaggccgacagcaccgaacagcaccgacgtcccctccctgtcgtgcgcgaacacgatgctcgtcttgaagggccggtccgttcgcgggatgatgggctcccgcgccagcatcacgaaccgcgtcacgttcccggcgtcgtcctggatgccgtcggcgagcacctggagcccgtacaggtcggcggcgcgagaggatgcgatggcggcggtgtcccggagccccgcggcgacgacgtgctcggcggcggccgcggtgtcgtcgaaggcctcgcgggcgacgttgaggcccatggcgttgagggtgagctccccgagggatgctcgacgggcacgacggcgcgggagttctcgacggggaagacggcgcggtcggcaatccagagctccacggcctgaaaggccacctcgaactggtcgcaggggatggcgtcgcagaatgggtaggccttggccgccgccgcctcgctgtaggcacccgggagccgggacaccctggtaggcgacgcgcagctgccttccgtgcatgggcgccggggagagatcggtgatggtcacctgatatacgttttgcaaatctcagcaccctaacatcagaaaccagaggtgccatagtaagacaatcatgcaatgaaagtaaccgagtgcctgaatattcagtaatgctcattgttcaggtttcagagaatgacaataactgtaacaacaagagggtgatgttgaattggtgatgaaaaaaaaaaaaaagaaaccggggtgtcacctacaacgtggcgtccgtctcgtcgtcgggcgcttcccaggcgattatcatgtcgtaggtgagcgagtggaactcgctgtcgctgaggtagtcatggcgcttggtctcgacgcacagggcaatgtaggagcagtactccacgacgctcctggcgtacaccagcggctggtcccccttctccggctcaaaccgccggagcagctgctccacctccacgccggcgatcctgcagccacgatcgatcggggaatcaaatcaattggacactggtgaggatgaagggagatcataccgggcgcatcggtggacgacggaggaggcggtgggggagaggggagggatggcgtagtcgggcgccgccatgccctcatcgtcgccgccgccgccgtcgacgcgcggggcgaagaggaggtcctcaacctcaaggagacccatctggagtggcgacggagcaccaggagggacgcatcgttcgttcattcgtcggcagtgtccccgtcgcgcggcgaggtttccatcctccagaggcgaggggtcggtggcgggaaagggcggcgtcgcgcggcggttttgagggtggtttccctggcctaccagcgagcgcgcccgcaagagagagatggccggtggccgctcttctctatttccgccgccatcgtcgtcgccggccgcatctggtgcccatccccagcgcaagagagaaacgaagaaaggggagatggggagagagagagagaggaggaagaagaggaggggtgagttggactgacacgtaaggcccactattttttattattttctgtgtgaggctgacatgtgggtcccactagatttattattttttcagatcgaattgtcacgtaagcgccacgtcaatgccacgtcagatgaatactgagtcaagttagtcacgtaggcgtcacgtcagccaaaaccgccctcaaaaccgtcgagggatttaatctgtaccggttttgacagttgagggatccgttgtatttggttttctggttgagggacgaaaatcggattcgttgacaagttaagggatctcagatgaacttattccttccggaagaatgcaacacatgtggttggcccattttcgttgggccaaattgtacgggaccgcaacgtacatgaggcccatacggaacgggcctgtcgtgacgtgtggcccgttatagttgggccggaatgggacttctgttgtgggctgtggctagcgtcaggaaaggcccaacagtgctgcttctataggcccatgcaggagattggtgcaaagcagagaagagacaccagagccgccgggggagcagaatatttttagtaccataccgcttgttttggtggaggtgagttagccattcggctatttaaagggcggtagctgctcggcgaaaactcaagcagctgcgtggtgagcacaaagcgaactattctttcgccttttactaaagagtaccgtgtgcgcgccacaaatagccgcatactcttatttttggagggtgttttctacaaattaaggttaaatattgataatatttatttttggagttcaaatattgataatatttattcttggagggtgttttctcttagaggaaacactctaagttcaaatagtaataatattgatctaactgaataaatataaatagaatatggatcgaattaaaactcaaaatttatctcttgatagtcaaatttcaaagatgaatttgtcgtttttgtttgtatttgacagatgatgcatatataaacatattaccagtaggttataggccctgtttagattttaacttttttcttcaaactttcaatgcagcgtgtgccatatgttgaccatataggttagatttcaactttttttcttcaaacttttaaatttttcgtcacatcgaatttttctacacacaaattttcaacttttttatcacatcgttccaatttattcaagctttcaattttaacgtgcaactaaacacaactataagcaacctaccagagcatgccaagatttctgacggacaggcgacagcatggaacagagcatatgtttatcataataatttgtcttcaaatagaaactagtcaactttttctttttcatatatgtactcttgcatacagcttgcaggttcctttcattttttgagagatattaggtgcagagtacaggctcgtttctgcaaacaaaatcctgtttaataatgtgaaatctgctattatgcaagttttcatcaacagatcaagagggaaatgggcaagtattttaagtataccacaaaagagtagagtagtactatatataaatttagtcaagaataccttgcgtttgccttcaaaattacataaaagcttggcctagttgaaaccaactactgtatgtatgtactgtcgcttgcatttccctttcaggaccaccattgtcaactgaagtaagttcaccatacaaaacaatataggaaaatgcacaaaatttcagtactccaccatcaaccacaagtacaggatcatatgatcatatcaagatcttaaagatttttttttctgtgacaaaagctagcaaatatccgagctgtactgctggaaatgaaaatcaaactgatccagaagagcaaggaaatgtccatttcattcacctcagaccaaggagcagcatgtctcaatccaaagatctctttttctcttcttgatatatattagctagctctaggtacagccttatggccaactgctgagagtgacaggtaaaatggccatatctgaacttctgaaggcatgaaggtgaagtggggaaaggtgtggacgatgatcttgtcaagctttgatgatggcttaaatcggttggagcaacggctaatgtagtaccactgtaccaactaagccttcaatgctgaacagttgcagacaagagcaaaagatgaggacaagcattgcaagtatgtgtatatgttcagcatcaatgtacattttttagggggccaagaagaatgacatgtaaccatgaattccaggctttgaaatggacattccaatgccttgagcttctgatgaaagttcaggtccctattgaatatatatagcaagtggattaaaggggtactgatgttgaaaaaggcgcaagcacagtgcccatcagataatcagatggcattgttcacttgaagtacaaaacaagttttatttatttttaccctgaaggttagaaatcatgatcaaatgatgtggggaaagagatagcgcaaaaatattaaaaaaaaaactttattgacaacataaaccttccccttttttttgcgagaaggtgccgatagtaggatggtataagtcctccagttgtgagatttttatgggttcagagatggtctgtgacagtggagttttcgtacgggtaagagctatcttttggagcattttgtcgaccttaaatgtaatcatttcgggatgtctctcccctgtatttgtcaagttcttctttaagtcaatgtttcgacatttcttccacaccactgataagcttctccagctgcagaacacggccatgaaatcaatgtgcaaccaactccatcttgacgcatgcatatatcgcgacctgaaactaactgatgagatgggccaacatgactgtccaaagttggcgccttctcagagctttttttttttttccatcggcgtgcatgcatacctgaacatatctgcacatgtcatgcatcatcaaccatgcatgtgaactgataagttctgataagttcagtgctcatgtggcaccctgaggaattaattaacaagatgatgctgattactctaaatcatagcagaagtgaagaacagcatgcatacctgaacatatcatgcatcatcaaccatgcatgtgaactgataagttcagtgctcatgtggcaccctgatccttggttcaaatatcaggaatcaattaacaagatgatgctgattactctaaatcatagcagaagggaagaacagcatggagtttaagccagagaatatgcatgggtgcaatttgcaggagtgaccactttcagatttgttcagaatttatagttctctagtcgacaagtgaccaagcacaatgatgagatattcgtagagttgtcctgaaggaagaactgcacgtttaatcctgaactgttattgtaccaacttatgtgatggccccggcactgtttacacaactaactggagacattttaggcagtattatgggacagtattagttgcaatgtgaagaaacattgatcagcactgaccagaaatccgagggtacactggtacaccaaacaaacgaaataaatgacgatcaagtacaattatgtgctacttgcaaaatgaagaagttagctcttaacactgcaaatgacagtgctaaagatggcacatgtgatccattgattgagaggatagtagaaaatattgagaaataaaaagagggactgctagaagattttttttttaaaaaaagaaagaaaccttcaagtgcagtcagataatgagatctgacaaatatagatgtatcagaaattcagagataaaaccaagaagtgaagagcactccatcagctaaaaattccacagaagatttattaacaataaatggtagatggaaatgaaaggtgaaaaaacgtagacctgaactttgccatcacaattttctagttacttaattcatcaattttaggtcatggtgatgaaacgatgagataatctgtgatagctatcttgctcatttgaagagccgttacgtgaccgaaggtgtatagtgattaccagtactgtgacttatatatattgccgtataatagtctcctcattacctgtcaactcatcagtgattgccaaaatgagttatactcttatattgaggaaatcttctcctttttttttgacttgaaaggaaagcttctcttttgtcagtttatatagaacatgtgcgattcggtggagataaacacacgagtatttacgttggaaaaaatgtctgttttctaacaataaaattttatgaaaaatatataaaaaatcaaccataaactcaaagccagaagctaatcaatcatgcatggacaattgaacttgcctcagtttaattataccaaaatttatgtatgtcccaaacactctacagtacactcgataatttcttatagactatattaactttttacgtgaacgcgtaaaaaaattacacattaatttgcagactatattaacatatggttccaaccttgctcggtaacaccaagtcagtgacatatcaccaattcaccaaaagctcactctagacgttgaaaaatcaagttttgattattcgtgatcgaatagcttctgatttcgatgttcaggactataaattctgcctcctttataatattgaataaaatcttctagatagaagtaggtacaaataggtatgctgatgcaagtaaagtcgtatcgatttgaaatacgatggttcatgagagatatgataagttttttgcacttatatacgaattttaaatatgcattattacatttttgaatataatatatacacacgtctctatatatcatctgtacacgcgagcaattgtgacgtattaattgttgtattttccatacgagaagatgcatatgcttacagatgaaggaagaaatcaacaccttcttgtaagtttctttagaaataccttttttttgtaagtgtatgaacggattgaagatgcattgtgtgatcaacaaaattcgaactcccgtcatgctttcaaagtgtccacaatacacgtaatacatacaccatgagaaaatttacccccaaacaattaaatatgatcatgcatcgcatatagatacctcaatatctcataccatcaatatcggtttggaagcgaactgagttcagttgtagtttgactctccgactcatcatgggcgctagcatttacaaataattattctctccatctatttttgatagtcatatttcatcttagcacacatactaaggataagtaattttacttatcatctatttaaacatgctactagttattcctcgtaaacaagcgattcattaatatttatatttctcaatgtccatttagccaatcttgtgtggaagaatagagagtcacgcattaaatccgagaaagtcattaagatgataggttgttggattgaaatgtgcctatcaaaaataagttttttcagatttggaaatataactatcaaaagtagatggagggagtaatatttatcaacaatgaagactcataggtgcttatgggggtaggataagggtaagatgcacgtgcttatacatgagtgtgtatttgtattgtttgtgtttcttaaaaatatatatacacttttttttcgaaatacgatacactatattatacatattggtttgggaaaaaaaatgcagatcacgagaagatatcaacctgtcgtgcattgatgatggccacacttgtacctggttttcgatcttgatcattaatcttgccaccttctcattcacacagaagaacatctgtttcagaagaaaagtagttcagggcaaacaccacattcagagaaacataaggtgtgtttaattatttttattgacgtacaaagcttgctggacttcatgtgaagtcgacggggcctttccatatgagatccatataagcatgtgattattataccacacatcgttccatctcaatcttccaaaaatcaaacggtgaaaggataccctaagtcgttccctactttagtaggtactagatagctagcaatcttactttattagcttcattacccccttaatcatgccatctgcaaagttggagtgccagttaatcaaaacaataccatttttttttgccagaaacacaatactatttattatgatggttgaaaatttttgctccgcttgaaaaaatagaaacacctagtctacgaaaattcctagtagtgtattcaacttgatgaagcttcaaccatctacgcgttaatggattcacctaattaaatcaggctaaaggactcctttaggatgcggaaattttcacattacaagcattgtacaatttttacaagagtcaactcgattccgtggagaccagaaaaaaaatcccgtgttctagaggagtatgcgtgtgttcttttatgttgcatagctgaatgatttatgataagtgttcaagggtacaaatgaatgaattaactattataatattagaaaattatttaaaatagtattttaagaaatccatatatataaagcttatgtaaaaattgtaccatttagaaactcgaaagcgtgcaatatttatctatgcatatttatgacaatttatatatatgagtgcatgtgtatcttttgtgctgaatgattatttatcataattaagtgtagaaataaacaaaataactattcacatatagatttttttttagaaaattgcaccatttagtaacttagaaaacacgcatatttatccattcatgcaaatcattcattggaactcaggaagtgaatttcggctatctattaagtgactgattattttcttatctatcaatcactttttaaacactaatcaatatcaacaattggtcttatgtttttctttcttgtgtgaagcatgttctaacctaaaagttaaaacttaaaaggatatactacctccattttaaaatgtataacattgttgacttttcgtataacgtttgaccattcgttttatttagaaatttggtgtaaatatgcaaagttataagttaagactataatttatttaatgataaaacaagtcacaacaaaataaattatgtttatttaatttttattaagacggatgatcaaacgttatgcaaaaagtcagcagcgtcatacattttaaaatggaggaattatatgttttgatgtaacttcttgcccatatgtaactagaaattgctatttatataagtaaataatacatccagattaatccaaaaaaaataaaaacaaaccaaactaaaagttccgctttctttttactgaagttacaatttgcaagtttagttgactaaaaaaatcgaccctgataaatagagctgaatttctttttcttcagcaaaattcctaaaagaaaattcagcaaaatcaagagcagccttggtcggttggccacacaaaccgctttctttcttctgttttttttttcttctccgaggtggactctgcagcgcacgtaggtacacagacacaaggctgccgcatgtatgcgtcatgtggcagccagagggagaggaacaaggcaccaaaccaaccatggaatggaagcaaaacactcctaacaatttggcgccctctctgtctctctctctctctctccccccttctttttgtgagaagcctcctcccacgttttcccgtctccttaactgcttctctccttcctctcctacacaactgtggtggttgcagcaagaaagagagagagggtctgaaggcagcaagaattcagtagcattccagctgccgtgggagagagggcaagagagcaggagaaagaattccagcggcggcggcggcggcggcggtcgtcggagaggtggagagatggatgtggagggtggtggtggtggtggtggtggcgcgccgcccagggggaggaattcttgggtaatcaattaagctttggttcttggtttggttctttggtctttcagttttgtgtttgatttggttggtttggtgcattttgtttgcaagtaattttgcagtgttactgcggattctgggatgagttactttgggtgcgggcgctatctcaagttcctcagggttaaattttgtagattttctgcattttgttctgaaaaaaactgaactttttcgaagtctatggcgctacaatttcgcttgaatctacttctgtctgactaggtgtttctgtgtatgcatgagacagagaatgctctgaagctaaggttgtagcggcgcacttcttttcagttctgaatttaggtggtaaagttggttgttttcagttaattaattttgcatcagtccagctcattagttgcagtcttgcagagtgatatgttatgctttctgaatctgataaggggaatccatgagttcaggaatcaatagattccatagacgagatggtatcacgaaatctttgtaatgcactgtaattttcctctttggtaaacgggtccattttcttacatatacacgatttttaaacgtagccatcaggtcacttttgatggtcagattggacatttcctttcaacttagtactagttactactacttcagagtttgagattttttctgtttactttgaatactatcttgttgcctatttcaagttactctttctagatcatcaattttggccagcagtaaaattcaaagtagtcaagtcgatactactgattagtaattacgtcatcaaatggtcacggacacgaaagcatgacacggtctgtgtttgctagggatggcagaaaggaacacttctactggcatatcagagcttcggagttgtgtatggcgatctctgcatctcacccgtgtacgtgtacaagaacaccttctccggaaaattgcgtcttcatgaggaggatgaagagatccttggggtattatctctggtcttctggagccttactcttatacctctcctcaagtacatcatccttgttctaggagcagatgacaatggagaaggtgatttcaaaaatccgcgtgtttttcgccgtattaataatttcaatgtgcatttagttaaatatatgccatttttgtcttgcaaatgtgccatgtatgtttgcaggtggcacatttgctctgtactcattgctgtgcaggaattccaagatgggacttctgaacaacatgcgtgcaaaccatggttctctgtcggcatacaacaaggaggaaccttgtaaggagtcgaggaacagcatgctcatcaaggccttcttcgagaagcattactcgcttcgtgttgtgctgctgctgttcgttctgatgggtactagcatggtaattggggatggtgtcttgaccccaacaatgtcaggtactgaactctgaaagactgaaactgaagatttgtggaagttgtatgctcaaggcacaaattttgctgcttgatcatttttttagaaattttagataatggaagtgttttataaaccaaaaatatatatgagcatattttgtatacaattgacaaacgtatatgatagagtaaggaactttgttttttaatttcttttttttaaaaaaaaaacagagagtaaggaattcttggggaacatttaaattgctttaacatcatcatgttttgtttgtgactgaagagggtggcatgttcttttctgcagtgttggcggcagtttctgggctcagaattaagtttccagaactacatgaaagtaagcagctgatatattggcttgtctcataaaggtttactggtcactcctcttagcagcacacatttaaattactcttattctcaattctttttcttcttaatgtctacttgcaccagaaaatacagctgatctgctcctgttacacttctctgcagattacactgtgctccttgcttgtgtcattttaattgggctttttgcattgcaacactatggaacacgccgtgtcggattcctattcgcaccaatcttgatttcctggctcacttgcattggtgggattggcatatataacatcataaagtggaaccctagtgtcatccgtgctctgtccccgtattacatatacaacttcttcaggaaggctggcaaggatggctggagctcactaggagggattgttctttgccttacaggttcacatatttttatccttttagttttggtttatcacttgttttcgttgtaacatgcttaattatagccgtagattttcaggtgctgaagccatgtttgctgatctggggcatttctcaaagctttcactgagggtaatatgattttcagtggtgaattggtgatagtttcagtcttggtagctgaaagagtacacttttttttttttgctaagaattagggaaagaaatctttacacttatttttttgttttgccatgacagcttggattcacaattgttgtatatccttgcttagttctggcttacatgggtgaggctgcatacctgtccaaacatagggaggatctccaaagtagcttttacaaagctcttccaggtgagatgttaattctcttgccagattgcttcaggttttccgctgctttttttttctcatcatcttttccaacagagagtacattgattcttgtaatattatatttatcaatcccttcagagtttagtatatataatatcagtagaatttgtgcatggcccatgtaaagcttaacacaagatcagggaaaatctggcccggcccagttatgccccaaaggtgttatgggccatgttcgggcagtattaagcacaaattcagccctaaacaaattcttctaatttcacggtacaaattcagtgtgtggtcaggactgaaacagaaggcctgagaaacttgggccaggaattttggcctgattccaatttccgtccatcgtttcgtctgttaatgaagtgcacatcattcttgtataactcactttcccttgtggatctgtggttttctattacttatattaccaaaaagaaatagtgtataaaggaagtagaaggatgtgaatttgtttgtgaaaggttaatgggcctttcaaggtcttagtgtatggaataactcaggaaactacaaatcggatgtccgattctcttaaaaaaaattgggtggttaaatatttcagttgaccaccagtgaaacattaagttatgcgtgatgaaaaaaacagccattgattttttttttgtgtgtgaaacatagtgaaaacacacgtttaaacatgtcgttatcgtgtatgaaacattgagttttaacagttcgaaacatatgttttctttcatcagaatataatctttgtgatatcttactgtgtgatcggatcataagtcagacaagtaatttaggagaaaaaaatatgttgaaaatcacaaaatacatacatgtatggatgaagtgaagagaacaactagtagactccaacattaagaatttattttcttggcaaatttatttaagtttgaaagctaacataaattcaaagagaattggtttaaagctaagcatcatttttgtcgagtataaacatgcaatatttatatcacctttcattaagaaaaatattcaaaaccatgactcgctatgagcagtagattttaatatttagattgaataattagcatgaaaactggtatgtgtgctaaaaggcaacaactttcgtgctagtgcacttaatccgttgcttttcagaagaacccgcaaatgtaactgaaatataagacctaaatactaaaccaactgaaccacaaatatgcactatattggatgatagccctagccgccgactccgacagttgagaagtgacaaacctttcgattgataatcagattatctgatgaaggtgtgagcataacaactcactcatgaagattactacttggagagataggcaagccttcagctaattgaatactcaacagtcaaaatgctattcgagtaaaaggaatttgttgaagacaccctaaggccttaatggtccctcatctgcctcgagcacataaggtagggaccagaaagttatacacgtagtccacaggttatttgtaaacctaatactatttaacgtaggaaaatatctatattaccctcaagtcataggccattgttgaggggatgttgtatgtaatttcttttgtaccctatctagattaattagaaaaccaccttagtgacaatgtaaagggggactatctttagaggaaaaaagttgtaacaagcttgtggtaccacacttactccccatcgaaggttaggggccttcaactcttgggccccttactctagaactcggaagtagacaggagacacacatattgtatatagtagtcctataatatttttcaagaaaaactagcggtacaacagttgtagtgaacgtatatatgtttaactagatgaataccccgtctcgttgctacgggaaattaaattgtataatatgtacaaataagatgcaatatattttctaaaccaaaacaaaatgacttcctatatatgttttatctaatctacacatggttgcaatataatgcaaggtgaacatattttatgtaattgatacttataaattttgagcctaaaaaaaattgatattgtatggtttcatgggtgaagaaaaaataaactatttgtaccatagatctatcatgctagggctaaaaataattgagatgatgtggcttaatgagagaagagaggaataacattaacaatacttattaacggggatgaactatataagtacataggattacatttccttctaatgcagcaattgaagttattcgacaccttctagttattttccagctagtgttttacatatctgtgtatgtttccttttgctacatatatatgcagaccgtgtgttttggccagtgttgttcattgcaacgttagccacagctgttgggagccaagcgatcatctcagctacattttccatcataagccagtgtagggctcttggttgtttcccgcgaataaaggtggtgcacacatcaagccatgtccatggtcagatctacatcccagaggtgaactgggtgctcatgtccctctgcttggccgtcacgattggattccgagacaccgagatgattggcaacgcctatggtaactagcacatcatttgcttcttcttttaaaccagactcttacacttgaggtaggatttggttaaacttttaaaactttgattaacaatactttcttagatgtttagtttataaagacaaaaatggtatacacaaattttccttgagaaaaacactatatactaatatcgtaaccttgttatattttataacttattccaatataaaatttatagtcaaatatttaattaaaagttgatcgaatcttgtcctttaaggctacaaagagtaaatttaggtgactgataaatagtaacaaccagtatatcaacacccattaattacttgtgttaagataaattttatggtccgtaagatatatcaagagataaattttgataccttctgataccggatatatcaagaggtaataaattttgcattagaaaatatgaccatacctccagataccttttcaataaccgtaaaatcactcagttatcttgtgttaaaatttgcaggacttgcagtgatcttggtgatgtgcgcaacgacatgcctgatgttcctggtgatcaccaccgtgtggaaccggtgggtggtgtgggcggcggccttcaccgtcgtcttcggctccgtcgagctcctctacctatcggcgtgcctcgccaaggtcccccatggcggctggctcccgctcctcctctccctcaccacgctgctggtgatgtccacgtggcactacggcaccgccatgaagcagcagcacgaggtccagaacaaggtctgcctggaccacttcctcggcctcagctccggcatcggcctcgtccgcgtccccggcgtcggcttcgtctactccagcaccaccaatggcgtcccccccatgttcgcccacttcgtcaccaacttcccggccttccaccgggtcctcatcttcgtctcgctgcagacgctcgccgtgcccaaggtctcgccggaggagaggttcttggtcggcaggatcggctcgccggcgaaccgcctgttccggtgcatcgtccggtatgggtacaaggagggcaggtgggaccacttcaacttcgagaaccaactgctgatgaaggtcgtcgagttcctccgccaccaggacggcagcggcggaggcggcggcgatcggatgtccgccgccgcctccggcgaggacgaggccatgtcggtcatccccgccacgtcgtcctccggcggaagcaatcagcacgcctttgacgccgggacgacgacgagctcgtgcgagatcgacgccaccgcaggcggcggcggcaggaggaaggtacggttcgacaacgacggcggcggcggcggcgaggaggaggaggaggcggcggaggtgaaggagctgatggaggagaaggaggccggcgtgtcgtacatgatcgggcacacgtgcgtgttcgcgcacgagtcatcgtcggcggtgaag

SEQ ID NO: 5703 - DNA, 22565 bp, Oryza sativa
taacaagagcttcaaaattagcttaggttttaagctgaagctgtgacaaattaaagcacgatcttgtaaaggttgcacattatatgttacactttcaccttcatttgcgtgattgcttccacgagcacgtctcctagctcgtaagcatggccaacactacaagtcaagcactaatggacctgatgaattagtggtaactacaatgttatgtctagctcttagttaattttctgatcaagaccgtagagtgattcaacgtacggcatgcacagtagtcgatcagggcgcccattttttacttgcaccgcaagccaaacatcgattaatatacgcttaccaaattgggtatatatagcaaagttagattagctcgttcagttaactaaaatgttcaaatgtcgatcgttcgaggaaatactcagcgtgttcacatattatgcacatggtttctcacttaaccaagtgtccagaccactgtacgtagaacttctaatcttacttactccatcccaaaatataaatagtgtgtttgaaagagattttttggtagcagatacgcctatggtagttcaaaacggctgcaagttgcagcgattttcaattgttggctgcagcaaaactggctatcgaacaagaccggaagattttggatggaagggatacactatacgaatccagataccctatctagattcgtagtattagtaagtgttctatctgtctaaaacgtgccccttatattttttagggcggagggagcatatatttcgaccgctgtagagcgaatgagaaaaaaaatcatcatttatcctcacattactctctccataaaaaaataatttctatagacaaatcgtatctgtttctttattagtagtttttttttccatgagacgatgcatgtttacttgaatgatgagaggtaatcactaatcacatctcgataagcaataattaagatgagcgaagacacgtttgttttggatttattctgtccaaacttctaaattaatttttttgtaaccgaatttagcaatcgaacttgcatttagggtatcacaatgtgcatctaaagtgggcagcaaggaataaaatactacttcctccgtttcacaatgtaagtcattctagcattttccatattcatattgatgttaatgaatctagacaagattcattaacaccaatatgaatgtgggaaatgctagaatgacttacattgtaaaacggagggagtactagttagtatacacagtgaaaatggtaagtaagtaacaagtactaggtaatatgcttattacctagttataaggaataaataaataatttctctcatcttttctcatggctagtgactgtggggtctagcttaccgtccacttttattctttcactaactattatgattacaacaataactaatacctattgacatagagcttacccttattcataaaataggtagtaaatattggtgatttccttataaaaccatatattaacactatgattctgtgatctgaatgtgatcagaagattataggatggacctggtcgcgctagcgagtggacacgttcatctacggctatccattatgttaatctgttccccacgaagtaagaacaatatcaaggccttgtttagagcatgtttaatagaatagccaactactagctccgaatcatctataactaatgtaatagtcaattcatacaataattacctactatactattaatatttggtcccacctgtcatatacacattacgtcttagagtccgtgctgcagctggctacacatctgtagcatgctgctcttctctctcttcttttatttttttaatatataagtttattgctggcttatagtctactattgtatctgctcttagttgggggaaatttttgggtttggtagtcacatcgaatatacagacacatatttgaaatattaaacgtagtttaataacaaaataaattcagattccgccagaaaactgcgagacgaatttattaagcctaattaatctgtcattagtaaatatttactgtcgcactacattgtcgaatcatgtcgcaattaggcttaaaagattcatctcgcaatttacatgcaatctgtgcaataagttttaatgactacatttaatactccatacatgtgtccaaacattcgatgtgacagcgtgaaaatttttgttttggaactaaacagggcctaactagatttttttttgaaaggagggcaaaagctttgcctcgtatattaatagaggagcaggaaaacaagagaaaatatgtacagggtcagccaaaagccaacccgcaaacggaaaaagttgtctcccaaaattccaaactcctgtagctttgttgctctggctttaacccaggctctcccttcctcttttatttttgctataactgaggcaggggtggaggctgtgctccgaaagattcttgcattacgctccccccaaatctccaggacacaagcatcagcagagttcgcagaggggctcgtggagtattaggggattcagcaataaggttccaccaaagtttgacggaggggcagtcattccatttactcaattggaggtcagtttgtgtccattgttggatttcggcccagattctcttagtgactctacatttggccagtaggtgcagggctgactcatccgttacacagcacagggggtagatcttttgattttgccagcctcttttccccaatctatccgccgtccaaagtctgttctgggtagcaagccaagagaagaatttgcattttggcggcgcccatgctttccagattgattggtagaaagcagatcttgccgctcccatgaattgcagcctatatgccgatcttgttgagtatttcccattcgccgttagattccaacgaatgctatcttgttcttcattcaacggggcattcttctaaccatggaccatagatggacaaactggcgtaagtgctccgcttctgtaatgcggaggatgtcgatatcttggatccaattattattctatatggcgtcatgcaccgttctattcttccgtttagaggctaagaaaatgttgggtgcaattttctggggcatctgattttccagccatctcgaatcccagaatcgcgccgttttgccgttgccaactgttatggttgttgccgccgagaagagttctttatcttgaaggctacaaggaactgacatccccacccacggtttgtcaggggctacccattcgttccaaagccatcttaggcgtaaggcggacgtgaaacgctgtagatccattactcccaggccacctagatcttttggccgacatacccttttccagttgactttgcatttgccgtcggaaatactttcacccccagcccagaggaacttcctcctgattttgtcaatgtccttgagggtatcatcgggtagtttcagagatgttaagtggtagattggttgtgccgtgaggactgacttcgttaagcagatcctagcagcagatgacattagcctcccttgccagggggctagtctggactggcacttgtctatcagcggctgaatgtggacctttttcaatctacctaccactaggggtagcccgaggtatttcattgggaagcttgtcaaagctgccgggaagatgctcgtgacatcagtaaggtcaatgttcccacaacgaatgggggcaatctggcttttgctcatgtttgttcgaagacctgaaactcctccgaaagctcgcaatatttctgttagattcgtcatatcttgtacactagggtttacaaagatgccgcatcatcagcataaagggaggttctgaatcttggtgctctgccgcgcaaagtagaaagtagcccaaggtttgttgctttctccagtaggtgatggaaagggtcaatggccagaataaagagcaagggcgacagaggatctccttgtctgagtcctctaccatgctttattggaattcctgggcaaccattaagaagagcccttgacgttgaggagattagcagatttgtgatccagtttgtccatctggttgtgaatcctcttcgttgaagaaggtcaatgaggtagtcccatctaaccgaatcaaaagccttggagatgtctaatttgagcagcaacgctggtgttcttgtttggtggaattttcttgccagattccgaacgtacataaagttatcgtgaatgctcctttttttaatgaaagcactctgagcctggcttatcaaggagcccatgtggggttggaggcgaagagcaagaacttttgagattagctttccgatgccatgaatgaggctgattggcctgaagtcgcctatgccttcagctccttccttttttgggacaagcaccacattagccgagttcagaatctgaaggttgttgcttcgcaattggtcgaaggagtgaattactaacatgatgtcctctttgatcgtgccccatcaagctttatagaaggctcctgtgaaatcatccggcccaggtgctttatccccaggcaattgttttaaggcagcaagcacctcctcttcggtgatgggcccgttaatcattgccaagtctacaggtggcaactgcagggcatcccaatcgaagtctaccaggcatggtggcgggcgcgctagaaaagcttcgaagtgatctttaatgatggccgctttttcctcatgcttgaatttccaaatattccccacgcggagccgttgaataaatttttttctccttcgcgcattcattttaaggtggaaatatttcgtgtttgcatcgccttctttgagattggtgatccttgaagcttgccttttgcgagctctttcaattatagacagtcccatgactctgtccttgaggccccgtcttaggttgagctcagcttgactgagttgtcttgactcttgtgctatatctaactgaaggatgacctcgagggccatgtggaggtgcatctttccttgggagatgagatttctgctccaagctttcagtctaccagctgttgcgcccagcttgtggtagagtctgtgatgaacttcatgatatggagggctcacagcccatgcttgagcaacgatctcctggaaacctggaaggtgaatccagtagttctgaaaacggaaggttctagcgcgcggcgcgtctccttgtcccgataataagagggggcagtgatctgagagcgaagtcgagagcacatggaggaggtgcttctcaaaggcggtatcctaatttgggctacaaaagaaacgatcaagtttgaccagagtcgggttatcttgctcattgctccaggtatatcgacgattttgtagtgtgatctccttgagctcgcaagcgttgagggtttctttaaatattctcaattgtcgcaggttaaggttggcattgtttttatctgaggccttgtaaattatattgaagtcccccactaggagccacttggagtcgtttctaggcttggtgtctcgcaattcttgtaaaaaggcttgtttcgctctatctcttgtgggcccgtataccacggtaaggaggaaagtggtttgacactcttttaggagaacagtggcagtgagggagaaggtgcctaggacgaagttagagaggtcgacggtgtcttcattccagagtaccagtatacctccacgtgttccaaaaggccttgtagctggcttataattgtaagaccgtaggtagctcccaccgagagatccaacaatagctacatcaatattactcatttttgtctcttgcaggtaggcgatgtggggcttcgccgtttgcagcgtttctctaaccgttgctcttctacccggtctatttaacccatgaacattccatgtcatgatgtcaactataggggtatgacataattagcaagaactctattattaaagcagaataccctaaaagattgagccccaagtagtatgaggttttgacttggtctacgccaatcctggattgggccggtatgacggcctagcaatctcaaagcgtatggattggttttgtgggcctccggctgatttaaactaaagtggcgagggggcaggccggcatcgcgcggagacctgggctggtgcagcgtacacgggctagcggggagagcttggcctgcttgggatggcgaggcagaccagttgggcctgtttggccaagttgagcccgttcggcctcgtcgcaccagaggcgatcttcttcgcaaagtcgcaggagccggcgccgcatcagcgccgcaggcaaccgttcttcggcagcacatcagagaatcagctttgtcgcacgagtgggaagagggcacgaagaaggtgcggaaatgcggcaccgaagaatcgctagtgggggtagagccacggaattgctgcggaatagggatgtttccccgaatcgaagtgccgtcgctcaggacattcacgcgtgtccattcgtcacgccactacaaagctagcaaatatgaaagatacatggagatatcaatctcctggacatggagcgcagctcccagatcatgtcgccgccgccagttcctccctatagcaggcgtccgtcggccccaggtacttcgcgagcaccgcgtccgccgcctttgcatcctccctattcagaccgaacagctgctcgagggcatcgatggtgtcttgcggcagtggtgcgttgaacatggctttgaagtcagccactactttgtcggtgagagttccttcctccggcgtcaaccccattcggcggcacaggttcagctgtgccttcaaccccgacggcaggccgaccgttggttgctgggctagtcttgaactcctgtgcctgtcctgtcgtggcatgggtggaggcggcgtctgcaggttcacgtcggcacactgcaacggtggcgagggaaggattgaggggtgtggagatttgaagaggacacatggcatcgccggaggtacctgagggaagtcgactgccgaggtagagagcatcggcgtgtgtatcgccgcctcaggttgcacagtgggccccagtgttgcttgcagatcgtcgaccgggtcatttgcagcagcctgtcgcgctggttcagcttgctcggcatttgcaggatcatcaagagcgagggtgtccgtcggcgccacggggctggcagcagcaaaaggagtgacgacaccccctggcgcaacaatggttgctggcgctgacagcttgtcaatggcaatcgcaacccagccgccaggacgagctggcatagggccccttccgcagaggccactgagatggcctcttgtatgcgcgagaagaccctcgccgcgggattgtagctccccaaccagcggaccgggcttcattcccgaacccacggagcagaggcagaggggagagcgatcttggtggctggaattcccccgccatggcaaggccaggagagatgtcgttgtcgcggtcgccacccccgagatcgccaggctcctcgcagatgtcgtcctgtctacggcgcccatcacgccgatcattgccgccacggtcacgagctcttggcgaacgcgtgcgctcccgtcggaagtgaacatcaggctcccgcagcccgccgcgtccttgcgcaacgtcacggccatggccgcgctcctcatcgtcatcatcatctcgccgccacccagggccgtgaccggcgccggggtggtcattgttgtatcttcccctgcgttcccggcgtctgtcagcgttgcgccgcacatcccggtcatcacggcgtccatcatggtcctctcgacgcctatcacgatccccgtcgtgctgacgccatccgccatccctggcggcagcttcccttgccgtcctgcttccttggtcgtgtggctccctcgcgagaccggcattgtcctctacgccctccgcccgcccctggcggaaagcataggtcgtcggcgttggggggtggtgagggaagttctcgaagaggcacggcggagcccgttgtccatcaagaacgcccagatgccacggagggagcgtacgtgtcgctagcctgcatgacttcggattgcggaggtccaccgccgccgccgtgtagtcgtgaatctcttcaatatggaacaacaccgggtgcttgacgccttgctgccagtgctccggtggcgtctccgagatggtgactgactcaagtagggggtcacgggtttgacgcgtgattgtcacccacacgcgcttgtcgatgcggctcgggtttggcatccaagcccatagggagatcaccctcgtgtcgccagcgtccacagggtggacgaggtccgtctccactgactccagagtgcaggtcctgctgatgatgcgctcggcgatgtccggcgcccacaggtgcattggcacgccatcgagacagagcttcactctgtacatgagggcagaaccagcggcgttcttcaggcttcgccattggatgaaatggacttctatcccttggcccttagcaaaacctttcttcacagcttcttcacagtgccggtgatgtttgaacttgaggaggaaggcctcccggaaatgcagtgacatcgcaatctccccagaacgcaggccgaactcatcagcgaggacacgctccacatccttggcggtgacagacggcggggcgcgcatcgcccaggtgatggccgccgtgctctcctattcccgcagctccgcgtcgatggcgtgggacgtcgggatgaagacgatgtcttctaaaggccttgtctcggggtcacccagctgcgccatgatgcccgaaggcggcggcggcagaaggatctctggtacttgacgccggtgaagcagaggcagcggaggcgaagaaggggtggaatcacggggtgttggtggagagcatcggcggcgaagtgtggttggaggaggatggcggaggagaggaggcaagggcgaccgggctctgttcttgctgggcggtgggcgagttggtttgggggaggggcagaccggggggcgaaaattgcagtagcgcgctctatggctagagcggttgcacacgaagcaacgaggcgggtcttggcacaccgaggcacggtggtcgcgagcgaggcacacaaagctgcgacccctggttcttgccttgaattcctccagcgagagagccactctcctgccagtaccgcggccttgtcgccatgaatcgggccggtggtcgggacttgaatgttctccccctctccgcctgcgacaggatctcaccactgtccatcccggctcagggggtgtgaatgctctgtgcagtgtcgtatacctaggaggggagctccttctttcttccatctcataggcgcggcggtaggcatcgcgtcgaggcgacggcatagtaaatgtagacttcaattttgcccgcggcggtggttgggcgggaggcgagcttgcgttgactctggcgggggagaggacgacctcagcaaacgagcgtgggcgagttggagttgcaaaggcaagggtgacgctggtcggtgaccaggtggagcgagctggagtcgcggagacgtgggtgacactatccggcgaccatggagggcggcgggggtggtggcgtggcctgccagaacttactaggggagggggagcccatgctgcggctcaggggaggggcggactgcggccaagagacggcggaaatgggcgcccaaacctgcgaccggcggagaagcgtgggcaccgtcggttggagcaccggcggcggcggtggtgaagcgcgctgcggcatttcaaaaaaatatgtgaagtggtggtaattcttcatagggcctaactagattatcctagctactagtgcgtattaggagctagaattaattcgtgcctagctgggttcactgtattttgacacatgggtgtttcttgcaaatttgatgcacccccgctgattcgtccacatttgtacctggagaggcgttgtgtggggcccacatcctagaacgcagacgggtccgtgatgtgtggggtgacacgtatataactcgagtcagtcaagctattgactctttctgattttgttttccttcttctttttcatgttattattgctgtgaactactactagtgagcatgaggtttcaacttcctacttctagtatttactactactaggggtgtattatgtttacatgtataagactagttctagtttgaccgtatgatagtacttccttcgtttctaaatattaaataccgttgactttttagcacatgtttgactgttcgtcttattcaaaaattttttgtgaaatatgtaaaactatatgtatacataaaagtatatttaacaataaatcaaatgataggaaaataattaataattatttattttttaataagacgttaaacatgttcaaaaagtcaacagcgtcagatatatgcaccagcggtccttaaacttgtcaggagatttcacttaggtacacgaacttgcaaaacgcacatcgagctctctaaacttggtttattgtatcatcctggtccaaagccgcatttgaccgtggtcttacctatgtggcacgccacatggacgatgacatggattttttttattttttcttccttcttttttctctttcttccttcttttttctcggcggtgacatgcggcatgaggggaggggctgtcgtggtggagaaaaaagaaggaagaatgagaaaaaagaaggaagaagggataaaaaataaaacaaatccatgtcatcgtccacggccacggtcaaatgtggctttggaccgggatgatataataaaccaagtttaaggaccttgatgtgagcattgcaagttcgtggacctaagtagaatctcctgacaaatttaaggaccgttggtgcattttactctttagaaacggagggagtatgatactatgtgtagtcaggtggtactagatcggtataggcttcgagcttctaacttccaacttttccgtcactgttaacagtgaaatttggtaagcccggagtagtcatcggcttagagtcagaatcggcttcgaagtcctaagattagttgatgagagttatcaagtcgtcagttgtcggattcttgctatattcggttaaggaaattgatctactaaaggaagtttatccagaagagatagagttcaaagagaatgcggcatggcaagttatctattaattagaaaattaggaatagtctgttagttttcttttatatttaggaaaatgtgtttagtgtcctataagtactttatgtttttcttttatctttagtttctttcttgtctgacaaggactggtatctccctataggtataaatatgtacacccagggtcattgtaatctatcaatatatcgatcaataaaactactctcggcgcatcgccaccctctataccgaggtttttacttatcatccgacggaacttggcacctaacgcggggctgcatcggctttcgatctccggcaaaggggtaagtcctacgttccactggccctagtgaatttgttggctacattggtgttgttcaaggctgcatcgcttcgatctcttggatcgctctggtttggttgatatatttgcctacctgatatctcaattctatctctaattacattgtgtttagagacgcatcggtttagttggaactgtctcggttaggtccgatcttctgtcttagccgatatatctctacaatcacaatgttgttctaaatagatttgtcatatccatcacattagatagatctatcggctcatcgagtattagattatcatatacaatctcgtgctgcatcggttaggttcaacctactagattgttattgataatatgaatcttgttaagccgataggttcatgctagtgttttatcggggtgctagctgataaattatctggacgttgcatcggcttataaggatttgcatatacatataagttggatttagtcgatgacaataaaggtttcattgatttatctaattgtttggattttatgacatcggacctttagctgatttatgctttaaccttcggatcaatgcttattctatcatattgtattgctagccgattggtttatactggattatattattgttatactatattatcatcagtcgattgcctgtatatcattattaaagacaagtgtcagactatacattggacataaagccgatagctcagaaccctatcgctatcggctagcatcggctatcggctggtatcggcatcggctggaactacaacatcggcttgtcagccgatcggcttattgatctactatttgcatatcttgtcagttgtagggtcaaactgactggcacgcctacatctcagtaacctttggacctgcactggagttaagcagatctcctaggccagtgtgtgtttttcgcatcaacagtcacatcaaatgtttggacacatgcatggagcattaaatgtggacgaaaaaaccaactgcacagtttgaatgtaaattgcgagacgaatcttttgagcctaattacgccatgatttgataatgtagtgctacagtaaacatttgctaataacggactaattaggcttcgatttgtctcgtagtttacaggcggagtctgtaatttgttttgttattagtttacgtttaataatttaaatgtgtgcccgtatacattaaatttgtttttgccaaaacaactaaacacggccatagtatcctctatcctggatggccgccatagtatcctctatcctggatggccttcttgtgaagacgccggccatcatcaacggtggagtccaccaacatagctttggagcttgtcactagcatccatgaccgattctcatgtccttcgcagaagtgaaacggatttcatcaacaaactacacgagcatatatagtgttgagctattgatggttttttttatacagaagcaggacacccggtgaaggggcccaccttgctctcgtgttgttaggagttgggcccatcccattcgactcccgtcccctatcattactgttcttctaagacgcatctgatttaggttattgggtgaactttatgataagcatatttctcgaactgcaacgatgtttttttaaaaaaaaaactttgcgtatataaatgtatttaaaaaatcaaataaacccatttttcttttttataatagctaatactccgtatttaattattcattcgctaatgaaacgttgtgtttttttcaccgatcagctcagccttccaggtgaagcgaacagtgccaagccggtagtgaaaattgccttatttatataaaaaaaaagtaaatgtgaatgcttaatttggtttattattgttttgtcatatgaaatagggctttgtctactgtcctcagaacagtatcgccgtcgtacgtagcaaatgaaaaatcaggatttgctaccttactgggatcaggccgagtttagttacaaaatttttcttcaaactttcaacttttctatcacatcaaaaattttctacacacataaatttttcaacttttctgtcatatcgttctaatttcaatcaaacttctaattttagcatgaacaaaacacaccctcgatagactcgaagtttcagcttaatttggtgcatggtcttgaccaattgacaagccggaagctgaagctgcttctgtatgcctcctggacagactacagtgactaatagaacatggtttctgtctgaaaccgacacacttggtcgcctcccaccggagtattttaccattaatgacctctcagagaaaccaatttataattaccatcagcatgcaattgttagttcggatttgtatataataaagtacgactaaaagtttaagataagagagaacctctgaagtctaatcctttagttgggagattttgaaagctattgactcacagacttggtcaagcagcctaaccaacaactctaggcttagcactgaagcttcttcatgacaacataatgagccccagttgatattatctgatgtccagttactatgaacgatttgatgttgacaacactgtcgtatacgtatagttagtagatatttagagcaaacaaaacttgttttttttttcaagggagtgaatgagtgatagggaggcagacacaaacagataaacaaattgcagattaaagaaggagtactaacaaacagattaagacctctttattcgcagccggatcgaaatcactatcgtcaaacatgactacatcagcatgtatactcgttcgtcgcgtttgtgttcaattgctaaaaaaatccgtcccagattcgatcgattcgagcagtaaaatatactccgtatttgtttgacctcttgttcccgatctgtgtacagcaagatgatgcacgtacggtggcctggcgactgcaaaaaccacaagaatttgagccgtctctttcgttcttgagtctgtcaaagccgcggtaattaagggcaggtagatggagcacaagtcacattgatcagcttgcagttttttacctgcgccgaactgatgcgtcctgttccccgtacaggccacaccattcaccattcaccattcactgtactgtagcacttataactaatcatggataattagatttaaaagatacgtctcccgatttacatgcaaactgtataattagttttttatctatatttaatactatatactacctccttccttgaatatttgacgccgttgacttttttaaacatgtttgaccgttcgtcttattcaaaaacttttgtgaaatgtgtaaaactatatgtatacataaaagtatatttaacaataaatcaaatgataggaaaagaattaataattacttaaattttttgaataagacgaacggtcaaacattttgaaaaaagtcaacggcgtcaaacattttgagatgaatggagtatatatcaaagattcgatgtgatgtttttgaaaaagtttaaaggggaaaactgcgccaaagtcgcaaacggcacaacaccgattgatgaaagcgtacacatatccattacatcacatgcatccacaactacaaatgcacaattgaacatgtctagctcacctgcgtttgagagggataggtatcatcaggtgagaaaggcttgggaagttggcttgctcacttcggtttgggcttagcaggccacgtgggaaagtgcctgcagtggccttgtttgttatttggcccacaatccaacaagggcctaggcacccccccccccccccccacccaaaactaacaagatcgctaccgcctggagcacaggcaaacgtacacacgccatgcgctgcgggggtatgcagccaacttgcgagagaagctcgtggtacatggacgtagtaccagtaggctcgatcagctgcacacgggcgcgtgcatatgtgcacgattgcacacgtacaccaaccaattgggagaaacggaagtgcgtagtggagaatggtcaatcggaggaggagggaccaacggtcaaaaggatggacaatgatgcgagaggggtgtgtgtgtgcgacctgaccacccctgctgcagctgagtgcacagctaagctgggggcgctgcctccctttcccctgcaagaaagcccagtaacccgtgggggcgcagcagctgctgctgctcactgcacaccaatcgcaaccgtcattggaatgggctggaccacctccctccccttctctccattattactgcctctttctccaacacgtacaatactcctccgtgtatgtatggctgtatttagttggatccaaagttttgattttggttaaaattgaagataatatgactgaaaagttatgtgtgtatgacaggttgatgtgatggaaaagtactgaagtttggatctaaactttgaatctaaatacagcctatgtactcatcacggctgcttctgaatctctgcttcatacaagaaggtgtacgtaacgtacgcaccgatccatctggatttggcctgcaggttagcgtcgtacgtcgtcccgtgccgtgcgcgcaggttgggtggccaatggtgcgttggtcaagcgcacgatcgatcggtgtccaaacacacgggacgtacagagagaggcagtgggtgcatgtggcaggggagacatggccgcgccccagaaacccaccacaaaaactaatcaatcgtgcagagatcgaatagctaaaagccatgagccagtagccgcgcagtctcccgccgctattattgatctcctttcgtctccatcggttgatcgatcgatcgttgccgggaaaagcttgctagctgctcgcctgttcggccccgcccgacagtagcgccatcttttactactactactactaatcggtccatcaattcggtggatccagcacaaaaaaagacattagcaaatcctccaaaagattggcaagaacgttagctagatcttgtgttttctactagtaagtcacaagtttaccagcatgttaggagttgcatttagccgccgtagtacagtacgtagttcctaagcctcagtttttgcctttgtctttttttttccccttctcttaccataagccggtctggctgattgcgttgtgtaaaaaaactatttttcttctaatatattaacgtgcaatcattttgcacgtttgcgaaaaacaagtttaccagcggtcaagctggctagttttggtactaatcttgtacgaggtagggttgtgtacagattcataatttcagaatgtgcggaggaagtaattatgaacggttgctaattaaccttgatttgtacttgaacctactgctactccgagaattgtaaatctactgtacagtgtatatattgacgatggatgagggggagatgtagtaaagagtgtggaaatggagggggctggtgatgcagtcactaagctagaagtagctcgttggttggttggttaggttgcatgtggtaaagctgacatggatgtaggggaaagcggggtcgagagcggacgagaccgtcagatcgatgcgcagaagtggtgctgtttgtgatagattccgcaggtttcaggacaagggcatatgcagcgagttttgctcttgcaacacatcaatcattggggaaagaaaaggagggagcggtgctttatatgctgcgagtatagtagcggtggattgttactgccattgctcgttaccgctgcccctccgagagtagcaaaaaccacgacgcaaccaagcggtttttcttgctccgagttggtagtacgtagtgatttgttattacagtcattgctcgttacatctgttcctccaagagtggcaaaaaccacgacacaaccggatggtttttcttacattcggaaatctcaccgctacatgagtagcagtattagtaaagctagcgttgtgatagaacctagacaatgaagaattataacttgttatctacaatttttctgtcagtcatcataacgcgtgtcagtgtttatgttgacaatcatcctgacgagcctactagctggctccaacactgttatctagctgttatctctcattcatataatagtggtatgttagttgtaataactaattggaagggactgtagacaggtttgaaaagagagagaccttggtgagagagctcttgccgaagtacggaagtttgtgagaatctcctacaagacctatgatagacttatgtaattaccgattctcttgagaaaatttggggggggggtgtagctaatgaaaaaaaaaagtgtacgtgcggtacttaaacttgtattaattaatgtgtcatctaggtccctaaactcttaaaatgaatatccaagtcccagaacttctcatagtatgtcatataagtcctaaatcgtcacaaccccttcaggatcctacgtggcgttgacgtgtcatgccacacggaataacgtggcatcattttaactgacaaataggtcctgttaaaaaaaattcctttttctttttttcttctctttttttccctttcttctcctttctctgtgacccaagcagaagaaaggaaaaaagaaagaatgagaagaaaacgaagaaaaagaaaagaagaaaaaaaaaagaaaatggcacgtcacatccatgtggcatgtcacatcagcgccacgtaggatactagaggggatgtgtcgatttgggatctaaatgatacactttgacaaattctgggaccgggatatatattttgagagtttagggacctatatgagaaaaccctacaagtttaagaaccgcaaatacactttactcataaaaaaaagttggctcgatcagttctcattagccgtagcagtgatggagctaactatgtacgttattgggtcttaggcaatgaggagctcaggttattgatcaatatttttttgtcgattattcatggtgcacaagacaattcggtttgccgcctcaccagcttggtagcatatgctccttttctttttagagaaaaggcagacgcccagcttttcataaagcataacagagagtacagaatgctagggtttccagctttacaagaagcaacacagttcaaaataaaaggaggactaatgctgctggcacagccaaacaagccagagataaagcaaagaaaacaagtccatagaggaagcagctttaagatcaggacgccaaatcttctatttttgcctaagcctagctgatcaaattgtgctgtctccatttactccccatagtctttgttgtagccatccttcacagatgcaaaatgctggggtttccagctttacaaaaataacatagaaacaaaacaaacgatgagcccttgctattgacacagccaaacaagccaataagacctcatgttgacatcatcatcatctgttgttgtctccgagcgcgaggatactggcaagcagtgagctttgtgccgtctccaattctccccttagttttgctggagccatcttcctccactgaattgcaaaagatagagctctgtgaggcaaagtcataatatctttcattagacgattattaaacacccagtcatttctaattagccaaattgcccagattccagcagcaacatatacccacaaagttttgttatctacccccctctgatgttgaatgatatcgagcattttacttctgtcagtaggaattctatcccacccaaaggcatctctaaaacaacaccagagaaactgagttggtgggcatctgaacatcaagtgatccacatcttcctctactccacacagcttgcataaggggctgccaggccacttcatttttttcagttgtttagcaacttggattctccccttaatcattaaccacataaaattttttatttttataggcatcggtgacttccacaaaatctgaagctgagcatctttaatgcccccaaaaaccatctctctatataaggactttgtagtgaactttcctgacttttctagcttccaaagcatcaaatctctttctgtcgataattggatagtagcaagctttgcttgcagatctgtccattcagccacctcctcttgggttaaggtccttcgtagattaatttcccagtgccttctttatacacttgcttaaccgtcatccctggatcagcactgatgctataaatgtatgggaacatgatttttaaaggaacctcccctatccagatgtcatcccagaatctgatggccgccccattacctaccacataggcactgccaaggttcatccatcttttaacctcgtgcagacctttctaaaactgggagcccccctcaacagatgattgaaagaaacctcccccattagctagatatttgtttctgagaaggttgcagcaaagactatcagttccagattccaacttgtaaatccacttacaaagaagagcctcattcatgattttggtgttgagaaaacctagtcctccatcctctttgggtctacaaagagcctcccatttaatcatatggtactttttctttccttctaaaccatccaaaaaaaacctcgctctgatagcatccattttgtggtgcacttggtctggtaataagtagaaacccatcatgtacatgggaatactacttaaacaagagttgatcagtatcgatttacctccataagagagaaaaccacatttccaggtagccaatcttttttcaatcttcgcgactggcactcctaaatcttttgctgtcagtctcccctcactaacaggaaggcctaggtaaaaaataggtaactcccctcttttgcagttgaagagatcagccacactctctgtgcttcctgttcctctgctccaatcacaattacttcactcttttggaaatttatcttaagtcctgacatagcttcataacagtataagagaaatttgacagttattatgttctcctctatgtttgtcatgaaaagtatagtgtcatctgcatattgcaggtgtgtcagccctccagtgaccagatgtgggactaacccttgtaagtgaccaccctctttagctttatttagcatctcagaaagagcatctgccaccaagttaaacattaaaggagacaggggatccccttgtcgaacacctttgtgagtcctgaaaaatttctccacttctccatttatattgatagccaccctacccttagttgtagcatctttcatccagccaatccacttttcacagaagtctttcctctaaagtacatcaaacaggaagtcccaatgtactttatcatatgccttctcaatgtactttattatatgctccttttcttttggcatactataagtaagaaaaacttcattgttcctaattatatgcaaggaatatataggttttggtttcatgtacctttattttaaaaactcctatgaaaatgtgttgtacagttggttatctacacgcgtatgaccgaacggtgagtgagattctagtgtaatacagtaattttcagcgcttttgttgtcaatattattccttaactaccttaagcctatattggttaattatctcagtataaatgagataaaacatgaggagtaattgcattggagcatatataacgtgttggtgccttaatttgtcgttgcaaattaacatatgacaaccatgttcacgacgtactccctccgtacttataaaggaagtcatttataaaaatgtttaagtcaaaccttaagaatataagtcatgaataactctcaagttgttgagtttgaaaatataaaaattatatgtatagatttgttttgaaaaatactttcataaaagtatacatatatcacttttcaataaatatttttataaaaacaaaaagtcaaagttgtgttttggagaccgtgtcgctgttctaaacgactttctttacgagcatggagggagtactaaataccccctatagattcacacgtgtgacagtgaactgaaccgcatgcagcaataattaaccagacgtgccgtccatggacgaaacaacagtacatggcgggcaactgcgcgctgtaaaaagccgtcaaaatgtagcccccaatgacccgggacggacgaccgatcagagaacagaacaaaaacgtggagcaatgttgatcgtaaggtgattgtgggctcgatttatatatcgttcgcatgcgcaaattaattaaagtggccatacatatatcagcagctcgtagtacatgttgctgggccatgcatggagaacgatgatcacgggcagtaactccaaattaatcaagcttgcatacacatgtacgaatattgttcatgtaatgcaactatgcaagtagatacgtacgccgtatggttcagcagaaatataatcggctgacaagtctgtctgtgcactctgcactgagagcaacagggagcggatgtggccgtgcgtgcgtgcgtgcgtgtggtcaccgttgcagtcaagttgacgaagttcttcacgggttgcccggtcgggggagcccctgcctgtgccgcccgggaccatcgatccatccatccatccatccatccatccatgcgtcgcgcggcgccctgtacgcctgtacgcccgcgccgcacgtacgtacgtacgcacgccatcttccgtggtccaccacaccgcccccgcggtttggttggataaccccaacacaactgcatgcggcctcgtgccaaaaacggcttctcccacaggaaaaaacggtagaaattttcctctcctcccggatcgcgacgcgcatgcagccgcgatggggggagatggcgcgcgcgtgctacaccggtgcgggggttggtgattggggaccacggtggttttcacgtacgagcgccgctagctagctgtggaagtcgatcgggataggggaggggtcgcgccgtcgccgtgtaggggtgtgcagctcgatgattgagttgtgtgtggtttgcatatgcacctgcaccaattattaattgtggcgcacaccgtccagttatatgcatgtttcgtacctgggtaaatccaactttggattcgcttgtaccacgtgataattggtgtaggatttggcaccatagtaaacagcactagagcagatcagcactgtcattcacattagcagaccgg

SEQ ID NO: 5704 - DNA, 42532 bp, Oryza sativa
cggatggagcagatatcactactttccttgcaccaccctatataagccagatggaatctcagcattttttgcatgtgaatggcttagtttattttctgattggccagaggggttgtgtaaatgcagaggcaaacctttaagtgtgctgatgctttctcagttgttgtaaaaacaccagatgattcaacaacatattcagctccaaagtttccccaaggaatatctgagggatctctgaaatggaaaggagaagcaccaacaaataattttagcaaaactaaagcacgtgggagaattattacaacccaaaactatataacaagaatataaggagtcaagtatgtcaaaagtacaatttttaaacaaaaccgtggattcaaccagacctgaagaattcatgttcttaccttttgcttgtaactgaaattttcttcccattaatctccaaggttgactcatccacaacctttatggtgcctttaaatggaccatgtgtcgaatcatacttgaacatataagcctagaacaagaagaatatcacgatcaaagaacttgaaatagtctaaatgaaacatatgaagttgtagcactcaatacagttatgttcaaaaacagtttagtaaaggtgaacctgtcaattttctcattaagaataattatggttatctgaaattaacaaaatagtaaaaaaaaaaaagtgaatagcatgggttgggttcgtgttctcatgcaagacacacctccagcatgtaaaggaccttatataggaatgccttttctctttaagatcttatgtcagataatgataaacaaagcatgtttactaagttaagaagagctaaagagtacttaggcatattatcatattagagtaacaagcatttctactcaacatgtttacactgttatttgtagaaataatataaagatacattgaacatcatcggttccactgcaacaggacgtaatacatactgtgcttttccaaaatctatcaacagaacttaccatgtacttagcatcgataaaaggatcattaacagccacaacttcaatgtcatctctattagttgcaattcgtagaaccaacctcccaatccgtccaaatcctgcaataacaagaataaagagttcctttacaaccaaagactaaataaagatcaaaagtaatttaaggtcacctacagaagcaatgaagttgaacaagggttcacttcaacgttccaagttgagttagcatagcgcaacttccaaatagtaatcatacattacaacaacttgataatgtcattatttttccaatctacaggaggaactcaccattgatgccaacctttgtcttctccgtgctagaagattctacataaagaagaaaaaaaaataatcataacaccactgcagtcctcataaaccccttttagtgtttgatggatggagcaacttacgatgggtggcaaggggtgcttgtgtagcagttgctctcaccggctcaacgctgctagcactgcagtagaaaagcagtttattgaaaatgcaatgtgctacagctaatactgatcaaccgtatccatgatatgcacagagcaaaaaccacaaaaacacaagttgagaaaacgaggggtcaagtccgttttgctctcagaaattttccgctctaaccaacagctgtgctctcggttgtcaaattttgttattcaaggaattcgaataatctggatgatggaggcactcacagtgaagacgaagccccaacggaaggaaaaccgcaggtaaccttgctcctaacgcacgacacctgcaacacagcagcaacatcgatcaatttggtggaaatttagcaagtttcaatctgcgaaatcatggctaaacaaacgcgaacgaatctcaactgaactcggaaaatcaagcgaaatacaagcaattaaagtgggaaacagctgagtgttcactacaatactccattactcctacacatagaaacaaaaacatcgccatacgaacaacagtttcatgcgcatgagttggcagctgtcagtcacacgaaacaggaacaggttctcaccgaagagaccaaaaaaaatcagagagggagagagatcgggatggcgaatggggaccttgacggggtcggcggcgcgtgatccgccgccgctgccggtgccggcgatggccggggtggcggaagcgcggagggggacggcgagcgacgccatgcaggtgcggcggcgctggaaacttggcttcctctaaggaaggcggcggaatggaggcgggggcggaggagacggcgagcggagttgtgcggcggcgggggtcgtcgtcggcggcgtggttccgtgatgcgtctcccggtatctcggcctcgggcggagttgtttatggctttattattacttgtaggttttttttctttctgtgcctcttttgttttatcgcctcatcttttaacttatacttatacttataaacataagctacaattaaaatttttaatcttaaatttaaatttaaagttgattttagaattttttttaatttccatcctagtttatttttcagcttaaacttttaatcttttagatttttagattgttaataacatgtatataaaaattttatttacaaactattttctatttgtaaatatgttatttcacaaaactatggagtccttagtttgttctctctttacatttgaaaaacgtgtgaaaatatttttattgaggattgactccgataatcatttacagttaggatcgggtatatctatcagacactgttagtacagtacaggtgtagttttgcaaaggatccatatcagtaaattttggaaggaaaaaaaccaaaaagagaagtcacgtgcttttcttgtgaagcatctactacacattttgtgagcgactcatgcattctgttgtaggttcttcaagaacttcgtatgaccatggacatttaaaacttcgtatttcttttcccttgtgttcgagaatatttggaaggagttattgctcctttcggtgtatgaaaacagcaaagaataagaccaaaaacctgcatatattaaaagcgcgaggtttaacgtgggcctacacgaataattgcacagtacctttcacgaatctacggtttgtttggtttcggtcaggagacggatcaggcgtcgcgaaacgtttcgttgcatccgtccgatctgaggcgaggcgagcccggcccggcccggcccaactgttcgtcggagctacccgcctgggggcccaccctcagaggcgaatatgccaaactttgatgcggacgagtccttccctgtgtccgccgtctccatcgacacaccccaaaggcccaaaggtgaccccaaatactactctacattttgaaactgtggggtaaatcactcaatgtcttcacttagggcctgtttacttggggaaaaaaaaattttaggtgtcacaccgaacatttgaccggatatcggaagggattttcgaatacgaatgagaaaactaatttcataattcgtctggaaaccacgagacgaatcttttgagcctaattaaaccatcattagcacatgtgggttactgtagcacttatggctaattatggcctaattaggctcaaaagattcatctcgcaatttacacgtaaactgtgtaattagtttttctttttattttatatttaatgctccatatatatgtccaaagattcgatgtgatatttttgagaaaagtttttgggaactaaacagggccttaatcagactatagaggtcctgtttagttccaaagtttttttttctaaacttccaactttccatcacatcaaaccattcatacacacacaacttttctatcacatcgtatcaatttcaaccaaactttcaaacttcagtgtgaactaaacacagccagaggctcttttttttccctaataggtccgctagttcaatcccaatagctatgatccttccttttaaaacatggtataaacacacgtactcacaacacgagcgcactttataaacacacagagacaaaacaggatgtgaagggagattgtgaaacgagacgaaacgatggtcgggtaggcaggcgccaggcgcgcgggagaacggttggctagttgaggagggtgtgaaataaggatgttataatttattattatattgtttttaaatatacatgtaggacgtgacgtttgactatttattttatttaagattattaaatattgaaaaaaataagtcattgctgaagtatctttgatgacaaacaacggattaatacttaaatagattttcaattagactaatgataaaatagcatgtctaaatatactagcttcattttctaaccatagttattttctatatgtccagtgtaatacttaattatcacatcaatcacgtatatgtaaatattttccttatgttatctcaaacaaagtttcctcccaaccttcatttaacgggtagcattacaaattatgatagaattatcttcaaaaatattgtaagttttatagtgggacacttttaaatataactacattatatttataatataattccaccacaactatacagtaactacaatattagttgtatataagtataaaaaatatatgtaaatttatacctaagttatatgacaacatatcctatgcacacagtccttcacgtgtacacacgtgcacaccaactaaaaaatgtcaccaaaaaatctagaaaaatcatacacatactttcaattgtattacacttagggttaaaatcttaacgtcaaattcattatattttagccataacaaaaaaacaaaaaatctgacagttttaaggttgtaattttgtcagaattttatcttttttttattctctatgtagaatgaatttgaagatatgactttgcacgtagatgtaatactattaaaagtacatgtatgaattttcctagaattttttgtgataatttttagttggtgtacatgatgtgtacacgcgaggacctgtgtgtataggatacgctcccaagttatatagcgattataatgtaacaacagtataattacgttgtagttacactacttacattttaaagctttttgcgacagtttttagcaatttttttgttaaatcctaatctcacttaaacaaccaaacaatatttatatttggaaactgagagagcagtatcaaagcttgccttgaagtcaaattttgtatcaaataatcgcccgtaattacgccgtgccgtcaatcaaatctggcgagagacgaagcgaagcgacgcacaaccaccactccaccagtgcgcgcgacttccgagacgaaccgatctgacggacggagagaacgccatcctcgatccaacggcctagatcctccctagcctcctccgttcccgtgtcactataatggcaaggcacacacctcgtgccacacacaaactgcaaccaagaactgccgccgccgccgccgccgcctgtgacctctcctctccctccggcgacgtcggcgaacactccgtcaccgatgggcagcgcccttttctccaccattgccacctcggtggaaagcctccgcgtcaccggcgccaacgccgacgtggacggcgtcgccgcggagaagaagccgccccgcaacgacaggaagaggaagaggaataagggcgcgagcgggaggacgtacgaggagacgcgcgccaggtacccgctgctcgtcgaggcggtggaggcgctcgccgctgccggcgagctcggtctgccgccgccgccgcacgtgcgggggcaccgtctcctgctggaacgcgtcagcgaggacgacgcgcggcggctcgagcgcaagctgaaggtggaagagctcgcgagggggaagttcgagcttcgccggcggcggctcaccgcgtcgttgaaggaggcgctggtcaaggccggcgggcgagcgccgaagcttgagacgatacaggaggaggaagacgacgacgacgacgactcccacggcgacagcaagaggaggaggaaggcggcggcggcggcggaggaggaggagtgcgggcgcgggaggcggcagtacgaggagatgcgggataggtacccgttactggtcgcggaggtggaggcgctcgccgccgccggcgagctcgcgctgccgccgcacgtgccggggctccgccgcctggtggagctcgtcggcgggtgcgacgcgcggcggctggaggacatgctgaagaatgatgcgctcatgaaggtcgtgaccaacctccagcgccggcggctcaccgtgaatttgatgtctgcgctgatcaagaccgaggagaagcacaaatgaatccggcgagccgtcgatcgccggtgcaatgcagcagtacagctccagtgttttgggttttgcagtaagctcacgcatggctgcttaaactaatcagtatcattagacaataatgtagtatataatagactggagtagtatcttggaagaagaaccctaaacccttgtttggactttggatagtggagggaaatttaactgaaatcccgggaaatctgaatggattggtctgattgatccccatgtatctggagtattttttatggcagcattagctaatcagcttagtggtggcaaactgaacttttggccatgcatgtcatgtgtgataatgttggaacttggaagaactcaattatgttgatgttatgatgcttgattagaacttggaagaactgatggcagcattagccaattagcttattagtaagtataatgtcaactttcagaacctgaataactcctaggtcctagctcaacagtgctgaaaacctacaacttgattaccagttgacacggctaaacttcattggtttggtttatggaggagcatcaatccccatatttctcaaccgttgggcttggaaaattgaattggagaggttcaagtgtccaactcaaatccctttggtttcgcagggatagcagtagaaggttttcggatttttcataatacctatttctatacaagcttgtaggttcatacgattatatattggcagcaacagaaataaactcatatatgttttgtttttttgttttttttttttgtttttgctgtgttcttaatctgatccgcagttgcttcccatgtcaatccaccggatagtccagcatatattgtttactgtgaacttttgattttttcagatatgtactgcttcatggccaagctcaaatttaaatcgtgaatgttccagtaggtcgagcatgatcaaaacaccacttcatgtatctgatatatgcatccaaacttgaagttcaatccatgttgttttactgaccattttacacttgtacttggtgaactgaaccagagttcctgcatggtcttgttaacagaatgtgaaatatctaaacattgaaaatagaaagctagaatttacaattctttatagcactgctcaattgctcattgttgggagagagataaaaggcttacatatttgctcctagtattgggcattgtctactcccctcttcatgcatcagggtattttggcattgttctgaaacaagaagcaatcttcagtccttcacaatcattttctccaataacacagccttcaactactccttcatgaacagagtctccagtgttggatcgagctgcattgccattggccaagctcggattaagatcacgatactaattgcactcggccaaaattccacttaatgacaattcattcatacggccaaggtcaaagatccggggttgcctggctgactctatttaggtctcattacccaacttgcttgttagctactgaatgataaatcaaattgaaaggcaaaacacaacatcaactacgtgaaaaataaaacaagcaagcagaagatggattagatagctagctgggcgcggctgcttgaagttgatcagcgtggttccctacttcattgcgacaaggcaatgtgacgacggaggttcaaacgggtcggactttttttaactccgaacccctcctggtagagtggtaggctggggccatctcatggcccaaatggagatgcatttacatgtagatgggctgggattccggcctggtaaggcccaataagtagcccaatatctccatacccttcacagccagccgcactaaaatgtgagtcaagtggcctcaccaaataaattgtgcatcctttgtgtaataatttattttcagtgtttctgaacctctttttcatagtataattgcagtaatatagactaaatcagctaagaattttttttaaaataagcttgaagttgatcagcgtggttaacaactacgccaagacaatgaaaaaacggaggctcaaagggaattggaattcggagtttacgactcttggtcccgtcgcatggcccatatgaaataaacatgtggatgtgccaggtctcgggccctggtgagtcctcaaggcccaatatctgcctctgtttcaggcctcaattccatagcccatcagtacatcgcctccacgaattcacagccgcagacgcgacgcgatccattcgttcatctaccatttcatgtccgaagcatatatactatatagcagttaccgttccgattctgggaattgatcatcatgtcggcatccatgtcagccatcaggctatgacaaaagccaaaggtaattaacataccctaaacatggcagtttaaagtggctgctcacactgacgacgacgaatctgttgacgatgaatcttactaatttgtgaattaagtgacacagagagtcagctgcatgcgtgagaccatgtgatagatcgatgttagatgcatagtagcttgcaagttggggaaatgagcaccacatgaaaagaggtaaagctagttagcatgtgtagcttgaatgcttaattagatgcaagagtacgtaaaggcaacaaaatgtgagattatcatattatattcctagattatataatctgttctagtgtagcatttgatggattcatcgtcagtgagccaatgatagatcgatgggctctacacacaaatcttgtcggatctcttgtcacctatgtttatctagtgtaggtttacatacagtccggtggctttgttaatttattcaatgatgagtagtagcctttatctttaagcaacaggacacttctctcggcttcccgctggtgttctccagttgattttaaatttgtatacgtctacgagtttttagctagctcgtctgcagggttcagtattttgattgagcgccggatagaccttgaaacggcatggagtcttttttaaaaaaaataataataatcaaattttgatatacttcgacttacttcgataacattatggtcaattatactgtttcaaatttgaattctcgaaaaccatttgaaattttaataggaatctactttcggacggtgtcaaaacctcaaaatttcacaattttcgatcacaacgtgaatcctggtcatctgcagactgcaggcatatggtaaaaccgtgatgacaacaaaacgtactacatagtttatggtgtttctgcaaatgagccaaataatgtgtgatcagctatagttaattgttcattatcagtgtgccaggatttttattaaaaaaagatgaagccaaaaaagggatcagaatgttgactagggccatgagtcatgctgccgtggtagtagactggtgagttggtgagtcgcaagtcgcaactgcgcgtgcatgtgacgaggcttgtgggagagcctccaaaaaccatgtgatccctccactgttcccacatggcgagcacgcagatttaaaacgctccgatgagatttaaaacgctccaaaatgtttgtgttgttccgtggagcatgttcttctgaccggtcaaatcgtacgaaaattcactagtttttgctgccaactatgggtacatgtgtggtttgcacaccacagcagaggactgtgtacaaccactagtaagatgactttattcccgctctaattatgatttgtgagcgttttcttgtttcctgaactaaacaaggctagctaggtaggagtaggccggattattcctccgttcaatttatttttctcagaatgttgggggttcctgaaacatctcaatcaaacaaaactaaaggaaacttattacacagtgacatatgtgcatgcatctcatctctctatgtctatgctgtgttttccgaccgttgtcaccgttgtgggccacaatgctcactctttgtgggggcagaatcgatcgataaaaagctataaacactatcggatgttcagcacacgtatcaacggatactatccgtcgcatcactgttgacaagtcacaacaacaaatgctgagttgttgcgatggcgatcgatctggcgagttgagtctcgcgtcgatcgatcggccgcaccgttgtgcttttgtccctgatatacgagtctggtaggcttcggatccacatatcagtgacaaatgagcgttgcaatcgactgcagtggatttgatctcctttaattttcggacgcaacgggcggcgcgcgcgacattggcacggcagccgcgcgtggctccgacgctcgcatgcaccgacccaccgccaaatgttgtactacagtagactactccacctcggtacgaccaaaaaaacgttggccgatgtctctgccaatctgccatgcgtcaaggtgcacggttgtcattgtcaacaagtagtgtcgtagtggtacataccgatgcaggttcatgcatgcgtgatttcttggttttgtttctccggtaccactacactcgactccagctgccggcctaagctttttttgttggagaagctagcatagcccacaggttcccttgattcctggagctggctcatccagagccagctgctccctaatcatcatcacttacattattctctttaacaaaaaacaaaaacaaacaaatgatactccatatatactactagtactagtagccatagtactgttgtagtagctacaaagagaggctcatgggttatccttgtgtttgaagccaaagaaagaaacttaatcagagacgaacaagccacaccaactttacactggtccccaagcccacatgggccaacgggaaaccacttcccactctcccactcccactccactgccccactcacctctactcctataaaatctcaccgtccacatgtacccgagacctcgaaccatccatccatctatccacccaaccactctctcgctcgctagctcatcgctcaccggccggttgagatggcggcggagggcaatgcgtcgtcgtcgtcgacggcgacgggaagggggtgcgggctggcgctggggaggttggtgaggaagctgaggaggcagagcaggatgatgctgtccacggcgacgtcgtcgcggccgccggcggcggcgaggtgccagtacgacccgctcagctacgcgcgcaacttcgaccggagtggcctcggcgacgacggcggcgacgtctccgcgcagctctaccaccgctacaccttcgcctcccgcttcgttctctcctcttcgtccacggccgctcgccggcagccgcaataggggccgagaccgatgctagctgaggcacgcatggccggtctgcgcgtgccagtgctgcgcgtagctaagctagctagcttagctctagccattagaggtagatgcactcttgttcttcatcctgcagtgttgttaattaattagtgtgttcatatgaggagggagtggtggttgtaagggatttcttccatggctctctccattggccgagatgatggtttcgatctctcgtgctgatttcttggaaatccatgcacattattcctgatataaatcgtcccattaattcctttttttcatgaaattctgaaattggctgattaaatcgccgagatcaagaaaaattggatgctcgccaactttgtagtagatgttgtgttgattgcatcattcaggctacaatagttgttacggcgtcgttgcgttgtcgctgcattctacagtagtcggtcactactactactcactagtgtcaccgctgcgccacagcgattattcgcacgggacccctgtgcccacgggtgacggtgccgaccaccggcgaggacgcgagatcgatcggtgctactagtaaataaaatttcacattttcactgctcctgcattgattcgaggagcggaagggctcgaagaaaaaagagaggaaaaatagagaagaacggttgctctgtgcagcaaatttccaacgacggaaagcaaagaacttttttttagaatcacagtataaacgtgtgcacacttaaccgtatgaatgtattaacatatatacactaattgacattatactcctactactagatttttcacgtacctgatcttgaggcccaatcgtttgccaaattgaaaacccaagtccaattataggccaggccctcttgaaggtgcagacttcagaggagactgcctgtttggggttaggctctactaatggcccattgtacttatcggcctatagcttttggcccagttctccatcgcataggctgaatatttctgcccaaagtatcacggtgatccaacaatgtaaaaaatcaagaaacaccacgagcgtaagtctcttcgctcgagaatttcgttacagccttacatacaggtagaccttcttcgacagtcaccaacatgaacacagacatgggttttttttcattgctccttccatgattactcgcttaattagtacgtcaacagaaataattttttttagacaagtacagcaataatattttgttcctagcagttctgaacatgctatgctattgggatatcaccacttcagcaggttggagccaaaaaatctggatgatgcctcaaaattctccagcaaggtcggagccaaaacatcttgatgatgcttccaattcttcaccaaggttggggccaaaacatattcatgatgacaggattgtctcaatatctctgtcactttctcatcaccttcatgatcaaacagatataggaagtctgactccggcactttcttctctttgaaaccaagatggagcgaagtagaggaatacaaattattatagtcatatatgttggccagattcaaagaattttcggacatgcaaaggcttgagacaaggggatccaatgtccccaattctttttaacatagcggctgatatgttagccattcttattgaaagagccaaagccgatggccaaattagtggggtaattcctcacttagtggatgatggtttgtccattctccaatatgccgatgatacaataatatttcttgaacatgattttgaacaagcaaaaaacatgaaggccattctttgtgtgtttgaacatctctcggggctgaaaataaactttcataaaagtgaaattttctgctttgggggagctaaggaaatggaggaccaatatagacaactgtttggttgtaattctggatcctttccattcagatacctaggaatccccatacactatcgaaaacctcagaaattctgattggaaatgtgtggaggataggtttcaaagaaaacttagcacatggaagggaaaaaataactcctatggtgggagattggttcttcttaactcggttctttcgagccttcccatgttcatgttatccttttttgaaatacctctagctgtacttcaaatactggattactaccgatcgagctttttctggagcagtgatagccagaaaaagaaatataggttagcaaaatgggattatatatgccggccaaaagatcaaggtggactgggtgtcctaaatcttgatatcatgaatagatgtttgttgagcaaatagctattcaagcttcttaatggtgatggcctatggcaaaaccttttgcgcaacaagtacttaaaaggtaaacccctctctcacatgtcacacaaaccaggaacatcccaattttggactggcctaatgaaagtaaaagatcaattttttcagtatggatcttttaaacctggtaatgggatagaaataagattttgggaagacacatggttaggcttgcaaccactcaaatatcaatatccttctctgtacaatgtggttcgaaagagacattctactttggcagaggttatgagcacaacaccgttgaatgttttattccgacgatcaattgtaggaccaaagttagttgagtggaatgatttgatttctcgactagctaacataaccctgtcaaatgaaaatgattgctttatttggtcgctacataaaaatggccatttttcggtcaaatccatgtataatgcgatcatcaattccaatgtaagaatccacaagaggatcttatgggaggtaaaggtactactaaaaatcaaagtatttatgtggttgcttcacaaaaaaagtaatcttaacaaaagataacctcataaagagaaaatggaggggaaacaagcaatgttgtttttgtaatacacaagagaccatccaacatcttttctttgactgtcatgttgcacgttttgcttggcgatgtgtcttctttgccttcaatattccccctccccacaatgcaaaagatatttttggtaactggctaaggggagtgcctagacacacaaaaaaatgattttatttggagctagtgctctatgttggtcaatttggcgttgccgtaatgatatggtttttaaccataaaaaaatgcctaacatcatgcaggttatattcatgtgttccaattagctccactcttggtgtatgatgctttcacaggaacaacaggatactatgcgtaatggtgctacacgcttgaaattggtagccaaggaacttttactccggtttggatggcgtagtacctacagaatttcgtgatagaatctacgtgatttaaaaaaaatatgattttagtatatcatattatcggcagaagttggggtttgtcctatctcgtttttttaagctcttttctattcacttctggactttttggctgtatgcctgcccggagatgtaacccatttccattatcttaaaaaaaatgttggccggattatgatttccgcagggtgtatgaacaattttgcttggattgtactcgcaataggtgcatcgacctgattacagagccaaaataaaatgggaggtgaggatatacaatggagatagatcggtgtaaaaagtctgataagagaaaagtatagatgccatccaaaattagatgtatatgattgctacattatcattgtattcattttaaggcaaaaacagaaagtggatgttactgattttaagagccatagcacacgattggtccactaccatagtctgttaaaattaattgcattttgggccacatatttctaccaaaaattcactttgaaccactcttgaagtgcttttttaactttagattaggtatttttatcaaatgttattactttgaattgggtggcccacatgtcaataagactaaccacctctattgtctatgtgtctcttacatgcgggccacctggtcgaaacatttgacaacaatatttagttcaaagtgaaaaaaaacattataaaggtggtctaaagtaaaactttagtaagaatatgtagcccaaagtacaatttacttctaatttaatttatgttgacaaaattacatatatttaccaactaccatagctgcacttcttcaacatagtacacaatacattaagataatatcgtaaagggctcagtgactcaccgaaacatgtatagtaatcttttgagtttttttactagtgaagcccggtaccaaatgtggaccgctggataggtatgatcggatggctgacatcaattggtaccttcaggtaccatttactccctacgtggtacctgccaaaggggaatgaggtggaggggtaaaattgtatttgcacattggaaaggaatttcgtcgatttgattcgtgttttggataaggctttgcagaggaaaatctacggcagtggcggcgagccggcgacgcttcaggaattacggtgcgctccaccagtcttctgaggccacaacggtgctccaggagttgttgtcagcggcgacaacggcagcattccaggagttatcggcagtgacggcggtgctccagggatcatctgcaactgcggtggcagcgctccgataattgtcttcggcgacgacggcatcactccacgggtcattgctagcgacgacgatggttgatttggttgaacagtttttgagcaagaaagatacatacaggaataaattgagaagcaggaagttccccgcaaaaaaaaagagaagcatgaagttgatttgcctaaatggcttcaggttgatttgtcagacaaacacaaaatcaatactcatgcgaaaagctccaacacaacctccattccggaacaattatagggtgcagactacagcggcggtggcgacaaagtccggcgcgtcaggatacatgttgcggcagcgtcggccatcggccccactgtcgttgccgcagagcaaggacacgctggggctggggggaggacaggcagcagcgacggcggtgacagagacgtgcgcgacggagcgagctgaggaacgatgtcatgcgtcaaggagagcagaatgcgacggcagcggcgactcggatatgcctgtgaagatgaggagatttcgtcgtcgcacgctagctggctgctttacttcatttccaatcgtaccccagtttattgaacggccggatttcgtttggtacctgtggtaccagtacctggaggtaccaacttctggaccagaacaaagctcgttcctgcagcagcaatcacaagttcacaatccagtggatgaaaaagaaaagttagtcaaataagcaatcgaaaatttgagcaggagttcaaatttgttcccaatttgattacccaaggatgttgtctgcaataggtgcctagcaattcttcaaacttggcaagaagaaacttctctcgcttcacaaaggctgatctcaccgttgatatttctgacagggcttgtgtattcagtgggttttcagatgatgatctctttcttttcagtcctcggattggctgatgtccgtggatcatcgtgttcagcttctcccaatcaacgtcagagatcacgcagccggaggaaccgaaatctcgcgcgggtttcagccattggcgcaggcagtcgaggttctcgccggagagggagacgaggaatgacccgatcatggcgctctgggggtgatcggaagcctcgccggcggcggcgtaggggtttctcttcttctctctgctgctgttctgaagaatttcggtgaggtcgcattgcctggaccagaggtgttcgatcgcctcatgctccgagatcggcttgccggcggcggcggcggcggcgcggacggcggcgacaaggccgtccagtgaacggcattccacacggagcatggcgtcggtgtcaaagatgtctcccggtaggtcagcctcgtcgtcgggcggaggaggagcggcggcgtcgtaccagacggtgttgaggatgatgttggaggcggggtcgagagggccgtagcagtgcccggcggcgaggagggagcggatgaagcggccgcgccgccgcgtcgtcgtccaaccgtcgccggcggggagcacggcgagcgcccggatgtagaagccatggatggcgtcgaggaggcacatcttcagcgacagaatgtgctcgcatggggagaggtcgtagttcagcgctgcgccggcagcctcgtcgccgtcgtccgccgcgcgcgtcacacccgccaagcgtctggacagcttcgcctccatggtttcgcaatcgaacgtcaggtcggagatgtacccgagttgaggagagtcgatgcggcttgcgtctgcagcgatcgtgattagggcaacacggccatcttccccgatggtggttcgaagcgtcaccgtgccatcttggccgccgccgaggccgtacggacggcgcaagaagtctatgttgacctgcggccattgatgacctagcaagttcttgatgtccatgacgtcgccggcggtgagcagctcgctcccttgcagttaggccatgataggggagagctgaccggcggggaactgcgccgtcatgaggcgcgccagctcgtcgagcgcggggtgcgccgccttcagcgccgcgaccctgagcgcggccttgatcttgccgccgtcggggagcaagcgtgggcgctggcaccgacgacggcggtcgtggaggacgagcctgacggcgagggggaggtcgatcgtgggcggcgaggtggaggtagcgcctagcctgttcgtcggagatgtaccggaagtaggacgacatgaaggcgacgaggccggcgtaggagcgggcggcgaggataccccacagcgacttgccttcctcgcgagggagggcgaggtgcggcgccgcggccgccctgccggaggcgtggtgggcgatggcgttgaggatgatgttgccgacggggtcggcgaggccgaggcagtggccgccctcgaagatgcagccgacgagctccgtgatctcgtcgatcggcagccgccgcgccgcctcgtcgtacaacctcttgatcgacgtgatgatctttgcgctctcgtcggggtgaggccgcttcccctcctcgccatggtagcaggcgaagctgcccgtgcccgaccatggcggcgccaccaggtgatgatgggacgaggaggaagacgacgacatggagcccccacgagttggggattttctttcctccaagatttgctggtccaattagtttttttattattatttttgccctcgatccgacggttgctataaatcggtttaatgtggagaaaaaaaaagaccacttccttatatacttatctgtaccataatatcggatattatgaaccctcgactattaaaactagtcaacactgtcgtgtaaacgtcacgtaagcgaaaccgtcctccaaaaccaccgagaaagtcaaattacactcattttgatagttgagaggtcaatatatctggtcggtttaagaatacgaatcagattcgatgagtagttaagggagttaaagtgaacttattaaaaaaaaatctcggatgtttggttcaggggagggctgcctcctgcctgcattgggtttggctctaactagtgggccgttttagttatatagggctacaacttttggcccacttgtccaaccaagcccactaaaaattctgagttggcctactatgggctacgaccaggtcaagcaccctgtcactcacacaaaaagtcaattgtcaccagatgattgatgaaaaagtagagtaacgacatcctgtcgaccaggttgatacaagtgttccattgaaaagtcaacccgtcgatccagttgtcctgggacgaattgatggaatttaggccgccagcaagcaaagaccgagctgagcagctccagccgggtgttatcagggtcaaaacaatccaaatattttcaaaaatttcagttcgtttgacttggtttctggccgcgacgtctgctttctctcgcgtagcaagtggtcaacagaacagtaggttcctcgtttgactatcctatgtaatccaatattccctccaatgcattgctacactcattcggtcattcactatactttgtgtacggatttttatgtgaccagttgttccatcacggcaagggtacatgccagccgaacaccttagctaagtttggaatatcgtggcacactcccgcccatgcaaacctagtacaaataaagccccaacttcacacaacaaatttgcatactgaagaagataaaaaaaaaagttcgatagattcatcgctcatactagcaagcatggcaatgccagttggagttgcaccggtgttgttactgttgcttttgccattggcggcggcgacggcggcggcggagagtgacgacagggacgcgctgatggcgttcaaggccggcgtgacgtcggacccgaccggcgtgctccggtcgtggaacgagacggtgcacttctgccggtggccgggggtgaactgcacggcggggcgcgtcacgtcgctggacgtgtccatgggccgcctcgccggcgagctctcgccggccgtcgccaacctcacgcggctcgtggtgctcaacctcacctccaacgccttctccgggagcatccccggcggcctcggccggctccggcggatgcggtacctcagcctctgcgacaacgcgttcgccggcgagatacccgacgcgctccgcaactgcaccgccctcgccgtcgcgtacctcaacaacaacaacctcgtcggcggcgtcccacggtggctcggcgcgctgcccaacctcgccgtgctccggctcagccacaactcgctctccggccgcatcccgccgtcgctggcgaacctgacgaagatctttcggctcgagctcgaccagaaccttctggaaggttccatccccgacggcttgtcgcgcctcccggcgctcggcatgttagccttgtcgcagaacagcctcgccggagagatcccggtggggttcttcaacatgacgtcgctgcgtggcctcgcgctcgccgacaacgcgttccgcggcgagctcccgggcgacgcgggcgcgcgcacgccgaacctccagtacctcttcctcggcggcaacctcctcgccggcccgatctcggcgtcgctgtcgaacgccacggcgctggtggctctcagcctcgcgaacaacagcttcgccgggcaggtgcccggcgagatcggcacgctctgcccgctgtcgctggagctgtcgaacaaccagctcacggcgaccgacgacgccggcggcggctgggagttcatggacaacctgaccaactgcagcgccttggccgagatactcctcgacggcaacaagttcgccggcgtgatgccgccctccgtcgtccgcctctcgccgcagctcgaggcgctgaaccttgccggcaaccgcatatccggcgtaataccgccggagatcgagagcctcgtcgggctgcaaacgttgtgcctccagtccaatctcttctccggcgagatcccggaagcgatcggcaagctcaagaaccttcgagagctgctgctagagcagaacgaactggccgggccggtgccatccgccattggcgacctcacgcagctgctcaagctcgacctgagcggcaactcgctgaacggatcgattcctcccagccttggcaatctgcatcagctgacactgcttaacctctccggcaacgagctcaccggccatgtcccgagtgagctgttcaccctctcgtcgctgtcgctgctgatggacttgtcggacaaccagctggacggcccgatccctcccgacgtcggccagctcacgaagctcgcgttcatggcgttgtcggggaaccgcttctccggcgaggtgccgaccgagctggagagctgccagagcttggagttccttgatttggcccgcaacgtgttcgtcggaagcatcccgccatctctgagtgggctgaaagggctcaggaggctgaacctgacgggcaacaggttgtccgggagcattccgccggagctcggcgggatgccgggactgcaagagctgtacctctcgcggaacgacctgtccggcggcataccggcgagcctcgagaccatgagctcgctgatggagctcgacgtgtcctacaaccgtctcgccggccaggttccagtccacggcgtgttcgcgaacacgaccgggctgaggattgccgggaacaccgcgctctgcggcggcgcggcgcggctacggttgccgccatgtccggcgccgggcaactccacacgacgagctcatctcttcctcaagatcgctctgcctgtcgtcgcggcggccctttgcttcgccgtgatgttcgccttgctccggtggcgccgcaagatcaggagttcgagaaccggaaacgccgccgctcgcagcgtgctcaacggcaactactacccgagggtcacgtacgccgagctcgcgaaagccaccgacgacttcgccgacgccaacctcgtcggcgccgggaagtacgggtcggtgtacagggggaccctgtcactgaagacgaagggggagttcgcgcgcgaggacgccgtggtggccgtgaaggtgctcgacctccggcaagtcggagcttccaagacgttcatggcggaatgcgaggcgctgcgcagcgtcaagcaccggaacctgatcaacatcgtcacctgctgctccagcatcgacatggagggcaacgagttcagagctctggtgttcgacttcatgcccaactacagcctcgataggtggctgcatcgtgcgaagcatacggagaccgggaaatggtgcggcggtgccggcggcctgggcgtgatccagaggctcgacgtcgccgtcgacatcgccgacgcgctcaactacctccacaacagctgcaaccctccgatcatccactgcgatctcaagccgagcaacgttctcctcggcgaggacatgacggcctgcatcggcgacttcggcctcgccaagctccttcttgatccggccagccatggcgccgcggcggcgaacaccgagagcaccatcggcatacgcggcacgattgggtacgtcgcgccggagtacggcacgacggggatggtcacggcctccggcgacgtgtacagcttcgggataaccctcctcgagatcttctccgggaaggcgccgacggacggcgagctccgcgacggcctgacgctgccggagttcgtcgccggcgcgttcccggacaacatcgaggagatcctcgacgtggccctgctgctgcaggccgaggagctcgacggagcagcgtcgtcgacgacgtcggaggaggagagcgaggcgcgcgtcacggtgcgcgattgcttggcatccgccattagggtcgggctcagctgctcccggcgagctccctacgagaggatggccatgagcgtcgccgccgacgagatgcgcctcatcagagacgcttgccttcgtgcttgtggtaaataagtaggacagtatactgattatttgtagaactttgacagccgaattagtcgatggataattattactacgtcatcggcatcgaattctatcactattcgaggcttcgagcaagctgttgtggagtaaaaaaaatgaaaatgtaaaatccatggaattcaggagctctgatctcttgatttatctagtgtactgtactgacagaaaatggatgtactctgcatattcagatttcagaatagattgttctgtttatgtccagattccagaatataatgggcctgggaaattgatcagtaactgggcctaaataggcctttagactgaactagtcctgcctcttgtttatttggagtagtctttgtttcgcagtagttttttcttttcttttacctcttgtttttttttctttcttcccctccggcataggcctggccgattgtattgtataactaaaactctttttcttctaatatattgacgtgtaattctttcgcgcgtttgagaaaagaactagtggctattgctgattcatcctcttgctatcgccgttgctgaacaaagtgtgagagcataagaggaaaaaggagacgttgcgttgtcacttgccattgccagcgtgaaaccgttgaagatgcctcataaatgcgacggattaacagtttattagcacagcactggataaattggatatacgtgcatacgatggcgtccatggtttgcttgcttttgctgtggataagttggtcactactccactcactagctgcaaaaaagcaagggaaaaaaaaaaggtaattgcaatgtgctgcgtacgtgcgcaccctggatggtgatgtgcttgtttaccgtaggaggagcatttgcgaattcgttcttatcctagagaaattaatcgagccatttcacgctgtcaaggtatatatgatcgggtttcagagtttcagtgtgatttgccatttgccaacaaagcaacacctcaatgtaaatagcagtagcataaaaaaatggttcttttggattgtaaaaattttgcagattttaagtagctttataaaattgtataaaaaatatttatttttaaagaggtcggaaatgtcaaacactgagagagatcggtagcgcttgctgctgccgccgctgcggctgcgagagctaaaaatcagctacagcagcagctgaaaacggccacagtcgtgacggctgcagcagccagcagttccgatcaggcccaccgttttttgtcaagtgctgtaacagtgtactttgtgctgtaacagaaaattggctggttgtcaggtgctggttaaaaaggccaattttctgtcaagttctggtttgtgatttgtgatgctttggctattagttaccctacacaagtactccctacgcaacaaagaatggttaaggcatgagcccctactgtttgtgtaccaagtgacaataattggagctttcgatacaaacaatacttaaccaactaccttgtacggttcccatctgccgccattttccaactaactcgagctactacaactaataatcatcagtaacacgagctaattaaaagcatcttccagcacggcaggaggagcacacatccctcatcctctgacaccgacatgtggccccacaccacaggcacttgacctgtgtcggatccggacccgccaacccgccaggtgttccctccaatgggaggcgagctctccctcccaagagaatttaagaacagagagaggaagtggagagactacttcccccacctccgcctctctctcgatccatctcccccctctctcctctcctctctctctccgttcccaatctgcggaggcggaggcggagctagggcgcggcgtcgccggcgaggagttccgcaggcgcggtgtggacggggctcctctgcttccgcacacggcgggcggcgacggcgagcagggttggaggggcggcgcggcgacctcctcgttcctgccttgcctgcctccatctgggtatgaatcggacatcagtttttgtgtttccgaaatttcaaaaaatatatgcatgtcgggttggggggttcagctcgccacgttgggcaaagccgtccgtggtggtgtataagttattgctttccacatttgttaggaaaaaagtatgcgtgatttaatccgatggtagtttgactactaaaaatagtggtcgtctgatagctgtgtctccttggtcaaattgggggtcaaattgttgggatcattgtcgttaataagtgattgatcggtccaacagttaatccgtttgtgcttttgtttgcttgtacggaatctgaatcatgcattcacaagtttttgttatggaaaacagtagggggaaaaatcctatatgaagtatctgtttgttgaacagtaggaaatacgaccgtataattgtattgaagatcttgtgattttgaactgcccaagtatgccaacagtagagttggtagttttgcatatacaccgagtactaattttgcaaggctagtgttttctcccctgttctgagattatatccatgatcccatggcttatcttcatccattctgtgaagagcaattgcttcttgtctagaaacctttctacatttgctatcttggtatggacaaacttttgttgtaggaaccttaggttatgtctttactcggtaattgaaagttcacacaataatccagcattttgatcaaattaattagatcgttccaacatacttgaatttagtggccaaacataattgtttatatcggttatctcatggccacgttgttaaaaaccataacaatctccatgtacctctttttccatcaaagttcgttgagagtttatacataaatcagaaaatagtaaatatgagattgtaatgggaaggaattgtagctagcgatacacatttatccctataggtgatttctgccctagtgtattttgtaggttaagagagtcgatggattgtctacactagatttgtacaaagttttcttcagctgtaattcaattcaagtctataagaacagaacatgaattaaattttattgagaataatgccaaaattggcattgttagcaaaatcctctaactggaagtaatcaaataaaagtttctaatctcaagccctactaccccctaactcagtagggacccaacccaacattgcaacctccagctggactaattttccttgaagacaggctgataacttaagctaggctgaagagtacaagggccttgacacattcactagcccagtttaatgatattttttgggccttgacatattcactagcccagtttaatgatattttttgggccttgactgacataattttgagcatacctagcaggccaaatccttgtggggcttggtcaggttgggccacttgtgttatatctggtccatcgctacattcgtaacctagcataatttattagttagtttcagttgtcgcttgtcagaaaaaattgctcaggtcacaagtcccctgtgaaccaaaatgtttgagtcacgaaattgtcgatggcaaatttttatcctctgaaaaggtctagaaagtaacaaaaaaaggaagtggacccatatctttaattactgccatatcaataccaaatcatgcttatccgataactgcgactttcccatcatcgagttatatatatacccttttgttgattgagacttgtataaattgaaaaggagaaattcaggtgcataaggaatctacgttgcatgcataagacggtaagtactagcttgtttgccaactttctacttaaatccagttgtgcaatagcctggctttagataagtttaatgatttggtctagcgaaacttgtttcagatgatcagatatatttcttgtagtgtttatatctgtgcgtgtgcgaaataaatgcatagatcgaggggggtgagcagttcaatgtacaatcaggaacatccttcagatatgaatttggcctgtttgattaaaattttctgtttcctacatacatttgactttgattgcctatctaacaaatatcacaaataccaaggtttttaaaattgttagctagtactcaagcagtcacagacctactactgattatatatttgtatgccctaactcgcctgattgtgtagcataactggaaatctagaactatactgtaatagttgccttatttatgacctactagatctgttcttcctttgtagtacactgaggaatatatacctcctacatgtattagatgttattagcagcgtgtactgaaatagcccccacgtgatctattagatgtgttaacactttggaatccttagtcttgacagccttgtgctacaagtattgtgcctgaaggagatacgggtatgtatgtggattgtgattagtcctattgaatctatgcatagaagagagaccatcaatactatttaaaaagaggaattggttctggttctatgcatgatcagatttttcattaatgggtttagaatagaccatctacacatgtgctgtttataggattttttttgtgtaaaatattgcattctttcactgttgcatatgcatatattagttatcggttgatcttgcattattatatgtatacaattatttagattagataatgattacttgtttaaactcaaaatttgtgtatatttatttcgatccatcacaactcatgggatgtgatgctagtttatcataatttaaaatgtgcatgattatccttgattcagatatctatatccattgccatcaacttcttatttgttttgatgcgtgctcatattgatcatgcttttagatagcaatatcatacaagtatggtactgccattattcaaatgtttttgagcctcagcctttcccaccccttgtcactgtcttggggcaatatttaactattgaagaattaactatgctttgcagggcacctgtggggcctgtttgcaataagaaaccccgtggctactaatgactactaatacaactcacagtcttaatcgtgtgtgttatcatacagggaggctttcagacaaacattgaaaattcttgctgaccatattattttctttttcataaataaacactatcaagggtcaccttttgtgggcttgcttatttgcactgaagatgaatttggaaaggtactaaagtactagtggcttagaatttggctatgcaaggttagcaggagaaccggtattgctaatttgtgctaaggatgaaattggtaggtgctgaagtactaaatgatgggagtttggctaggtaaagcttgaaagagaaagtcttcctaggatatgatagataaatcaaggaatttgttgctcactgtgcccaaaatcttaatacaatgatacacaaagcttatgtgtattcgcgaaaaatgtgcccaaaatctaaccaaccaactgctaaccttgctaggcaaggtaggctaaggaaccaaacatggttgctaattgctattgctttctgatcaaacattctgttcgatgattttctcctgtagactttattacaagatccttttagttacacttttgtgatgcatcatgcatgcttacagttacttatatctgcaattttttagtatgtctactaatggctgatttcttcaattatgaattccctgctctgctgctggtacataaaactgatgctagcatcttatgtcggatgactatttttcagaacaagtttagacattgaacttaaaagtaaaactatagcagatcgattcatctgcacaatttattagtttgtaacatgggaggctaggactattacctaatcgagaatgcaactgacaatgtttgttattcttattttgcagtgttggaaatatcataagttttgggacaagcaagagaggacatggagccatcatcacaacctcagccggcaattggtgttgttgctggtggatcacaagtgtaccctgcataccggcctgcagcaacagtgcctacaggttctgctgtcattcctgccggttcacagccaacaccgtcgttccctgccaaccctgatcaactgagtgctcagcaccagctcgtctatcagcaagcccagcaatttcaccagcagcttcagcagcagcatcagcgtcaactccagcagttttgggctgaacgtctggtcgatattgaacaaactactgacttcaagaaccacagcttgccacttgctaggataaagaagatcatgaaggcagatgaggacgttcgcatgatctccgcagaggctcctgtgatctttgcgaaagcatgtgagatattcatactggagctgaccctgagatcatggatgcacacggaggagaacaagcgccgtaccttgcagaagaatgacatagcagctgccatcaccaggacggatatgtacgatttcttggtagatatagttcccagggatgacttgaaggaggagggagttgggctccctagggctggattgccgcccttgggtgtccctgctgactcatatccgtatggctactatgtgccacagcagcaggtcccaggtgcaggaatagcgtatggtggtcagcaaggtcatccggggtatctgtggcaggatcctcaggaacagcaggaagagcctcctgcagagcagcaaagtgattaagaagagtaaatgatccctgtgaattgtcaagaagcttaccacctgattcagaattttacttttagccaggttgtcgtctattctgaatttatgaataggattaggattctctcatggtagttgcatttctgctgtagtggaaaaggatttatgacatgagagtatgagactaatgggtttcagttactataccgtttcctgtcaatccaaaagttggcctttgcgaggccattgatattgaacctaatgtggttgaactgcccatgccaacgtttgtaagctctgatgtgggtcattctgtatttcatgtttgcatggtttcatggaatcttctttgtttagacaatgaaaatgttttacattcgtggcatctgccataacacatacccgatgagtttttaatgaaataaaaagacgggtgggggatacatccccagcgtactcttgatttgctagtaaacagacaactcatagccaaggtaatgtagaaaactacagtttataaagcctacaatggtttggtaaaactggtcttgtggcattcacatgcagccctatattaatctaaccattttgtttgattttttccaccatttgaatgatttatcgttagtgcgctgtgatatttgcaattttgcattgtgttttagtagcttatagctccgtgcttgtttgttaatctaatgcaatcgggtcaaagaaaaaaaaatgaaacggtactgtccatggtgagggctgattagtatggtcttggagtgtagtcaagccgttttatacagctgtggtctcttcgtaaataacagaaagtagtgtacaagtaaaatagaaaaaaaattcggaataaacattacaaataacagaaagtagtgtacaaatgcatgatgccatgatgtctcctaacccattacgctggcttattagggcgtgtacaagggtatctttctctgtcagggaaaaaaaaaactagcgcgaaatgtgttgatactatgaatttaaacataacatctcgtattggattttttcttttaacggaggcagtataggtgcattgggcgtggggagcgtactcagttactcttaccgttggcacgatgcaaccaagccaagtaactacctctgaaaaaaaaaaagaaaaacaagttaatagattgagtatcttttgcgaggaatgtatgtataagcagttagttaattagcacaagtaaactgaaagaaattcagaaataaacccacctgtaatttgtagtcgttaacctaaacttttaggtacatcaatatattaccagcttatgttgagagaatattttctccaattatccatcacatctactccctctgtttcaaaaaaaactcaacctagtattagatagaacgttttctactgtccagatttgttgtactagaagacatcaaatccaatactacattgagtttatggccctatttagttcacaccaaacttcccccaactcctaactttccatcacatcacatcacatcacatctaaaactttcctacacatataaacttctaatttttttttccaaactaccaattttctccaaacttctccctaatttcagaaactaaacacagcctatgtgagacagaaggagtacatagcaaaatcttcatagcattaatgatgtcaaaagctccacggtgaccagagctcgtcaagaaacatgacgccagtcactactcgccagccattaatctcagttcgctttcgccggctggccgcaaacggcaaatattcctcgtccaagccggaggccccgagaagaagaccttgccgagataggcaagcccggaagccacgtcgagcctgcagctttgctcgcatgctgatctcccagcttggtcttggccgtttcctgtcgatccagcagtcaaggatatgcagtaataccgagtccaaaaacaatccttgtccgtttgtttattttccttcttattttcatcggatcaagaactgtagttcgttacctacgctatgatgcccatgcatgtgcatgtttcttattgctatcttatgtttgcaaaaacaattattgtccgtctttcttttttcttattttcattcgattaacgtatccttgtccgtttgtcttttttttttccgataaacgtatcatttttctttattcttttattattttctgataacagtcccaaaaacatttgcacgaaaaacgaaagatttttctcgcctagtacacggactaacaaatctaacatcacaaaaactttaccaagttttgacaataccaaaattctagcaagatgacaatattgttaaaattttagtatgatttcttaaccaaatttagtaacaaactaaacgtagacatttttttttgacaattttaaagaaaatggtatggttaaaaataatgtcaaagtgaatacacccattataacgttgaaaagaagaccagacgacccacacgtcattcttttactcgcttttgcgttttgccacaaacggcatgctttagctaggacctcagccaggtgagaagaccttgccgagagataaggaaggccggaagcctcatcgaacctgcctgcctttgcatggcccgctagaccgcacttccaattaattgtttttacaattaggtagtttacgctttgaccactcgaaggcatttttattaaaaacaataagtatctcaaaagtaacctacgatgcatattgtcttgtaaatacgcgggcttcattcctaactaagaaaaatggtaaacggtgtattttacaactgaaaaatttacaaacttaaaattcacaagtataattcgtcacgcactgcatgcaaatatgcagtgatgcacacacagctaacggtcccgggttctcccaccgcccatcgcctagagacaagttcaagcgcagtaccgcctacactcccatgtgctagctgcttccatgcttgcctactctctgtttacgagtagtgagaagcagagagtgagagagacgaacttgatggtgatgcaccctaacgctgcgctcccagtcaaagtcaaacgcagtagcacctagtacgctcctactccctccggaggtatcattttaattaatattttagacaatgacacggtctacaaaatatatctttaaccttatttttctattataatataaataataaataaatacatgtttacttttattatagtgctttgaaagacaaatctatacatgttgttctagttcctttaaactaaatatttttaaagttatcgatgatcaaagttataaaagtttgacctcaaccgtgtctaaaacgtcaattaatatagaatcggagggagtatactcgtagtcgtatttgatcatccataaacgcgtccaatatctttgggtaatggattttgcgacataacaaaaagtttagaccagtttttttactagagacgataacaacgtgccgagcaattttggctctcaaataatgatgttgttttttatgggaaaacggtttattttcctttgcaggttgttttcttgattatttctccagaagctcggtttatatggtattatcacttcagcttatttatatttggagcaagtggttaaggagttttatacctggcatttgggtgatgacctagttttcgagttgtaagaccttgatctcgagagtttttatgattttctctcttcttttaaggcctcgtttgatctatccttttggagataaatttttagtgcacgtaaaacgagaaacctcattaccatatgattaattaaatattaataattataaacttaaaaatagattttatctgaattttttaaacaacttctatatagaaaattttgcaaaaaaaaacacatcattgactgtttgaaaaacatgctaacggaaaaaagttgaagtttggagttgaggcaaagaacttagcctaagtgtgcagtgtcttgttcacttggttgtgtgcactatcatgatacagagggcctgtttagatcccctggtaaaattttataccatgtcacatcgaatgtttggacacatgaagtattaaatataaacgaaaaaataactaattacacaaattgcgtgaaaattgcgagacgaatcttttaagcctaattgcgccatgatttgacaatgtggtgctgcagtaaacatttgctaatgacggattaattaggcttaataaattcgtctcgcggtttacaggcggattctgtaatttgttttgttattagactacgtttaatacttcaaatgtgtgtacgtatattcgatgtgatacgcaaaactttacacccctgaatctaagggtgtgtttacaagcgaaattagtaatttgttttgttattaatctatgtttaaatgtgtgtccgtatactttaaaatttttttggccaaataactaaacacgaccatagtcccatatgctgcttttgggttagagaccagcccgatggtgacaaactgatccaactccaaccaacgtttgcgttgaggtgctctctctgaatttttcttgtgccccatgacgttgctagctgcttttgccgattagcctcgtttcgttgcttttgctctcctgctgcaatgctgcctgcggctgccacgaacttctatccgcggagagcgacgttcgttcccgatcgaacctgaaacttcctggcattttcacgcgcgcgaacgaacgaacgaacggacgaactgtactgtaaatactcaggcgcccgaacgaaagttaacgaacgaacgaaagctgaagtgctgaacgaacggtagactgtaaaactcaggcgctccgaacgagaagttcagtgaacgaaagttacagccatcggtgaattcacagtgctagtgccgtggagatcgcggcctataaatacgcttcgttgctttgctcctctccttcagctcgaaggaagccgttccagtgtctcacaagccaaggtaaagaaaaaaaagagagagaaaaaaacagagaaggaaatcaagagaagaacaccatttgattctcctctctgctcactccttctccttcttctgtttgtccgtcttggattggagctagcacttctttgactgcccttgttcatcgaggcaagtgcagaaatcttttcagtgtggctggatcccgtttaattcaagcgatttgattggggttttttggttttttcgatggacaggcggcgaggcgaggtcgcgatggggcaagggaagatcgagatgaagaggatcgaggacgcgacgaggcggcaggtgacgttcagcaagcgcagggctgggtttctcaagaaggcgaacgagctcgccgtgctgtgcgatgcgcaggtcggcgtcgtcgtcttctccgacaagggcaagctcttcgacttctgcagcccgccggtcatgtgcgccgccgccgcccggccctagcttctatctctgtttcttgttaatttgtttatgacgaaatgccaatgaaaaatctgctttaaaagaaacaagaaagagagagagagtgtgtgtgtgtgtgctgatctctaatcttgatttctatatatctgcatgccttagctgagttttcagttctttgtggtgattggtggtgtgtgcgatgattcagaaatttagcattgcatttatttgttgcagttgatatttcactcagcattccagataaatgtttgggggtactgttcgattaacatcccgatcaaatgggtagtgttcttcatgattggtagtggatttgggaaattgggatcgctttccttgcattcaacattatcactagaaatctttcgatggttcatgttctagagcttgcttttctttctgatttaatcttttctggcatcctgaaattttgatttcaggatctattcctataggacttgtgcttgctgcatagtgcattcttcaattaagcagtgcccatgaccacatcgattagtactactagaagctaatactccttttacatgtataagttcacttcattggtccaatgtactagtaataccatattgtttctggatgtaacatatttgattatgctttgttaagcttgatggagctgtttcaccgttatgagatcaccaccagaaacactcggcttcaggagacaaaccgtgatgatgaggtaagcgaactgaatctaacacatgttatttttttcttttttacatttgaaaggcaattgcatgtcccacaccaaattcctaatcactcaaagcttcatttctacaactaatctacatgtgtgatgctgccttgcagcaaatggtcatggagatcacaaggctaaggaatgagatcgaccagctcgaagccagtttaaggaggcaaactggagaagacctgtcatctgtgtccacagtggatgagctcagccagctgcagctgcagcttgaatcatctctcagcaaagttcatgcgaggaaggtactagcacttgcttaaatatggcagaagattagtgcagatcagcatcaaatccttatggaatatacaagtcctccacgatttttttttctttgctcacaaattcacaattagagtttatatgacagaatgtgttaactgcatgaggtgcttgtgtgcaggatgagctcatgagccagcagctggaggatatgcgtcgcatggtacactactcccttattgtagtcgcagttgtggtttttgctgatgagtggtgagctgaattaatatatggattttctgtatgaaatgcagcatcagaccgtgcatgagcagaacaatttcttgtgccgcatggtaactaaaatactcctactagtatgccactgcattggctttaatttctttttgagttcttcctaaaatgttttcatgattcgagtgaatatcctcttgtttcttacgtgtcatctatcctataattcaccaactcgttttactcatcttttactcttacactcttacattcatcattcaacggttcagatcatccgcgtaaaatccgaacggttcagatcgatcccacctccacctccctcaatcagcggacgacccgcaccgccccccccccctccctatcgctctcccaccacacctgcacctccgccctccgccggaattccgctcctgcacctccgccatcagtgctccgctccgtatcagccgccgcgccgtcctctgcatcgcatgtctgccaccgatccccgccgccggctcgccctccacgatcctccgcctccccgctgcacgaggtcctcccgtcgccaggtcgtcgccgccgttctgctccaccgatccccgccgcacgaggtgctcccgtcgctaggtagccaccgcgccgtcctctgcatcgcctgtctccaccaatcccctctgcatcgcaggggtgagctgcagctatggagttccttgccggtgggggagcagcaggtgaatcccgtgagaggtgagtagttgaacaaaactcatcatgcagttcatcagcaggtgaccagtccggaacttggcatcgtggaggttcatccggattcatcatgcattctgaaacaaaacccatcatccagcgcttgccgcttttcctcagagtacaatgaacgcggggtgctcggcgaaatgtcccgtccggctcctcacctgcaatgcatgtgttctggagagtgtttatggattctggatcttagaccccctcaacgacttggatcgtcagtaaagcttcatcttgaaggtgcacatctgccgttgtttcgtcaaaatactatgcatgatctttaggtgataaaatattgattgaattgtctactgctatcgctcagaatccatactccatcaatcttacatatacacatatttgttgcgtcaaacacaagcttgctttccatacatccctgaacaattcagcctcacaactgctcttgacatatctcattcagaattttttttctcaaattagttggactgatagaaaaatattgcttttcaagattgtaaaataaccaactgactgggaagttgatgtcatatgttggaagcaatctgctaaaatgttaaagaagtgcatctaacttttgtacccagtgaattgcaaatctctatctcgtttttttatttacagtttctttggttttaaagtaaaataggttgacatgggaactttactagcagaggaatgggcttatattcttggaaaaaatacatttctccatgcagaatgtgatcacaataatgatacttgctgccatgatttctatcactcatgcacgcattgcccttgatgattgtatgcagttgggatatattggttagttcaccctctatctctctctcaaaccattatttatcttcattcactattcacttacaatttccctcgtattagtgatatgcattagtgagtttatgaaaaaaagatcaaatatttaaaaacagagttagctcctttggaacgaagacaaaatgctactttgataacttgacttctcaacaccactcttatctgcacacaatttttttaatgaccagtttgaactttcatctctttacagtcatcaagcaagaaaattcttggcgattctggtttatatgacttcctggaagcagtaggaacaacaagagttactgaaccagaaattgaacttgccttcttcatgcatcagatgaaccataaagggaacaacactactaccctctccaaaattgagctgctcaggacttcgtagaaatttacagcttcaggacatgtgatttatccattctcttttactgtttattctaaaatgcaaaaaaaaaagaaattttgttgtagcttagattaaggcagcctcagctttgtggtttgccaagccatgtactgatatatgaatgtgatactttaattaatgttgaaacgcatgattatgtatttgaactgaattgactgaatgtgtcctggaatcggtttagaacttaatatatcaatcagacttttgttctttgcttactggtttttctgtgacatggagaaaagacgttgaagacataatacatcgtcgactgaatgggtcgaccttatggcttgttttgcaaattttgaaccttgtcctggatgtagtttatttggcttgtttatccctttcgagtatataataactgaggaacttctaataagcttcttaactaaactcgctcatatgtaagtcttaattaatgtcttgaatctatacttgatagcccaaacaatatattgtatatctttttgttgtttcgccgtagcgttagcacgggcatgtaactagtataaaatagttatcaaatttttttaaaagaactgataagatagatcaatatgaaaatatttcactccataaacatacaagtttaaattcaacttttataaattacaacaaaaatgacaaatataaccgtgaatgcgggttaactatttccaatttaatttattctttttttaacatgtggacgttgaatttaggagtattataatactcaatttgttcggctttagatgagtgagaactggcacagcgagaactggcagagccctggttccggggaggcgtcggcaatggaggcgctgacgatgctgccgccggcggcggcggcgacgacggcggcggaggcgttcaattgcttcttcccggaggaggagaagggggtggcggcgtcgagcacgttgctgcagctgtggccgcagccgcacgacggcgaccagcctgacctgcggctctggtaggtaatcaaggagtactttggttaatattccaccaagcacaattagccctgatcagttatctaatctgttgcacattattcttctccttgcagattgaggatcgctgacttgtcaattgaaacagcctacatggtggctggtggacgtggatttcatggacgtccttgcagtaatctagcactaagacagcattagcatagtgaacttacaatagctcgagatgagatagtcgtcgttatgtttagataaaacaatggaacatagcgaattagtgatagggataaaagaatggcactactcgttcgattcaggttaggattattataatctagattattaggagtaagctgaaataaacaagtagattattagactcgtttgattcagcttaaaattattataatctggattattaggagtaagctgaaacaaacaagtaggttattaggatagattattataatctgtaagccagattactataatctaataatctcctctagaggagctttttccagattattaggtggctaaagacccactatctatagatgccttcaataatttagataaacaaacatctcgtagcttattttatgctagcttattataattcagtttagagtaatctgatttaataatctagattataataattttaagctgaaacaaaggaccgtaatatcgtacaatgtattaaccacttggagtgtattttaatgttgatgattacgtgataaattaacctcgtaatatattttagtgttgatgattacgtgataaattaacctcgtaatattttttttagcattattcaaacttttggctgagtttagatctaaagtttggttccaaacttcagtacttttctatcacatcaacctgtcatacacatacaatttttcagtcatatcatcttcaatttcaaccaaaaaccaaactttgcgctgaattaacacagcctttgtgttcctacctgtgggaccacattgtcagtcgctgaattttcaaacctggccaactcgctagaacggacacgtgaacggacacgtctcggttgccacgtggcacagaaaggctctttttcttgggcccgcaaccgccttcaccgtccttggcttattggctaccaccaggcgaggcctccttctcgcggaagcttcccccaaccacttgtccccctctctctccctctctgcgcgccgccgccttcgccatggcggcctcctcgcctcctctctttccctaaccctagagccaacgcggtgggcggaacgtcctccagatcgcgatcgcgatcgcgatcgccccgcagcggcgtctccacccccctcgtccgccggtttctccgtgccgcctcttccgaggtgggaggtatggtatacgctccttcggcgactcgacgaaaccctaaatcctagccttttgtctgtctggttcttcctgaattttgttggtgggggaattttgtttgcgattcaggcgtggtggtgctgctgcggcggttcctgcgtttaccgtttgattgattggtggtgggggacgggttagggtttgggtcggagggatcgcgaccgctacggccttgatcctctcccatttcgttgatcccccgctctccccttggtgatcccaaggtgaatttagttgcgattcctttaattacacccgaatcgcgttcgggctcgtggttgcacgattgcatatgtgacatggtgatggtgttctttgtttttgtgcgatctggttcggctgtgctggtggttaggttgtgagttcattgcgaagttgcgattagggctattgacgtctattagggttttcaacttggtatcttgtttaggcccctttcttcggaatttaacctgggataagagttcgtccagttgggcaggttatggtgctattctttatgcataaattcgttacacatggatctatatctatcactggactctggtacgaacgttcaccgcataaattttgactcgtgtaatgctaaattgctaacttctaaggctcgtgtagctcattcaaacagtagttttctgttttgtttttctgtaaataatggtgcgctggtacatcgaatgtagatttgataaataatgttaaccttcagtggtttaaattaaacactaagtgcttaggttaaattcataggttcagttcatggaaagtttctttccatcagcagcaattttctgtttaggttgattttgaagaaaccctctctgatttagtgtgattcctttacaagattggcctctgagagtccgtttgatgatttccatcaattatattagtgtatgctacattggtgctagggataagtaaaaaaataatttcagttaatatcagaattattgagctgtataaacctgggagttaaattagtgcaataggtctctatcattcttcttgaggtttaattctataagtttttggttggttccagacgcggttccagacgcgtatcaaactggttgattcactggtgtgtttttttcgttttcgtgtcgttttatgttactgtcagaaggatggctattcccatatatcacacatatttggagagttcagctgttggaaggttggaattgttttttttttctcatctggtgtatttctcaaaactgaccggtggttctgaatatttcaatgcctgatcaggatcaatttttgcatttctcgagttcttaacagaaaaggattttgctatacacactgaaaccagtgacattatttcattgtgagatgcagattacacttttcccatatatatatagtggttggcaaagggctcctggagtcctggttcttaaagatcgataacagctttcaccacaaagttctctgcaaattgcataagatcaaatacatgattcgttagtgcatccttgccatctgttttgatacttctatatgcaagtgatctggtgttctttggtgaattcatgtgtaaccactgctccttgaggcagttgaagggggtattggactagatccatcctacacataaccctcatgtgcaagggttctgcttggatatgtagtttttctacacaccattgacaactgataagtatatcagtaaccatgtttcctcctgcaatctaatatcgttctgtgttctgtcatt

SEQ ID NO: 5705 - DNA, 64898 bp, Oryza sativa
tgctagtactaacaacagtttggacaaaagaaaaaagttcatgcgttttttcaaaggttaatactcatggtttttgtcaaaaggctaactcaggaatttatagcgtgcaaactaaatttcacattttttgtcctaatgtaaattatcaaaaatttcaacgcaacattctcgatgctactactaaccaaattttgggccgaagaaaaaaaaatcttgcatttttctgaaagttaatactcgtgggttttgcgttttttttccaaaggttaatacacacgagttttgcgagaaggctataactcacgaatttatagcgtggagtctaaaatttcatgaaatgttttctcctgatgttacgatatggtccatatgctaatactagcaaatttttgggccgaagaagaattcttgcattttttttacaaaggtttaatgcaaaatttaatgaaaattttaacctgattttaatattcacaaatttcacaaacaatggtcccgatgctaatactagcaaaatttttaactatttgttttccagaggttaatattcatgggttctactcgaatgctataactcatgaatttatcctgatgttattattcaaaaattttacgcgcaatgacctcgatgctagtactagcgtacttttggggcagtgaaaaaattcatccattttttttcaaaggtaacactcatggtttttcctgaagaatataactaattaatagcgtggaggctaaattgaatgaaatttttttgtcctgaaattaatctttacaaatttcacacgccattgtctcgatgttaatactagcaaaagtttgtaccaaagaaagaaattcatatgttttttccaaaggttaatacttatgggtattttaagaaggctaactcacaaatttacagtgtcgaggctaaatttcatgaaatattttgccctaatgtaaataatcaacacattttaacgcggcattcctaatgctaatacaatgtaattttgggccgcaagaaaaattaatacattttttgaaaggttaatactcacaaattttgtgataagcatatatactcacaaatttacagcgtggttgctaaattttatgaaatttttcattatgatgtgttaataatcataaatttcacacccagtgaccctgatgcagcgtggttgctaaattttatgaaatttttcattatgatgtgttaataatcacaaatttcacatccagtgaccctgatgctagtactagtgaaaattattgaaaaagaatttatatgttttttttccaaaagttaatacgggttttgctggaagtctctaactcacgaacttgtagtgtggaggcccaatttcatgaaaattttctcccaaggttatggtacggtataggtgctactattaacaaaaatttgggttgaaggaaaaaatagtgcattttttcaaaggttaatactcatgggttttgacccaagtctacatctcataaatttatagcctcaaggcaaagtttaatgaaaattttatcctaattatagtattaaaaaatttcacacacaacggtcccaatgctaatactagcaaaaatttgagccgatgaaaaatttcttgcattttttttgcaaagattaatactcacacgttttgcccaagggctaatttgtgcttatttgaacgtttgttccaaatttcacacaattatcttaatgccaatactagtgaaatttcgagccggcaaaaaagttcaacagtttgttttccaaaggtacacaaataactcgctgccactaataatttgctaatgtcacccatgttaagattttaaatcccaatgaagagcggcgtatcaacagtaaagctgaacaacaaatagcccaataagacgtactaggctgtaaaaaaaaaaagacaaacccagacacacatatacaagttcgtagctaagattggttttttttttttgtaacggaggggtagtattgtaaaagactaggtccatctaatcctaacggcataactagcgcactcgagccccatactcccatggtctcgccataaggccagcaacaaaatacagccagtttattcttagtcgtcattgcatgaacaatccctcatgtttagtaaggtacaaacgggtaccatcgacgaagcacctgcaagcatatccggtaaagaaaacgggatatcatgagaatgagcagactccagacataattagcttatcgatcgcagattcaggcaacactaattcagagtgagcctcaaagtccaaaaagagaacgatgtttcatgcaagtcacgacggcaatatattgaatgaataggagggtctcaggcactctactgcacatgtacgataaagacaagctccatttatggacgatatattcaaacataaagatacatcaagagaaaagtggtcaaaatgacacattcactaatcaaatcatataaatacacactgagcttaaaaggaacaacatataaatacaaactgagcttaaaaggaacagcaagttctgaacgctcaatactaagaatacacagcatacacttgtatagatggaatcatataagagctagcataactgcaaattccgttctgatgaaggtgaatgatacctaggatcatccatgaaagcaataaaatgacatttaaacaagaaggcacggttcaaatccctactacaaacacacagagcaacttctggtcatataccagacatcacacctgcacaactaacgtaaccagtcgtaagtgcgaaagaacaaagcagatttgttgtgggttgggctaagtgatggtcagtggttcaggagagaagatcatcgctcgagaatcagggggcgagctctacataaagataaataatacagttggaggagtggaaatttatcttgcttgcaataaataatacagttggaagagtggaaatttatcttgcttgctgaaacaagacaatcaattccactacatgcgactaaaaactaacttaatccccaaaagctacagcagaataagactctggattaagctagccaataaatagcaaaagaaaagatggggaaggcatcatcagtcataaagaaagcacctgaatactcaccaagacatgcaaattggcaaattagtaaaataaatacaacaccatgcagcttttgaaggctcctaacagcaatcaacacagtcccaaaacatgaaagcatgagggcacatgactacaaattggtaaccagaccgataaaaagtactatcacacgagctatatttgctttttaaaacaaaaaaaatgttcttccagctaatgacgaaggatatagttgccattaatattattgtcacactcacatactaatacaaacagacaggtgattcagtattgctctcataatcatccttttcagtcattgcctcacaatcaacatacattgcagcattgctttaatcaaatagaacttctgtcttgcaaaggagacaatgagacacaaggatctaaactaaaccagttaggtgtcattgacataacttgcatgtatgaataacataaactccacctgtccaccaaacatgtgaaaagagcgttattctaatacaccaaataggaacaagataactcagcttcatagaactaaaaacaaaaagtcagcaccacgggaaaacaaacaaaaaagacgtctggatgtaaagggttacattggttcacaacaaccaattttcatatgaagggaggcaaacaaaaccaactacaagagcaaacaacgtagggcattccctggagataattctatgataagggcactgagaagttaattatggaggataacaaatatcaacagaaaaatcttctttttcggggcagactatatgcagtacagataagcaagatagaacatccaagaaactcttacaaacatacgaggcaaagtaggtatgcaagtagactgacccacctaccgcactttctgcacatggacctataaccagtgacaaggttccacccagcatactagggcaatggtaggcgctaggcggcatcctcccgcctgctgcacaagtattaacaggtaacctagctcctaggcagaaacccagctcacacagcgcctttctgaacaatactcaatattagtggtaaagcaagcaaaggattggtatctgggttggtagaccaagcccggttgcatcccaacaaaaatcccaccaattaacaaaattccaaacaaactgtaaaatcttaacaaaacagtgagtaaaacatcagccatgtaccaacaaatttatgcaaggcaacagggtgcaaaagaaaaggtcagtgcaagtacaacccaatttacatatatgaaaccagtgttgttaaggcagtttaacgcgacccaccactgccttagcgccatagcgctgaggcataaggcgttgctttgccatatgagatggttgaggcgtgattagtggagaacatggtagagaaattaggaagaagaaagggggtatttggtaaaaggcccactaagccaggcagccagcccaccaaagcccaacataggtcttcatacccacgtgttctatacttctgtgccctaagaggcatcgtactccaccaggcaccagcctccatgacgagcagataaggcaccagccattgcggtgaggaagaaggtgactgcaagccaactagggttctaggatgagcttacccctatcttcttttcctttttctactgtttttttctctaaggccttcttctttcccttacatatatgaaaagtcaaataaaaagacaagacaactgggagaaaacaatactgtgtaaagggacgctacattgattcacaagaaccaatttcatttggaaggaaggaaaacagaaccaacttaaagaaacatagcaagataggacattcccttttctttctctctctctcttttttttttttggggggggggggcagaaagaagtagagaaaggattacagcacttgttcagctgctaaaacacaacctagaggtaaaagaagatagctatgctccgattgcacaaaactttgaagggaccaccaccacagacaatacagctctagagataggccagagatatttctggtaaggacactgaaaaattaaatatggacaaaaaaaagtacattttcagagccatctattagtaacatcatacaagaaactcttacacatattagtagtacgtatgcaagtgggatggatgacccacctactcaatctctgcacatggcctatagctatcgtacggcatctttatgaacaaagccagatattagggtaaagcaactgaatgatcagtgtgtgggttggctgaccaagcccagttacatacttgcatcctaacagaaaccccattaatcttatccaataaattccaaacaaaccggatgatgccgacaatactgagtagcaaataaaaggccaaagggcagatgctaccaattgtacaaatacagcccaatttacttatctaaagtatgtttaatcccacaaggaacaaaacaatgaaacccatatccctcacaaacaacacagtcaacagacaacattgttgataagaaacccaacgaatctaagagaatacaaggaaacccaacctaaaccaaatagaaaacaatccatctctaaaacatccagattggaaaaaagaaaaaaaaagaaatacatcactactgctttactttaagcattttctaatttttatcacctaacctaaacaagcaagccctacaatcaacggcatgaatgggaaacaacaggtccggttagatttcatgggaacatacatttataaggcctttactttaccctaatccctaaaatcagtgcaaggcaacgatatctgatgtaaattaggttccgagatcaacttggtctgggcgtttgtgcaaggggaccatgcaactgacgggagatatcgccgtcatcgccatggatgcgggagccagtggtcgggtcgtgccgtgcaacggacgccccccgttcaccgaacaaacgctaaccctaggtaccccaaccccgtggattacctgctcgaggcgtcgccgcggagggggagacgaacgaaccgcacgacatgacggtaatcgcaggttgtaatcgtcgatgccgccatcggcggcgggtggtgggaagggggacggtcatggcggctcgtggtcgtctagggttttcgatggcgaggcggatctagaagggagggggcgatgccgtcggtgcgagaggaggccggaggggaggaggaagaccaaaccctaggaaggaaatcgccgccgaatccgcctcgccgcgccgcgccggccgccggcgagaaggggggagagagagagaggcggatcgatttggggattttttccgagagggatgattcgggaaaggattaatgggcttcgttgtgggtgggttagccttgtagcctcggcctgttgggcctcgaaatgctaggttaccccatctgggccgtcgatgttagatcggacggtcgtcgagtcggatacccaccactatcccagcacgcggcctgggagccgcacggccgcaacccaccaccactcccgaagcttctctcatggcggccatggccgcggcggcgaagctcacggcggccgcctcctctctcctcctccggtgagctctcactctctctcttccttcgagtccggtctactgcagcagtgttagtcaagcagatattacttctaaatatctaatccaatctttttcttacatgtctcttgtgcacaggcgctcacccttgctgcggcctcacggtctccgactctcccgccgcttcgctccccaaaggtgtggccgctttcatcagagatctgacttatgcccatgtttcttttgcgaatcatttttggaaatttggaccaaggttgggtgttactactggcattcaacttttgggcaactttggagcagttttctcttgtacttatggatgcttaggagacttcattctatctttagagcaatcaattaccagatgattattaacagaatcaatagactctctacatgcccattggcctgttatatgtgcatgattctagatttagttagccatgaagggtcaatcaacggagtgtagtgtgctctattgtttccaacggttggtactaaaaaaagtataagcaatgaacaaagggttgatcaccaaatagcaattaccgaatcccaattagttatattgctatttgatataaactcaagtctgtaaaacaattaaatccaaaattaaacaagtgcctaaacaatatggtggcatttagatgtgtggtgggtttacggtaatgctatgaaatcatagttctctcccatcgtctacaattgatggttcttgtctaatattgagtccgggtgcttttcccttttcctccagatttgtgcgccacattgcttcatcgacaaatgaagaagctgctgctaaagcagcagcagcaacagctgatactggaggaccgaccatgtaagctttctcattttactatttcataatcccttctgtggcagtggcactgagtattcctctttgtttattttatggaagttttgacaagatcattgcaaaggaaattccttctaatgttgtctatgaggatgagaaagtgctggcatttagagatattaatccacaagcccctgtgcatgttctagtcatcccaaagataagagatgggttgactggactagacaaggtatggaatgttgttcactagtgtttgcgagaggaattctcaatctctaaaactgtgtagcatggcagtatccatgtacttcgttatgtgcttatcttagtacaagccgatgccctttttaactgcctatggaagcaaaattgttggtcatgtactcatgtcttctttgagcaagccttccatcagacattatcacctcatgttggaagaacatatttttaggctgaaccaaggcatgtcgaaattctgggctatcttctatacgccgcgaaaatagtggctgagaaggaaggtatagctgaagggtaccgtgtcgtcataaacaatggacctaaaggatgtaagcactcccatgccacatctcttttctacttactggggtttgcacatgttttcacttttcagtatacatgctacacatcatccttcaacgtattttcggtgttgatacccatgctcatgcatgagctcttttccaccgccatatttttcagtatttatgctaatactgtatcatcgctctgtccacaggtcaatcagtctatcacctgcacttgcatgtactaggtggaaggcagatgaaatggcctgctggctaattaaccaagtgggatgctttctgtactattgcctaagttctcttgtagtaagacaatatgatcggttgaagtaatacccgcattggtgaatggtgttttctatccatctgtaacgtctttgttgtcaatgataccttcacaacagagcccgtgagaatgctcaaagaatctgttagtgagattgtctggtcgttctgtaattacttgattcgagcctctaaagtttacataatcgttcggccacaatatttatttgcaatacggatcgagggtaataagctagattcttcgtgctgtaatgtagttttgactttctcaaggcaaaacgatcgattgaattgaaagaacagagttatcgacttgtctaatgatgcttgttttaatgttttataaatctgattttgttattcaaactggaataatatagctggaaaacgggtggatcacgtttcatgcagctatctccagaattgaattcagaagataaacaaacccacaatccctgagctgcaatctcaatacaatcaagtcactgtcacttaatcaaagtttaaacaaacccaatcctccacctgtattcagatgataagcaaatcaagagctgaatttcaaatggagcacaaacggaatgatcaggacactacaaaattttcatgtctgatttgcaagaaaaatgtttcagcttattacattccttgggactcctctatccagaataatataatgtggtaggagaggcgagatggctcattgtcatgatggtgagttgctgcatagtttcttgaaatccagcagttaggggattgatcagtgtttgccatcttcttcctcacaaaacttcttgtacttctcatcatccatcagcgagtttaactcacttggatcacttatcttaaccttgatgatccatcccttctcatatggacttccatttatctgtgtaaaattgcagaagcaaattgtcaactgaacatagcagtgattactcaaaaattagtctagcaagggtagcaattgcgactcacaaatcctggtttttcacttagttcatcatttacttgaataatctctccagatactggtgcattgatatcactggttgctttcacactttcaaccgcaccaaagttcgttccttgtgatactgtggaaccaacttctggaagctcaacatacacaacatcacccaaatggtcctggaattgaaacaggacatattaagccatcacactatcacagaaaattctattttgaggaaaaatgctgtaatgcatgtcaataacacgttgaagttatcaactcagcaagagacccagtaatatagcatattgaaggctgataaaatgctggtgcagcttgcaaatgtatcaaactgattacctgagcatggtctgtgacccctatggttgctgaatcaccctcaaccttcacccactcatgagtatcagcatattttagatctttaaggactgccaagcaggaaaacaaatatgcattacttattagagtgataggctgacagcgaagcaatggatattgtattcatttgaaaagtttcagtaaatgctccaatcagttagatacgctagagggatgcagtagcagtacactggaaaaatctaaaaagatgttttgaagaaacataaaaccaagttgagaaaacaaatatggcacaaggtgcatgaccaccttctcttgggatcacctatttttatttctgaaatagaaacaactataaccactacatatggaatagaaatgtaatccgcatatatgttgtgttgcctgtgtaatctagcaagatgtaatttgcagtctagtaccaatttttggaagccctacactgtaattccataaatcatctgcacatttcatcatctcaaattctcaataaccaaaagggtaattcacatttcagtcatccaatcggtgcagagtcttgcctatgaactaatgaacaccccaagaaggaactagcaactagaaagtctagaatggtgcatcaagccatcaaaaacaaataaccctaacattagacctaatcctcctccctgatataaacgatcgacatgcctcacaatgaactatcgggtcaccgctatactttacatacgaaagtctcctgcaaacgaactgcgcaaatctgtgacgcgcgcacacaagcagtgaagcaaaaacatcacaaaatttcagatttaacagcatacttcctcccgaaacccgataattagggtagaaacagccgagtcaccccgtcccaacgcgcagagcctttgatccccaattccccataccacaaacagtacacaactacacatataatacaggcaaaatactaagcaggagggaggacaaaatggcaaagcaggagagggggcagatgccataccggtggagaaagccctggggaaggaggagatccgaaggtaggaggcggtgcggcaagcccagagcgcccttgaggcggcggcggcggcggccatgatcgagcgagctgttccaccgccgagctcttcgagtggaccaaccccgccgccaccttggagagagaaagagaaaataatgggctttctcttaatgggcttttgttagtgggctgtagtttaggcccatgttgaattgggctaaactgggttggttaccagtttgcctctgacagcttgaagagatattggaaaaagtacaccgaaggtccctcaacttgtcatcgagatacaaaatcgtcccccaaccacaaaaccaaatatgtgacatccctcaacttacaaaaccgtgggactacctatacatttgttgacaagtttttctccaaaaatttgacagatgtaattatagtacaatcgtagtgtaattacactgtaacttatatgtaattacactgtaacttacatgtaattacagtgtaacttatatgtaagtttcacataattttgaatcgttagatctattacaagatttgttttggtgaggaagaaaacaaatcatagcacacatatgtgaaaaaaaattgttcccacgacctccattttaccgaaataacatgttacagacagatttttgaaagttagatataagttacaccatagttacagtgtaattacatgcaagttacagtataattacactacgattgtactgtaattacatctgtcaaatttttggggaaaaatttatcgacaaatatatagcaaaatcagaaaccgtttactctaggtccttcggtggttttgaccctggttttatccgacatggcggctgagtcagcgtgggacccgtgtgagcccccacatgtcatactgtccacgtcagctttctctttccctcttctctcccttcctcctcctcctcctcctctctctctcttctctcttggcatggcgtgcatcgggtggggaggagaccgcgccgctcgcccacgccgcccgcgccgctcgcactcgccggccgagtcccggccgtgccgctcgccctcgccagcgccatgtcaactttcagctgtcggcgagtctgccgagatgagcggcggctggccctctgcagcacggggccatctctctaccgccggatgcactcaaggacaacgcccccgctgcccctaccgtcgacaagctcggccgcgcgcccgtcggcggccggcgcggttgggctccatgccacgggaagctcgaccaccaccatggccccggcacatcgccacacggcttgctgcgctctgcggtcgacaccggccgccatgttatggggcatctcgtacgtcttggtgaagcagttgcccggcggtgaggacaagtctccatctagcaccacggtgattccattaatgctcattcgcacacgttgcatccccagctccatcccctgcagtctctgcatggcctatgacaaggcagcaaggctgttgccgacaagctcctttgccgctgaagaaacccaccacaaccgtgatgccgctcccgcagctcgacggccacgacctcgcgccgacgtcgtggtcggaggtcagcaaggccctggaggtcatcaagcctacgctcaactccaacacgacggagaacgccaagagcccgcatggcaggcggtggagacgtggcgccgaggtcgtgtcggcggcaggaggatcccccgtcgtcgtggacggcggagaggaggccgacgcgatggcggtgggagcacgcggataggaggccggcgcaacgggcagcctttggcggccggctgctggtaggggggagcacagtggagaggaggccggtgcgacgggcggcgggcggtggccggcgagggaggagcgcggctgagaggagggctggcgcaacgggcggcagtcggcgacacggagcacgacgacgactcggggtccctcccgtcgtccctatcccagccgccgcttgccctgctgccgctcggactgcccccgtacttagccgctcgccctgccgccggagttgggctgagacggggcgccagcagcagtcgtcaccgcactcgcctgccgccaccgcgctcgcctgccaccgccactgccaccatgaattggctcaagctcggttgaccgccggccgcccgtcgcggcgccgtcctcctcctctcccgcttcgcctcgttgacgcccgcgccttcccgccacccgcgacgcccgcgcctccccgtcgacgcccgcgcacggccgcggcacgcccacgccgtggagctccgctgggctgccgttgtcgccgccgccgaccgccgtcgcggcgccgtcctcctctcccgcctcgccccgcccagcggccgccctgcatagagagagagagagagagaggaggaaccgaggaagaccgaccggcctgcacagaagagaagagagggagagatatgccctcatcgtttggcttttcttttaataagccaaaacggcttattagagaataaaaataaatttgtaggtaaaacttttatatatgtgttctcggtgacttaaaagccaatgctgaaaaagaaactacgttgaaaatatctcaaaatcaatgtcaaaattaagtttgaaaattcaaaatttggctttttctttggctgaataggccatccgatgggagccatagatgactcagcctaacatgtagggtccacatgggtccatgctgactcagccgccacgtaggataaaaccggggtcaaaaccaccgaagaatctactgtgaccagttttaattagttgagggatgttcggtatctagttttaccggtatctggttttgcggttgagggacgattttgtaactcgatgacaagttgagggaccttcggtgtactttttccaagagatattctccaatagaatattcttctcctctgatcccacgaggaacgttctctagattgcttaaaaaccatccaaactgttatgaaaaattctaaagaaatttgaaaacgcttatacaatatatttatacaactccacaaaatcctaggtctaaactcaactcgcacgtcaagataaaaaaaagataaaaaagacaaatttaacgtatgaatagcaatgtactattcacatctaaatttatctttttttctcaacgtgtaggttgaatttggacatgatttttggtaaagcgatagatattattataccctatattgctaaaaaaatcataattgtttactactatttgtataaaatttaaaagaaaaggtacacgagaggatataatcccgaaggattagaatccactcccctctcattttcgctttttttttagaattggtccagaaattaagggtcatttctgtacgaaaacgtaaaaataacttaaagttacattaagtggttaggtcgtcattatcgtcctaatgaaattattgcgtactccctccgtcaaaaaaaaaacaaactctggtttccgtgtccaacgtttgaccgttcgtcttatttgaaaaaaatataaaaaaaattaagaagataagtcacgcataaaatattaatcatgttttatcatctaacaaatatgaaaatactaattataaaaaaaattcatataagacgaatagtcaaacgtcagtacggaaactcagggtttgcctttttttaggacggagggagtactggttaggtcatcataacagctcattcccactatatatatgtagtacatttttcgatctattccgggtacacgatcaacagttcgcaccttgattgacgctaattttagcccaaaatactcccaacaagaaaacaaaaagaaaaaatgaaattactacagcaatcagcctcgggaagcagcaaatttctcataggaatttcactgtaaacaacacgttgaaaccaacggcgccgaatgtgcaaaattatcagcagctggagatcgatcgatcgaactcatcgaagacgctgtgcaagcaaggacagtccacagagccggatacgagtgcgtacatcacactgcagctaagctgagtagggcatcgagcacgcgctgaacggcagcatcacgaggggcgggtgggcgcgagcgcgagagaccatacctagctgcaagccttgacgagtagtatcggagttggggacgacgaaccataacagtagggatgaagagggtcccagacgaaagcctagcccagtgttcactagaccagcaatgggcacggtcatactttcgagcgtggtaacctttctggcgacgctgtcgaggtgcccctttgcccttaggcaaggatctctataggaaaactttgtccagttttttagacaggcagcaatgttatgctatcacgtcgcaccttaatgaagacgttgtttttagagtttccgtcctatggtgttgttgtaagtctagcagtgtccggtctcaaatagcattagtcgtttcgatgcttgggtccctttttttgtagcttgtgttcgtgtggttgagatgtagtgtggtttcagggcgtgcgtttttagtgcacgtcctttctcgacaaccagctgtcaattcaaactcttttgatcatccctaccaaaataagattcttcgtccgcttttggccattggcatcaggtgccgcgtcctttatgcaccggaagatagcttaatcattctttaggccccttcaaagaaaatttataggaattttagaggatttcatttctatagaaatgtttcctacaaagtcctttgaatcaaaggaatgaaccctatggaatcctatgaaattcctatggaatgcctcttcccgtacaagttttggaggaattttaataagatgtagaacctcatagaagaaatcctttgagtttttatctctccttaaattcctgtgtttttcctgtggtccaatcaaatggtcattcctatatttttcctgtgttttgcaatcctctgtttcacacttacattcctgtcagaatcctatgtttttcctattcctccgttttcttcattcctgtgattcaaaggggcccttaagcaccaataatactacttcagaataacaatcagtagtgtactggtgtgtttgttttgttgctccctttcttcaaagattacgacagattaccagtattatattgcgaagaaagaggaaatgccttcatttagtggaatcaagatcaaaccggacccaattaattaattaattactccctccattacagaatataaaaattttaaagttggacacagttattaagaaaatagttagaagtgaatgatgtagggttgtgatcggataagtagtggagataggtgagaaaaatgaatgacggagggttgtaattagttagaagaaaatattggtagagaagttatattttagaataaattctaagagataaaatttgttatattttggaacggagggagtaaatcggactaataaaactacaaaatgtaacaaacacactacctcacctaaagctaaccaccgcaaactgaactagcaagctggaagaactctgcaaaatttgctacctatcgacctcgtcacctccgctgtttgtttgcagtcattcgcagcggcagcgatggatgttgcggccgccgcgggcgtcgttggtgggttcttgcaggtcgtcttcgacaagtactacggctccaagctcgagcagtgggctgctcgctcgggcctgcacggcgacttcctcagcctcaagaaccagctccacatggtccgtgccatgctcgaggcaggcggcggcggcaacgccccccacaacgactccctgcgcagcctcatcgtggagctcaaatccgctgcctacgccgccgacaacgtgctcgacgagatggagtactaccgcctcaaggagctcgtcgaggacaccagtggccgcgacggcggcgcaccgtcgtcgtcggctcgccaggtggtcggccgcatactggtgcctgcgcctctcctgtccaatccattcaagcgagccaggacgggcgccgacgaagccttgcaagggcagggcgctgacacggacacccccaacttcgatcaggatgcaatgtcctccaagatcaaatcgatatcctgctgcctcgagcagattgctggcatggtgcggaggatcatcgagctcgacaagttggtgtcgatggcgagcttagggcatgtacaaccagaggtggtggtaagtctgcggcagacaagctcctttcccactgaaactaagttgtttgggagagatgagtctaccaacaacatcataaaccttatgcttagaacagatatggagtctaggtacaataacttcaatgttcttcccattgttggcattggtggagttggtaagactgctcttgcccagtctgtctacaatcatcaaagagtagttgattcatttcaagtgagagcctgggcatgcgtttctgatactcttgatgtgcgcagagttatagcagatttgatagattcgatcgatggtggccaagaaactcccaagtttcatagagtgcctagtcttgatgcaactcagagaactctactgaggaaaattgaagggaagaggttcttgattgtccttgatgatgtgtgggtcagcagccactgggagaagctttgtggtcccttctccgcggggatgtctggaagcatggttttagttacaacgcgacagagaaaaatcgccaaggccatgggcacatttgacagtttgacactgcacggtttacatgataatgaattttgggctttcttcctacagtgcacaaacatcacagaggaccacagcttggctcgaataggcaggaaaatagctctcaagttgtatggcaaccccttggctgccaagaccatggggagattcctttcggaaaaccacgaggaggagcattggtgcaagtttctgaatagaaacatatgggaactaaaacaagagcctgacgacgttatgccggttttgttgttgagttatcagcatctccctctaagcttgcagcgatgtttcacctattgtgccatatttccaagaggctataagttcactgagcaagagcttatatttgcttggatggcacaaggccttgttccaacacctggagaggatcagacattggaagatgtaggaaaggagtaccttaacgagttactcagttgctcattcttccatataatcgagagtggccactacatgatacctgggttgttacatgatcttgctcaacttgttgcagaaggggaattccaggcaactaatggtaaattccctatctcagttgaggcttgtcacttgtatatctctcattctgatcatgctcgtgatatgggcttatgtcatccactcgattgttctggtattcagatgaaacgccgcatccaaaagaactcatgggctggcttgctgcatctaaaaaatttgcggactataatgttctctgcctcttcatcaatttggtctccaggttctgaggtagtctttgtccagagcaattggcctagtactatcagactgttgtctctgccctgcactttccgaaaagagcaacttgcagcagttagtaacttcatacatttgcgttacctagacctcagatggtcacgccttgaagaattacctgaagccgtatgcaagctttacctactacaagttttgaacataaagcactgtccgtgccttcttcatttacctccaaggatagccaacttattaaactttgagcatctgattgctgatgaaggaaaacatttactcacaggagttccatgtgttggcaatatgacttccttgcttctgttggataagttctgtgttaggaaaaccaggggctttgacattggacaactgaaaaggttgaggaacctaagaggtttgttgaaagttcagaatctcgagaatgttgatggcaatgaagaagcagcaaaggctagattgagtgacaaaaggcacctaactgagctgtggctgtcatggagtgccggttcttgtgtacaagagccttcagaacaataccacgtcctggaaggtcttgcaccacattcaaatgtaagttgtctccatattacaggctataggggcagtactaccccatcatggcttgctagtaatctcagccttagctcactagaatatctttatctagattattgttctgaattggaaattcttcctccactgggactcctccctcaccttaggaagctgcatatagtcaatatgcacgcgctaagaagaattggctctgagttctatagcagtggtcaggtggtggggtttccatgtttggaagggctatttatcaaaacaatgccagaattggaagactggaatgtagatgactccaatgttttccctagcctgaccagtttgactgtagaagattgtcccaagctgagtagaattcctagttttctatggagtagagaaaacaagtgttggttcccaaagcttggtaaaatcaacatcaaatactgtcctgaattggtgctgtcagaagccctccttattccacgcttgccttggctccttgatatagacattcaaatttggggacaaacagtgataaatttgcgtggtggctgtcttgaggtttctgaaatcaatgctaatactagctcaggcccaataaatgctgttctacaattgcattggctaaaacatgtgtctagttttcatatttgggcacaggacagtctttctgtacacccctgcaagcaaaagacagaaccatcagcatgtaattctgaacacatggtaaattctctacaaacatcagcagagaaagttgaagtcacagggtatggtattactgatgaattattgtcagcaattttggagaatgaaatctgtccttcaagtttatctatatcagattgtccacaaataacatctcttgatcttagtcccctaagatcattaaaatctctggtaatacacaattgtgtatcactaagaaaactctttgaccgacaatatttcactgctcttagggatttggaagtgaccaatgcatcaagttttgctgaagcatggagtgaactgttaggatccagatatgcagagtggggtcaagttactacctcactggaatctcttacagttgacagcaccttattcctcaactcccctttgtgtgcagtgctcacttctctgaagaagctaacaattcattcggatttcagggtcacttccctctcaagacaacaggtgcaggcacttctactcttaacctctctgcaagatcttgggtttatacaatgctgcaatctacattctcttcccagtgaactgcacaaaatatacactctcaagcagctcgagattgattcatgcccatgtgttgagtcattgccaaataatgggctgccggaaaagcttgaaaaattgatcatcagaggctgcaacagaagattgtatacaggtgcatcaatgatgggttcaactagcaccaaagtgcacctagtagatagatgatataatagatttaggttcatattagtcggcgaccacgaatataaatagctcgtgcaagtgcacagtaatcaagtagtctacgtagtcgcttttggatgtcaggctatgcaacggtattaatcaaaagatttattcacctatttttatttctgaaaactgttatagatacaaccgtttcgtatggaacaaaaaggcaacccacacagatgttttcatctgacttgataattcctcttaacaatctaattaccatgacatgcatcctccatacattcttagatctcgataccagaatcctccaaataatagctttactttttgttctgatttgcacacaaaagtctcctccaaacgaactgcacaaatcttgacgcgcacacaagcaatgcagcaaactcatcacagaaattcagatttgacagcatgcttccttccgaaacccgatacttagagcagaaacagccgagtcaccccgttccaacgcgcagaacctttgatccccaattccccataggccataccacaactacccaactcggcaactacacgagatacaggaagggataaaatggcgagacgggagagggggcggatgccataccggtggagaaagccctggggaaggaggaaatccgggaggtaggaggcggcgcggcaagcccggcggcggcggccatgatcgagcttcgagctaattccaccgctgagctctgcgaatggaccaaccccgcggctccgagtccttgaagagcgagaaggaataagttcacttgaggtccctttaacttgtcaacgaatccaattttcatccttcaaccagaaaatcaaatacaacgggtccctcaactatcaaaatcagtgcaaagcaaatccctcaacggttttgatggtggttttggctgatgtggcgcctacgcggccggtttgacttagtacttgtcataagtggcggtaatgtggcacgggaagcaaaatataaaaataaaaaataaaaacaaaaatgtggggcccacatatcaatcagataaaaggaaaaaaacagtgggacccaccatcctctctgtacacggacgacgggagaggagcagccgacgcgtccttctctctccctcccggccatccttcctcaccggcgagcgcgcacggagagggaaaaaggcggcggatccgttggtagctgcccgccgttggtgttcggtttggatccatcaataaccagcccgattcctcgcacccacgcaagatccaaaacggaaacttagacggcacgcggatccaaaccgaataccaacggcggaggaagaggcgcgcagtgaaagagagagaccagcggatctaccacgctcgccatgcgagaaaaagacggcgcgcaacggcgaactctgatcaaatcccaatcaatagccggcccgattccttgcacccacgcaagatccaaaatgaaaactcagacggcgcgcggatccaaaccgaacactgttagatttaattgggtaattgatccatttaaatcaaataaattccaaggctcattatgctaggaattatgctaggaattcatgtgtattcattttcttatgggatatcaatgggatgaagagtttatgagaattaatccatttgactagggaattggtaacttatatcaattactcctaattgatggatggttgatggttgtgtagtggaggatggttcatggctagttgatgacaattagttgctctattcctcttcctattccattggtaacctacatcaattactcctcattaatggttggttgatggttgtgtagtggaggatggttgatggctaattgatgagaattaattattccatgactcttacccttcatcttccattccttctataaaatgagaatggatttgatctccctaagaagaagtgagacacactttcatccatttccaaggctgttgctgctacaataatcccatcccgacgagtgtgtgcacacgcgttgggagagtaggcctccgaaaccatgcaaaccatgcactgctacgacgtttgcacggacgggcgggtgatcaggtttttggggagcgcaaggcgcgactactcattgttcgtcaatgtctacttcatcttcaccaacatgtcgaacactggagacaacggcaacactggagacaaggagaaggaggctcccgacaacaccaacggaggcaacactgcctcaaactctagcggaggaccattcttgggtataaccttcttacattatttcaattagaagttttactgttaatgttcatcgcaatgtcaacattgcgttattatgtgattgttgatgcttattctacgttaagcatgctcatgttgattacattcacctctatcactggatcaaatcccattgtaaatatcatgtttaacaccaacggcgggaaacgaccagtggatccgctgccttttcccctctccgtgcgcgcttgccgacgaggaaggatggccgggagggagagagaaggacgcgccggtcgctcctctcccgtcgccgtggatagagaggatggtgggtcccactgttttttccttttgtctgactgacatgtgagccccacattgttgtttttattttttatttttatattttgcttctagtgctacatcaccgtcacgtaggacgaggaccaagtcaaccggccacgtaggcgccacatcagccaaaaccaccatcaaaaccgctgagggacctgctttgcaccggttttgatagttgagggacccgttgtatctggtcttccggttgaaggacgaaaatcggattcgttgacaagttaagggacctcaggtaaacttattccgagagagaaagagggagaataatgggctttctattaatggggttttgttaatgggcagtatttcaggtccatgttgaattgggcttaactgtgtaggttaccagtttgccactgacagcttgaagagatattctccccccccccctctctctctcttttcgaaaatgctaatggcgatcgattgcccctagcgatcaccctcctcctccatgtggttttcttttttggcactgtattacttttctattttagtaaatttatacacctaaactttgtacacctcaagtttacatatctaaagtttatacacctaaagtttagagacccaaagtttataagtcaaaagtttatatatccgactcaaatttgaatttaaattcaaatattttttatatatagtatttctatacatctaaagtttatacatataaagtttatagacccaaagtatataagtcaaaagtttatatacccgattcaaatttaaatttaaattcaaatattttttatatatatagtatttctatacataaatttttctaacttttttttattttttttaaaaaaattatggtgtagtaggaagagaaaaaggggaggagaaaggggggagaggagcgtatagggggatgggggtgatcgccggccattagcaacgcccctctcttttcccttttttttagaattggtcgagaaattaaaggtcatttcggttagaaaacgtaaaatatgttaaagtttcattaagtggttaggtcgtcattatcgtcctaatgaaattattgcgtactggaacccaatgtgattagtcaataacagctcattcccactatctatatatgtagtacatttttcgatctattccaggtacaagatcaacagttcgcaccttgattgacgctaattttagcccaaaatactcccaccaacaaaacaaaaaaaaagaagaagaagaaattactacagcaatcagcctcgagaagcagcaaatttcccataggaatttcactgtaaacatcacgttgaaaccaacggcgccgaatgcgcaaaattatcagcagctggagatcgatcgatcgaactcatctaaggcgctgtgcaagcaaggacagtccacagagacggatacgagagcgtacatcacagtacagctaagctgaatgcatcgagcacgcgctgaacggcagcatcacgaggggtgggtgggcgagaacgcgagggaccatacctagctgcaagtcttgatgagtcgacctccatccatgcatggcgctcgcaagattttgtctcactgccctaccgaaattgccactgatgatatacatatagatggatggattgacacaatgccagaagtatcgtttgagcacgcatttttctttggtcagaagatattagttcttgctggtgtgagaggctgaagctgccagcatgatctggtccatgagttgcactgctgaatatattgaattcagccaggagctgctactgcagttctgatctcgatctgcattcgttgttctgagctatgtatggatttgatcggtttgaaggcatccatgtctttaatttcatcgatcagatcatgttgcagcttcactctctcactaccagcaaaaccatctcatcggggctccagtcttcgatcacaggttcgtaattgtcttaaggtaggttgctgatcgatgttatcttgttttgtcatgcaatttgtttctgatccatcgagctgttgatctgtagttcttttttgactgtgatttctcagcaggtcatcactataagctgacaagctatatgatgcaaccttttcccgaacttctatggactatggagaaaggaggtcagtgttctttgttcctgtaacgattaaactattagccatatacttctcattttctcttgaacatggttttcttctttgtgtgcacttgatgatttgatacagtacgatatattgctatctaatctcacaactgttgatacattctcagttggaactctgagcaattttgtcccccatttcctcctcggacacatttactacactgctatatatacattttcacaaaaaaacaatgctccagggacattgttagttcatctgaacttgcttctgcagttctacatctgtactgttaagtgtttcaggcaacatcacgacaggagccataaatcctttcagctacatctagggagcgcaactgctgtcctcgacactgtgacaatattctacagagaatgtgattttcagaaaagaaaaaaaaatgcaaagcattggccattggccgcttgaaatggtttttgttttttagagaaagcattggccatatgcatgtgctcctacacgattttagcgactccataatcacaatgtgtgcttctcatgttcatcttccggaaagcatcctctttccccaaaataatagctaataataaaatgactcatatcacattggattaagcattgctatagttcctgtgaattttaattattgagaggacatatcaaatactgtatgacatatgtaagaggtgtcatatctgaagccctgaaacatgtggtgtgagcagctttgaagtgcaatagtacgtaggagtaccacaatttttgttcctttttatcaaccaaaacttaatagcagtagtacagtctaagcatgaagagatgtcggtgaacacatgggcatgtagcctgggggacacgaccataatatcgtcacaggttagcgtaacacatctacatgtgcaaatgtgatccttgcctccgaaaggccatgcagcgtccatgctgcattaactctgacaacatatgataagattcttctatttgtgattaacagcgacacagatcgtgccaggtttcggtccagtatcttgcacattggaaaagcctactgcagaaaactaatggcagaaaaggtcttgagaaacagctagccatcctcacgttccatgacatctaattgcaacgaattcatcatcaagttctattcacaaagttagctttggatgatacatagaatctgaaagcaacataccaacgcccaaaaccaaactggcagcccagaagcttcacctgagaaggcttaaaacagtatgcacagtggcatttgtctccatacacaacatgtacaggtctcattcataacagcaagagcgatattatagcttagtgtaaactgctgcaactagaatatggcaaaatatagtacaccattatagtttgtttgtgccgggcatttctctcatgccgaggacgccaaaagcttattattattcactgtcatctagcaatacctgaagcgaagcctatttcaagttcaaaggtagcagacgactgactttgcattcttacaaacttacaccaaggtccgaacaagaccaccgcaaaaggctagggaaattgcgtcatatgcttgccaccagtcttatgcgtcattaagagcaaggactcctgggagggtcttgccttccaacagttccaagctcgcgccacctcccgttgaaatgtggctcatcttgtccgccaacccggccttctcgacagcagcaacagaatcgccacctccaatgatcgttgtaacacctttggcggtgatatcagccaatttcttggcaattgcctgaattgattaagaacacatttagcttcaaacacaaaaacctgtgctgataaatctgttcaaaaacagtactcacatcagtgccagcagcgaatttctcaaactcgaacactcccataggcccattccagatgacagtcttggtagtatccaaagtttcactgaaagtcttgatggagtctgggccaatatcaaggcccatccaaccatcagggatagcagatgctggaacagtctgcatatggtttcatattgtcagttctacaggataactgcagaattgtagtcgcaagtactctctgatattgtttgtttgctgaatccatttaccaggcaactggccatacagaaggcgaatgctgaatgcagatatttggcatatgacgcagtgaatttaagccatgatttatgaatgactacttcaaaagaacattgccatggcagcaagttcacatttacaatgttgtgctactgaaaaaccattttcatatattcaactatgattgtatgatgcagtgaaatgaaattcttatgcagtgccattcacgaggtaatgaacaaaccttgctctctgcatccgcagcaaacttatcagctactacaatatcagttggaagcaatagggagactccctttgacttggctttttcaataagcgaggtagccaattcgagcttgtcttcctccacaagagattttccaacagcgtatccctgagccttgtaaaatgtatagatcataccaccacccagtatgaggatgtcaacctttgccaaaagactctcaatcaccccaatctttgttgacaccttggatccaccaacaatggcagcaaatggttttttggggttggcaacagctccaacaagatagtcaagttcctagattggtgaggacagttactacaaaattttaaaaggattacatatttcaaaaaatctcaaggaaaaacagcttgaattcattgcggatacaatttaaaagacaatatgcaatttggcaaaaagaatgtagttgatttcaacatgtcttgcaacttgtcactcaagtactgctgcaagccatctgctgcttgcaacttgaaggagtttcattgttctaaatggagtatatcagtaagtaaacaccaaacgaaattatgttcaccaaacagttatgtcaaaacagttcagatggtgaaaatcttgagcaatgcacaaagtaaggaaacttgtgcaataccttctgcatgaggaaaccagcaacagaaggtctcaaatacttcgtaactccctctgttgaagcatgagctctgtgtgctgtgccaaaggcatcatttacataaaggtcagcaacagatgccagcttattggcgaattcagggtcatttttctcttcctccttgtagaaccgaacattttctagaagcagaacaccaccatctggtaaagtggcagccaatttctggacttcctcaccgatgcagtcattggccatcacaacctacgacaaggacatcatcaaaacatggaaatataagatggtctaccagtttgtagtaagcagaattgcagaataataaatatgatttatccttttatagcatacatcaacaccaagaagctcagacaagcgcggaacaagaggcttcaagctgtacttcggggttacaccttttgggcgaccctgaaaagacaaaattgattgcattacaacagaggacaagagaaaacaaaaaggggggcgaaagaacattatcccaagcatagaaacacggttagctgctgcccttttttgaacatacaatttcagtttcatttgccattttaacataacccaattatatggcatggggatttttgaggactactgcactttaaacatgtggctctttctataaccaaaatgttacagaggtggattttgcatttgacttacacaacataggagaaccaaagtttaaagaaaccgtggtgcattacagtgattttgtaaaagggaattgtgcctcttgcaagcaagtgttgggcattgatggaaaccattaataggtatttgtatcaaaattagatatacataataacaacacaattaagtaacaaatgccacattctggtagtaaaatcgcaagataaataaaagatcactcaaaacattactctgtgaaatcatcgctcactgtaatcagtctaaaaatacagtattaaatttatattgacaccttaacctcctatcgtaaccatgaatctgcacatagttaccacttaaaattcactgtgaacctatcaccctttgatgaatcataaaatcgatactgtttatatagcatgtcacatcatccaaaacggaccaccaatctcacatatcacacaacctcatgctcaaacacattatagcaacgtagtaatcctcaccagatggctggccaggatgaccttggcgcccttccccatcaagaacttgatggtgggaaccgacgcgcggatgcgggtgtcgtcggtgatcttctggctgtcatccagcggcacgttcagatcggcgcggaggaacaccttcttccccttcagatccgactccgtcagggtgcccacgctcctcttgctcgccatttctctctcgcgtcactacacgctgcaccaaatccgaccccgaaaatctcaaaaattcgcacgacggccttgcaatccataaatcggagcgatcaggggagatgaggtaagatttacctgccaaaaaaaaggatcgaaatcggtggcaaagttcgtcgccgctcacgagattggggtaaaggagagtttggatacgaggaaggcacgggaaggtgctgggcttttctttatatcgtcgttgcctgcagttgtgccacctgtcaggctccttgatacgtgtgccagtggcatgtggagccagacgaaatgtgggtcccactgcacgtcaaaggttttggacctttcggggtttacgctttcggcgccgtgggttttggatgaaaggatttgttctggtatggacgagtggacgactcagattgtactggagttttgaacaatttttttcattaacaactaatatgagacggtgccatgatttatttacgggatagatctcaatagaaaactgttgaataatggcagcaagtgattgagttaaaaaaaattactagactaacatcatataaaatattaatcagaaaagaaaagaaaaataaccacccgagcagcgtctatacaaaacctagaagaaaactaacacaaaactcatcactagactaacaaagaagctacctataacatactctttttataacaaattatactccttttataacagattgatggctttgggcatgcctttctagtaaccattaaaataaattatccactagagtaagatatagacgtgtttaattcgtagtagcacttcagttaagtaagtttgactaacatatactccattactttaatatttgacttgccaacttaaagtactttgagtaagccacttagccacaatatttagctagaagtctctacttcacttttctgtcaaaaattgctggcatatggttgatttcttaggttcaaaaattgcaaggctagcaccctgtaaaacattaaccaggaaagaaaaaaaccaccaccaccacaccaagcccgatagtgcctatataaaacctaagagaaacctaacaccagaccagttaccgctaaaccaacaaagaagctatcttatatgttgtgaactatatgatcaatggtggattttatacgttgatggacttttcatctatagttgctatgacacaagtggatcccacctttacactcttgagaaattatacattagacatgctctcactacatcaagcatcctagtgattttcatatcctgagaaattatcctacaattgtttgctttgtctgatctattccctatctccctcctttttatatcgtgttttttctaaaagtcaacttcttttagtttgactaaatttatagaaaaaactaatgagacataaatagcagtatgacttaaaaaaagtcaaaatgttttttcaatatgaaacggagtatgcattgcgagtctgcgaccctaataaacaatatgaaagggagtacgcattacgagtctgcgaccctaatcaataacatgaggaaaggtcacatatatagaaatttttcgcataaaatacaccgtttaacggtttgaaaagcgtgccaacggaaaacgagaaaaaaatatgtatctttataaagttagaacgggccaaagtaaaaatgatttgaaatgcgagaaagataaatattttttttaaaaaaagttaaatgctagaacaataaataaattaaaactgatggagtattgtaattgggaaaattcactattttcttcttcaaatctcgagctcgcaatactcaactctatctaggaacgttgttctatcccgtacatgttccggttacagaacagttaatttgtacctcagaaaaacagccactagaaggtcattcagagcagaggggcagctatccatgagaagcttgtaaccctccgttgcagcgactgcgtggaaattctcctgagaagccaagatgaactcgatgcacctagccttgagcttggtacatccatggcgctccgccagagccaacgccatcgcggcggtgtccacgctaatgccagcgtgcaccttctccgcgcagatcagcatcagcctctccacgccgtaccgatccgcggcttcgagaagaccatacgccattgtttcagcctcgacgtcgtcgtcatcttgctccggcaaagtgtcggtgtagatgaagtggagcagggtcctgaagacctctgcctccatgtccttgatctcgatgctctgcgagtctttctccttcatgtcgccgaacagctcggccatgaacaccggcgacctcgcggcgagcacgcacctgtgcgccgcgacaggctcgccggagacgaggaacgtgatgtcggcgccattcttgctcgtcagcatctcgccgaggtgcttctgcaggtcggagagaggcgccggaacgcttgccgccgcgttcactggtgcttcgagcagaacggtgatcgcgcactcgatcagcaaggagtcgtctggttggacgtatctgtattcagacgcatagctcctcgacaccaagaacatgtcctttggttggccattggagaagatggatgtcactatcacctccttgaaagagctggatgcggacgcggcggtttgattgatctgatgatcatcgacaaggcggcatctgaacgtcgccgacacggtgcgctcgccgtcgctcgacaaggtgaagcgcagctttatgtaggggccggagttgcgggagctggtgccgtggtagtaagcggccgggaagacctcgatcagccagtcgtatccgcccacggcgatcgtacacgacgtgaccaaattttgcctgttcgcggtcgccgagtacccgttgatcctgagcagctacacgcgccgcgccgcctgcgtgaggttgatggcggcgttctccatgtctctgggctcaggcgtcgatcgagcgttaactaccggctatatatatatcccttcgtggatttcaaatcgaaacgttttatcactagatttacaaagagacataacttgttacaggagtctgttttagtacccaccatctacaattaataacaggtatagttcgcaaaagcaaaccagaaatatacaaatgtttcggaaacaaggtaaacaacaagggctaaaccatcaatccctaaaaatttcaatgaacatccaactaatttttcgttttttctccttttaatttgtccccttgatgaactgaacttttagacgagccggagatttgcaatgatattgcaccgccgcagtgtcgacgaattcttatgggattctacaaacggacaggtatctgtggaggttctgagcccaaaaaaggagagggctgctacgggatcccgttgcaacaggatagacatattaattattctcttgcacgagtatcataggtatcagatcctaggtattacaggtgttgggtaacaggtatcacagttatcgggtactatgtagctggtaccacaacaggtatgtcttatagaagagtatcccgttccaacaggataccgttgtctaggttttctgaaaaaagaaaaaaaaacctccattgaacattgaaaaataaaatttgagcttgtccaatccatactgtcgtggcagccagcgatgacgtggacatcgcgtcggccgaatccttgatgtgggccgcgtgatcctcggttgggccggggatgtttcgttcatcaagagttcaagacctgctgtgtccaatctgctgtcattaacacgtaccggtatattattatgcaggttcaaaggaaaataaactccatcgtacattgaagagcaaatttctttatgagaaatgagaaatggaataaatttgatcctgagtcagcagttcaactgtgcaaaatcaggttttgcaacaaaacaagttttagcacaaaattttcagaaccaaggtttatcattgtttcagatctccctgccaaaactgaccggcaatgagcctgaaaactgatcactgcattgtgcctctccattcctaaatgtcaatctattttccccagagggatttgattctttgaaggcgagaactactccaatatgtttttctgaaccgggatatacccgtttcaattacagattaaactgaaatgaaaggccctacacagacagagtagcagagggattagacagggttgcgtctaattactacgaattgcccactgcagaagagaaccgtatgatcatgggcatcacacaacagatccaatggcaaaatcacaaaagaaaaggatagagcaaacatataagcaaattgaagatttgtttgctctcagcaagtccgcagcagctcatcgccagcatccaggagcaacttgaaatcttctctgcttattacctgcacaataggaaaatttttgctcagatgccaaatggcccataaataaatattaagaacagagcgaagctagtgatgattctgaaaaaaaaaaaacaggttctcctgcttaaagaaatgtttctgaaaaataaacgtactgattactagtggcaacaggcatgttctcatagcctgaaaggcttgaaacgcagaagcatatttctgcagtgcagtagtagtattgtactaacacgtgagaaaaatacaagaatgaccaaggtaatactagctagtactagtgagtagtgacaaataatgggcttgtacaaagtatgcactactccatgactgggaagaatcaatcaaaacttctagcacaaacagagatgatgcattgccaaatcctagagaaaatttcacaatagaacagttcagctatgacatctctgatacgcacgtacctgcattttaattctttcttccacgggcaaccttgacaaggtcagtcaacaccgagggacagctcgcctccagatgtttgaacccatcagtggccaacacagcatcaaggttttcagccgtgccggcagcaatgaactcgacgcacttggccttcagatgcgagcagtcgtgctgctccgccaacgccaacgtggtcgacaccgtgtcgacgtcgatgcgctcggcgagcttgctctcgcagatgagcttgagcctctccagcccgtacctgtcggcgccggcgagcagatgctgcgccatcgccgtcgccgtcgacgctgcctccgtctcctcgccatcacggtggtcgagctctggaacggtgtcagtgtagacgaagtgaagaatggctttgaagaccggcgcctccatgtccttgacctcgacgcgctccgaggccttcaccttcatcgccccgaacagctcggccatgaaaaccggcgacctcgaggccagtatagccttgtgcgcggcgaacgactcgccggacacgacgaacgtgacgtcggcgccggtcttgctctccaggagggcgccaaggtacgcgtgcaactcggacgacggcgccacggctgcattcgcgctgtcgcccgccgctgccgccgccgcggctatctccggctgttctcggagcacggtgatggcgcactgaacgacgtaggaatcgtctgtgagatagcccgacgcctccagctcgtcccttgccatgaacacggcacggggcgagtagtcaccgggcttgtggaacttatgcgacacggtcttcatctccgacggcctcagcttctgcgtcggatctaccaagcagcagcttagctgggccttcacactgccgctgcctgtgcggggcgcgccgcgcaggacgagcttgagcgtgagcggccggtcgcgcctgccaacccagggatccttcggccgcaggcggatctcccagtcgtgtccgccgacgcaataccgcctggaactgaagaactcgccgtcgtccatggccattgtcaaggagtggcccacgatcttgagctggatgtcgttggagcgtgtcacgtcggtgagctttcccatggcgatcgatcgaatcgtatggctggactggacgtatcgtggagagagggctaggtgaggaagcgagtggaattgtttttcttcagtagctgagtgcttttgtattagagcaagtttaatagcatagtcctccaattcatctatagccaatttaagagcttattcatacaatatttacatactacactattaatatctagtcctacctgtcatacacacactgcatcttggagtccgtgctatagctggctataaatttatagctcactgcttttctttctatttatttatctctttaaaatatatttgcagctgacttatagtctgctattgtatctactcttatactatatcggtgtcgttcattaaagtgagctagtcgatcgttcgatggctcctcgggtagcgcttccggaaatgaacaggcgaattcatcagaccgagttccctctttaattaatttggataatttgaccgatggcttcagtgcaggatagaaattgattccccacttgtggcatgatcgaccaatgcagcgtttacactctaaacccctcccctcgtttttcacgtgtatgtttttcaaactgctaagcagtgcttttttttaaaaaaagtttttatataaaagttgcttaaaaaatcaaattaatacttaattaatcacgtgtgcggtccattttccatgtacactgtttgggtcgggaaaaagagtgtcgaacacagctatgtatgtatggattgagatgtacaacagcactggcaagaagtcaagaacaacccacgacttttcgaacacacgagcgaattattcgccgttgctctagtaatctaatactccatattaatatccctccacaccgtaacgacaaaaatatttttgtaattagcttagaggggtttctaggtccatcaaaaagatgattataattagagctagtgttgtatgttggtcaatttaacattgttgtaatgataaagttttaatggtaaataactatctaaccctatacagcttatcttcatgtcttcctactggctccacttttgatttacgatgttaccacagaaagagcatgatactatgcacaatggtgcttgtcagggttacgggtcaggcatatcccctacccttcgatatacgatacgtatcgacatggcatacccacgcgcatgcggatatttcctttatgatctaaggaaacctttcacgaaatcaatatacgggaaaaagtccttttcggacaagaactgggttacctacgtatcgtgctaggtctgatatgttcgagtcctactcggagagtaccagacttgcgatataaaagggaccccccggggagggcatagatcatcgaatctcagaatccacacagcctacgaagccggagcctatgaggagccaagtcgtcgagagctagtcgaatcgactcgactacaatctcgccggatctgacaagttccatcttttcctttgtaacctgtgttttccaccatataatcccacatcaactggattagggctattacctgtcaaggggcctgaaccagtataattcttgtcttttgattgctcgatgtcgtactacgtagatccttgtaccagcgtaccccaataccctctatatctggtctacgggtatcacccgtcgacagtggcgcgccaggtagggggacttggtactcaaggttctactactatgccatcaagcttcgtcgataacaatgtcaacaccagctccagccaagcattctcaacttcaacaatgttggtatggactcaagtcggtgaaatcgtcttcccggtttacaccacgatgccaatctcaaccggtcctccaatgactgaaaacgagaacgcagtggccacaaaccaagacggctccatgtcgaaaaatccacccgttgaaacggagaacggattaccgactacatccaaactcgggaaggattctgatgcggccaagtcttgtcccaccgacataaatcacgggccgacaaagatgacttccgaagctatcaggtcttggtgtcctatccacaaaaccaagaaacatacccttcaagattgctgggtattcatcaacgtccgtgctgaaattcgcgcctgcaaagaacgtggaattcaatgtatttctccgactcgggatgtctattgtcctatccacaagacaaagaatcacgatctctcgagctgcaaagttctcctcggcgccatgaaaaccccgtctcctaagtcatacgtccccgctagggataacggcaaggaacagggagcgactccagcctcagatcgattcgttggggtaatcgatctcgatcctcacgaaccatcggtcttacatcccctcgaagactacgggtcatcgacaacaagtgcgccgcgggaggtattagttatcgatgacgttggcacgtcagcgcaagccaacgcagaagcggcgaatcaatcgactactctagtccagcacatcagggctattcaagctatactgagggaaactccttacgatcccgttctgaacgacgacctcgagcgttggacagaatgattacgggagtcggtgactaacctcagcaatgcgttcaaagaggctgctaccgcagcacaccaagatcagccaccaatcggcgacgccaatggtgaagatccggagcggagggaattgcctcgacaggctacccctccacctcgtggcactggcgatcttcgagatcaaattaacaatcgccgagaagcacggcgcacacgggacgacgcaaatcgctctcggcgtcatgtttcttcatggcgccatgatcgaggaaaccgcccaaacgaggaccgagaatgcaacgatcgcgaacggcgggggccagacaatactagtcatggccgtcgccgcaacgacgacgacgaaggagatcggcgccgagataacaacgagagacaacaacaagattctcgggatccaggtcatcatcctcgtaatcgtacgccggagccaagcgacccatcgtcatcgtcatcatccgcgtcctcttcatcgtcagacagacatccacgaaggtcacgcgaccgccgacaacccaccgccccagcgctgggtgtagggctttcggtcgttccctacgtgatgtccgatggcctgagagattccgacccggggccattgaaaagtatgatgggagcaccgaccccgaagaattccttcaagtctactcgatagtgctttatgctgccggagcagatgacaacgcattggcgaactatttaccaactgcgttgaagggttctgcacgttcatggctgatgcatcttcctccctactcaatctcttcgtgggcagacctgtggcaacagttcatcgccaatttccaaggaacatacaagcgccacgcgatcaacgacgacttacacacgctaacacagaactcgggggaatcattgagggaatacgtttggcgctttaacgagtgcagaaacacaattcccgaaattatcgacgcttctgtaattcgcgccttcaagtccggtggtagagatcgctacactacccaggagttggcgacaagacgcatcacaactactcgaagattattcgagattgttgagcggtgcgcccatgtggatgacgcgctaagacgcaagaacgacaagccgaagactgggggagagaagaaaccagccgcagacgcctctgagtcaaataagaagaaaaatcgcaaaaacgggaaaaggaaagctcaagcggaagtcctcgcagcagaatacgtgaaccctcccaagcgcccagacccacaaggcagcgatacaaagaaatcatgatgccccatacacaaaacggacagacattctctggaggattgccttgttttcaaaaagtcgctcgagaagcacatggcgttcaaaaaaggcaagcgagtacgtgttatcgagaagaacgaggagacatcttctcacgaatcggattctgcgtacccagactccgacctccacgtctcacacatcttcggcggctccacaacgtactcctccaagcgggaatacaagaaagcggaacgtgaagtctgttcgacatggcagggggctgcacccaagatgaagtggtctgagcagaggatagagttctcggatgaagaccaccccaagacctctgttatcccaggacgatatccgattgtggtcgaacccactattcggaacgtcacggtagcgcgagttctcatcgacggtggcagctcgatcaatctcctcttcgccagcactctagatgcaatggcaattccgcaaagtgcgttgacaccaaccgatcaacccttccatggaattactccccaatcatcgtccagacctctgggcaagattacgttgcccatgaccttcggccaagccaacaacttccgaacagagcagatcaccttcgatgtcgctgaattcgatacagcttacaacgccatcatcggaagaactgcacttgcgaagttcatggccgcatcccactacgcatatcaagtgctcaagatgccgggaccgaagggaacaatcactatttaggggaacgcaaagctggcggtgcagtgcgacaggcggagcctcgacatggtcgaacaaacgcccaccccacccgccacgtctgagccaccggagaaagtgagcaagccaaacaaggcgccgaagccggacggcaccatcaagatcgttccgctctccagtgctaaccccgacaagactgtcaaaatcggggctacactagatgagaaataggaactcgcgctcatcaccttcatccgcgataatgccgacgtgtttgcttggcagccgtccgacatgccgggggtccccagggaggtgattgagcacaaacttatggtgtgacccgatgccaagctagtaaagcaaagactgcggagatttgcaccagaccgaaaacaagccatacgagaagagctcgacaaacttctcaaagctggcttcatcaaagaagtacttcatccagcgtggctagccaacccagtcatggtgaggaaggccaacggaaaatggagaatgtgtgtcgatttcacagacctcaacaaggcgtgccccaaggatcactttcctctccctcgaattgatcagttggtggattcaacagccggctgcgagctattaagcttccttgacgcttactctggctaccaccaaatcagcatggcaaaagaggacgaggagaagacagcgttcatcacgccgttcggggtattttgctacgttaagatgcctttcggactaataaccgccgggaacactttccagcgcacggtccagggcgcacttagcaaccagcttggcaacaatgtcgaggcttacgttgacgacatcgttgtcaagaccaagacaagtgactcattgattgacgacctgcgggaaacgttcgacaacctccgacgatatcgcctcatgctcaattcagagaagtgcacattcggagtaccgtcgggcaagctactcggattccttgtttctggtagaggaatagaggcaaatcccgagaagatcaaagcaatcgagaacatgaagtcgcccacaagactcaaggaggtacaaaagctaaccggatacatggcagcattaagcagattcgtcactaggatgggagaacgaggacagcctttcttcgctttgttgaagaaacaagacaaatttgtatggacacgggaagccgaagaggcatttattgcactcaagcgctacctatcaaacccacctgtactcgttgctccccaacctaatgaagaattattcctttatattgccgctacgccatattccgttagcactgtcattgtagtcgagagagagaaagtacatcgaccagtttattacgtcagcgaagctctccatgatgcaaagacaagatacccacagattcaaaaactgctctacgcagtcatcatgacatcaaggaagctacgccactactttcaagcccacagagtcacagttgtctcctccttcccctcagcgaagttgtgagaaacaaagacgttgtcggccgcatcgcgaaatgggtagtcgagctaagccaatttgatatccactttgtgtcgcgaacagccatcaaatctcaggtactcgccgacttcgtggccgattggaccatgccagataacaagtcagacaaccaaggcgacaatgagacatggacaatagcgtttgatggcgcactcaacagccaaggagcaggggcaggatttatcttgacatctccctccggagatcaattcaagcacgcaatccacctcaacttcagggcaaccaataatactgcagaatacgaaggactactcgccgggatacgagctgcagccgcacttggggccaagcgactaatcgtcaaaggagactctgagctagtcgcaaaccaggtgcacaaagactacaaatgctccaaccccgagttatccaagtatcttgcagaggtcaggaagctagagaagaggttcgacgggatcgaggtccgacacgtctatcgcaaggacaacgtcgagccagacgacctagcacgacgcgcatccagacgagaaccgctcgaccccggcacctttctcaacgtcctgacgaagccatcggtgaaagaagttaacggtgagtctggcccgagcacccccaacattagctcggaggtcaccgaggcagaacgtgacgttgctgacatcgaaaccacagacgactggcgtaccccattaatcaaattcatcagcagcgaggaattgcccgaggacgacacagaggccgagaaaataacccgtaaagcaaagatctactgtatggtcggtaacgatttatacaaaaaagcgccaaacgggatacttctcaaatgcgtctctaccgacgacagcagacaactcctcttcgacatacatgaaggcatatgcgggtcacacgccgccggtcggacattagtcggcaaggcctttcgacaagggtttttctggccaaccgcccttaaagatgcatgcgacatggtccagcgatgtgaagcctgtcaattccacagcaagcacacaaagctacctgcacaagcgctccagacaatccctctgacttggccgttctcgtgctgggggctagatatacttgggccattcccacgaggacagggcggctatagattcctatttgtggcgatcgacaaattcaccaaatggatcgaagcactacccactggggaaatcaaggccgacaacgccattaagttcatcagagggatatactgcagatacggactaccgcaccacatcataaccgacaacggctctcaattcatcagcgccgacttccaggattactgcatcggtttgggagtcaaaatatgttttgcctcggtctctcaccctcaaagcaatggacaagtcgaaagggtaaacggcatagtactacaagggataaaaacccgcgtctacgacagactcatgtcacatgacaaaaaatgggttgaagaactcccatcagtactattggccgtacgcaccacaccgacaacatccaacaaggaaacacccttcttcctcgtgtacgggtctgaagccatgctctctggcgagttacgacatcaaagtacacgagtacagaagcattccgacgaggaacagcgagacattgatgtaaaccttctcgaggagcatcgtgagcgagttgctgttcgagcagctagctatcaacaagccctccgctgttatcacgagaagcgtatccgagcacgcatactttcgatcggcgactatgtcctctgacgagttcaaacccaagcagggcaaaacaaactctcaccaaaatgggaaggaccctacacgatcacacaagtcttgcggccaggcgcattcaaaatcgcagacggcgacggtcgcgaattagcaaattcgtggaacattgaccaactacgtaaattctatgtatgagtcaataacaccgtacctgtaagcacccttacagtatcaataaagcctatttctaggtttcataccacgaccaaagtgttttcactcgacgatcccttactctgataacacctaacgttgaaacatatccttatgaccctttacgccgtctcgacaaggcctccgaggaacctaagggatcttcggctggggatgcccagaaccgataaggccttgtcagatccttcagagacgaaagaccatgtaagatctggtcgtgtaagagttctcgccgtgcgtattaaccaagccgtgtaatcggaaaccgagctttccaacttcacggctgggggctaggatcagagcttattcaacctaggcagatcaagtgtccaagagccttatcatccaagaaaatttctccgacgacaaggctgggggctagggagagtgtacgactcaaacagccgaggtcgttaactaagaacacactctaacacataacatccagagtaagatgcatttgtttaaggaatatttctttattcacataataattcttacttgttttttacatagatctcccactacattacactttttcctaagacatctatagcaggccacgagtattaccaagagggccaatgccagtccatagactggaataccttctcggctaacggcgtcatcgacctcgcaaggtggtctatctccgccggagtcctccgagaacgagcaaacccttcatggaggaattcgagatccaggcgcgggcggtgatctcgcaggcaagctagcacatgtcctccggcatatcgactcgctcgacgacactcttgtttcaaggcctcatcgatacgcctgccgatgccatcgagttgggcacaggccccgttgagccacgagatgtacccggtcgccgattcctcaggagtgttgcggactactcgaagctccccgcatacccgggccattgaggtacagcaactctttaaatatgacgcaaaccacacctcgcgtcctcggagcgtttccatggcttgctctttcttcacggctagcatggttctcgagagttccgccacttcaaattttgtcttctaatattggatacgacgatcttgggttgcaagggcatcctcgagatctgctaaacataacgaccactaagacaacctggaaaccactaacccaacacgggttaaaaaggctactcacttgaggtggttgtccccatctcgacctccacatcaagagtttggtcctcgacgtcatgtgagacgcgtggttcaaactcaagtaccggaattatcgctagtgactcgggctacccgcgctgctgaacatcctcgtcaccagcatctctacaatcgacaagaaaaacttccgaaatcaacactgaacaaggatggtaatcatacgcccgaaagcaaccagagttcaagatttgcaaattataaaaaatacaagaagtcctactcttcaaaaagggggaggacagactcccccaggtcactgacttcttccatcacctccttacgcgtgtcgcttgccgccccctgatccaagatatcacgcagatcgagttcagggcgcgacaaccttacacacgcgaggatgtgacacgccccggtgtagataccgttggacgtctcctccgcgatcctggccgaatgcttggaggggatttcccctatcaccgtcgccagctccgcaagagaagaagtcaacaagaactcgtcggggttcaccgggatcgtggacttgacgccgcactcctcggcgagctggtgaaggccggtgtaggtgacccgcagcgaaccacggatctcagagagattgtctccaagttccgacatgcggtcctcgagccctttgcgttggcgctcgttcccggccaccagctccctcatcttcgtgaggtcctcacaggcctcagccagttcccgcaccaaccgctcggcacgcgcgtttgccaccgccgtctccaccctcgcctctgagatctcgcggccggtgccgcgagcaccagcttcgagaaggcgccccatttcgacttggagctcttcctaggtgaggacggcctctgccagactacgaccctcagcgggatcgctaacagggccgcttggcgtcgcctcccgactcccgaccacgggcacgacatctgtcgacaccgtggcaggggatgcgctggacgttcctctggatttggcccgcgcagccttcgcccgcgcctccctacaaataaccacgaatcaaaactccatttgaatagaagacacgagaatccaaaagtctgtttactaacttctcgccgatcgtcacaatgcgctaacgtcgcggaggtggaggagacgcgtcggaagcctgcaagacaaccaatgtggagtgagaataaaccttccttgctacacaacatagcgacgaggtgaaattaccgagggagtcgctgccttgcggcgatgtccgagcacatacgagaatttcctcgccttggtcggagctttgccatcactggtggtagcagcgtcagacgcctccttgacgaccttctccttcagagatgccgccacctgatgatccgcgagcggtccgacggggacatcagtcaaaggaagggcctacgctaaatcatatcataagctgatttcgagcagagaaggcgggacgctatcgaatgaactcacattgattgcttcgtcgcgctccgtcgcacccttttcacaaaggggtgcggggatgtcgctcgccgtggtcgggccgctgatcatcacctgaccaacacactgctccacggcttcgctgctcagacctgtcaaaaaggaatcaatttttgataagttgaagagtaacgcgagtacaagcatgtctaaatgaatgcgagaaagataccccgaggagaaacccaggtcgcgtcgtctggcccggaatagtcataagccggatgggcccgagcctggagcggctggattcgcctaccgatgaagtctgcaacgacttcatatcccaataagccctgttctcggagatcatcgatgatgtcgataaacggttggagagagggggtcaaggagggtttggcggtccagaccggaatcttgtccggttgttcctcgggaacaacgaggaccggatttgaatccttgatttcaaggtaaaaccacctgttccgccatttgttgcgagaagagggacattggaaggggacataatgcgacttcatgccatcacgaagtcggaacccgacgcaaccggataccctattggattccatccagcgcaactcgtagtaaaagcggaacagatcaagaaagggctctaccccaatgtaggcctcgcaaagatgcacaaagacgctaaggaaagcaatggaattggggttcaaatgcagaagagaaagcccatagaaattcaaaaccagcagaaggaattcggagggtggagggagaaacctgcagacaactgttgatataaaacacgaggcctgggagatctgcttaactccagtgcaggtccaaagctcgccttcggatgtatgagtgtgccagttgatttgatcctgcaatcaacaagagatagaacaaagaaaccgcaattaatcctataaatgatagccgatcggctaggtgctgatgacatatcatttatttcaagccgatgtcatgcgtacatcgatcggcaaatatcaataagcaattcagaactaaatctactcgatcaactgtagacattaatgatatataatccttatatcagtatatacttaaatcaagtgattgggatagatcggtcgccttgccgagacagtataaatcacttagattgaaatatatattaatagtaggattatatacattcataacatagctgatcaggtaaatctagcatgtatcggctaatactccgataccactctatactaagatattaaagcaagtagaatataccaaacataagcttaatatacttagatgcaataaaatcttaacataaagggcagatttaacgtatcaatcaagcatataaaataaaattagttaaatcagataagatcggctgaaactccgatattaccctaattggcaaccagaaagcaggctagagattgcaattctaagcacgacttaatagatcaaactcaactgatgcagcattaagtatgaaaagaagaacaatatctagataatcaagccgctggaagttttatagagtggtagatatatcacataatctaagttaacgtcattgtataacctaatcggctgccttccattagcagatgttagccgattataggttagataaagatattatcgaagactatatgagatatatgataactcgacgaattatatagacaagattagagtgtcataaagatggaagcactaatcctgagaacataagtcgtcatgacaagttttacctctttgttgaagatcgaaaccgatgtagctcaacccgagagcacgaactcgtcgaaataaaagtaaagcaaaaaagggtggcgatgcgccgagattgtattggatgtgttatctcttttttatatagggctcgggtctatttatacacgagaattacaagatacgtccataacggacacgactattatctctagcaaactctaagataccataagtctttacggcagactttttgcccaaacatatctctaaggaaattacatagaatatcctaattaatagatacaattgccttcccaggactctatccatgcatggcaatcaccttgaagcacatcaacttaaacccgatgacgttcaccgggtcatattatcggaatcagctgtatcggctagccccgtccaactcgaactctgccgatcctgaccttagctgatttagactgcagccaatttttactctgtctccgcaacgatcttcatcttggattccacttcgatctgatcttcatctccgatgccaatagtgatagaatttaccaaatttggtcgttaacaacaacataatcttcgatcgcaaccatgcgacctaagatgggctgaggattagtacctcctgctttcctctccgccttttcacggccaggaagggcgccgtcctcctggagcttctttagggtcgcgctggtggaagccgacttgccgagattcatcgctgctgaaagatcgccggagatggacctagagctggcgaagctagggttctttacggcagcggagaaggtgaggagtgctaacaggtggtgtgtttgacggagttggcggacttcaaaacgtgcacccaaaatccctttaaataagcgcacccccaacggtgcgaattccaaggaactgagagaaatccccgctggaaatttctaagtctattacgcgcggcagtttttggacttcagttcaaaattcactcgtgactgttgggcttcaaacgggatgctcgactacacatcaactccgcgattctcgcacccggaatgataacgttctagacgcccgaagtcgcgaatggtcgcatgagttcgtttttgagcaaaagtcggaggctactgtcagggttacgggtcaggcataccccctacccttcgatatacgatacgtatcgacatggcatacccacgcgcacgcggatatttcctttatgatctaaggaaacctttcacgaaatcaatagacgggaaaaagtccttctcggacaagaactgggttacctacgtatcgtgctaggtctggtatcttcgagtcctactcggagagtaccagacctgtcatataaaagggaccccccgagaagggcatagatcatcgaatctcagaatccacacagtctaagaagccggagcctgcgaggagccaagtcgccgagagctagtcgaatcaactcgactacaatctcgccggatctgacaagtttcatcttttcctttgtaacctgtgttttccaccatataatcccacatcaactggattagggctattacctgtcaaggggcctaaaccagtataattcttgtcttttgattgctcgatgtcgtactacgtagatctttgtaccagcgtaccccaataccctctatatccggtctacgggtatcacccgtcgacagtgctacacttttgaaatcggtagccaatagtctcttattccactataggtggcgtagttccattagaattgctagctaaagaacattatgtggtttaacgctagtccataataaagagaagttggagatttgtctcatcgccttatttctcattttaattttaattttatctttacccttttttattattaaacttatgactgtgtgtcttatgatagaagctggagatgtaatccattttcattatctcaaatccagtactccatacacgagtacatgtcggatgtaaataaaagcacagattgtgcactgcattagcacacccatcacaagttcacaactcgcgagtcacagatctaaggttcgttgctcgtcgtgactcgtgacgaagtagcaaacaacgataagaaaagagttctcaacggttggcagcatgcagagcatgcgttacatgacagcacaatctgcactacaagcatcgtcaaatccaagcatattctcgcaaatctgcttgagcctctccagcccataccgacccgcggcttcattcaagctcatcaccatcgtcctcggcagcaggggatcagaaccatcctctctccagtcgagctccatcaacgtgtcggtgtagatgaaatggagcagcgccctgaagacgccggctctcatgtcgtccttgacctcaacgcgcaccgacccatccttcttcctcgtgccacctttcaggacggcggcggcgagggacggcgacctcgcggcgagcacgcacctgtgcgccgcgatggacacgccggaaacgatgaactcgacgtcggcgaatctcccgctccgcagcagctcaccgagctgcaggtgaaggtcgggggacggctcggccgagttgatggtgttcttgctgagcaccgtgatggtgcagcgcacggcgaaggagtcgccggtgatgaaacccgacgcctccagctccctccgcttcacgagcagaacccacggcgagctctcgttcgcggacccgaacgcgtgcgactgtcgctcttctcctcggaagcatgggagcgcgtggtcgacgggtgcaccaggcagcagctgagctacgccttgatggcgccagcgtcgttgtcgtcgtcgtcgccgccggcgcgctgcgcctgctcgccgatgccgaggaagacgagcttgaaggcgacccagtagtgccagtgcgcatcgtggcctggggtgtagtggatctcccacgcatacccggccacggtgagacgcttggaagagacatgctcgtgtttggccatggctttcgtggccgagtagccattgacgttgaacttgtggacggcgcgcgcggcctgggtgaggtttgaggagggcgccattgatgcggatcccaggcaagctagcggaggcgaacgagcctgagcaaagggagcgttatatacagatgtctgcacggcttgggtgaacgcgaaccgttgtaccgctctcgagagtgtttcgcgaatcgtgcttgcgttttcccaggcagcgctctgttaaatccagagattttgagagatctttccgtttcaacgcgcccttctaccaacgcagacttgagactgactgtggaaggtacttgaaataagttcacttaaggtcccttaacttgtgaatgtatttgatgttcgtccttcaaccgaaaaaccagatacaacgggtcctttagcggttttgatgatggttttggctgatgtaacacatacatggctagtttaactctgccttcgtccttggtgtagatgatgtggcaacggaagcaaaatatataaaaaaataaaaacaaaaactgcgaggcccacatgtcagtaagacaaaaggaaaaatagtacgatctacatgttagtgggtcccaccctcctctatccatgccatggacgacgggagacgatggaccgccggaccgcgtctccttctctctctctccctcccggccatccttcctcggcggccggcaagcgcgcacggagagggaaaaagccgacagccgacgaggggggcggagacggtcgacggccgccgctcgctgtgaggggaatgccgacaagggcagagaggccggggggctgccgctcctcttctgcccactcgccggctgccgaccccctcgcaccgttgctcctgtccctccctctcgtcggccggcgcgcattgcctcctccctcgcagcgctcccgtcggacgccctctccggcagcgctgcgcgcgcagccgctaatctccctcccacccgtcggccggtgtgcgccgccgatgctctcccgccggcagctgcgtgcagctcccccctgccgctcctctccctccctcccgccggccggcatgcgtcaccgctcctctcgcgtcggaggtacgcgtggcgtccttggcgaggtcgtcgccgctccgcttgtgcctctgctctgcccgctgccgccgttgctccgctgcgaggacgagggagagcagagaggaagaagagggagagccgagagggcagggaatgacttgtagggcccacgtgggccccaccagtatttttttgtgtagctgacatgtgggcccacgtgggccctgctatttttaaatgatattttgtgtagctgacaagtgggcccacggttttattattttccaagatataattgccatgtcaatgccacgtgggacggagagctagtcaaacctgctacgtagacgccacataaaccaaaaccactgagggacccgctttggttttgatagttgagggacccgttgtatctagttttctggttgaaggatggaaatcagattcgttgacaagttaagggaccttaagtgaacttattccaaggtactttgacgcgagacgaagctgtggcccaatttgaagccggcgtgaggcccatgaaccaaccacagtttggccccattttgatggttaaaaaaggaataagttcatctaaggtcccttaacttgtcaacgaatccgatttttctctctcaaccgaaaaaccagacacaacgagtccctcaagtatcaaaaccggtgcagatgaggtccctcggcggttttgaggccagttttggatgacgtggtgcctatgtggctaatttgactcggtcttcatctgacgtggcgcttacgtagcaattcgacccgaaaaaataataaaacccgtgggacccacatgtcagtttcacacataaattaataaaaaatggtggggcccatgtgcgccccacatgtcattctcacccctcttcttcttcctcctctccctccatctccctctcttcgtctctctcccctatcctctctccaggtgcgacggagaggcagcggcgcacggcggccggcgggagagaagggagcggcgcggcggtggaggcacggctccggcagctgtgggcggaagaggaaggggcggtgggagttggccctggctgcggcagacggtaggacatgagctgcacaaccgaggccccgccggcgccgactccttattgatgtcaccggcgccgccaaggctgacgaggtggacgcggtggtggtggaggaggaggaggacggcggcgcggcgcggttccatgagcggaggctggtggtggtgtttgtgctgccgtcccagccgatgtgcgccacgtgctggcggtggtggtccgccgcgccgccaccctcgccgccgccgcctagacacgtacacaacatcactaataccaaactcctaaatcaccccgcaaaaaacaatcgacaagatagagcagaagtgaagaataagcatccaagactccaaacaacgaaccttggggcttcttgccgctcttgccgccgccatcgacgacgtccacgctggatccattgcggcaggtggagaaggggatcacgatgaaccggtccatccgccgctgctccttgccactattactcatggctagctagccactgctagctaagctgatactatcttggaatcaaattgcttgccgctttggctgaacctgtactggtacgatcatttttagtaaaagaaagggttaattaagaaatggggttcttgacccttgctaaaaaaaaataatcttggaatcaaatcaatgtctgctcctcgctggcgtgcgctgcgacagcggccagatgctgagcgacgggagcagcacctccgcggccttggcgactggtgccgcgggagcggcgggccgacggcggagcctccctccgcggccgacgcatgctggcttccctcggcggcggcggcggctctgggggcgtcctccgccatggctgcgggtaagtgggagagggagagatctatggcgtggagaggggagagaccgagagggagaaaagaagctccgccgccccttcctcttccgcccacagccgccgggccgtgcctccgctgtcgcgccgctccctcctctcccgccggccgccatgcgccactgcctctccgttgcgcctggagagaggatcccaatccgagagagagattaaggcaccgttcgttccagggtgtttggggagattgagtctcgttttccgcgcgcacgcttttcaaactactaaacggtgcgttttttgcaaaaaatttctataggaaagttgctttaaaaaaccatattaatccatttttgaaatttaaaatagttaatacttaattaatcatgagctaatggctcacctcgttttgcgtatcttctcaatctcctcaatccccttcccctcaaacacaccctaagggagatggggagagagaggaggaagaagagggatgagaatgacaggtgggcccacttttttattattttgtgtgtggaactgacacgtgggtctcatgggttttattattttttctggattaaattgccacgtaagcgccacatcagtgcctatatcagataaagaccgagtcaaattagccacgtaggcgccacgtccgccaaaaccaccctcaataccgccaagggaccttatctgtacctgttttgatagttgagggacccgttatgtctggtttttcggttgagggacgaaaatcagattcgttgacaagttaaggaacctcagatgaacttattccgttaaaaaatcacgcatgttttaagaggggaaaagtacaccgaaggtccctcaacttgtcatcgagttacaaaatcatcctccaaccgcaaaaccagatttcggtcgtcccttaattaatcaaaaccggtcacaatagatccttcggtggttttaaccctggttttgtcttacgtggcggctgagtcagtgtggaccgacgtggcacccacgagtcaggatgccacatcatctatctcattcctcctctctctctctctctctcactctcctcttctctgggcaagccggccggcggctggaaaggaggtcaccgggtgaggcgggagaggaggagagcggcgccgcgacggcggctggctgcggctgttccatggaggccacatctcgcgtcagcaacaccaacaaccacccggcggcgacggcgaaccttctcgttggcggcgacgacgcggccgtccacggggagacagccattgctcgcccctgctgccgccagcttctcctccgcctcccgcgcccggaacggcgacagccgcagcgcacgcatcaggcggtcgcagcgtttccatctcactgtttcagttccagacaaacgttgcaatggcgagcacaacggcagcaacaacaagtgagcagttcccaccggcggccatggggcccgtcaccgctgcgccgttgctggaagaaccgtcgtactaggcagtgacaacctcgaaacagctgacgatgcatacgacgagcagcacgagcgcaatgaccggcttggaagaagagcgctccatcttgttctgctttcgattgcatgttcaaagttcagaactcagagcagagacgatacacttgagcattttgctcaaaatggcaggatttatatagaattgcttcatggaattatctgtgaatgttgacatggtaaacatagtacatatgcacacaagtttgtccttttctctcgatcgtgttctgctcgccaggttgagttggggttgatctggacggctggtttgttgctgcatactcgtctgaaaagttcaacaagaagatgaggtgctggctttgattttattgctggtgttccttcctttctgcctgtaccccaaccaccccgctctcctcgaggcgcagcagccattcgcctaaaaggaaaccagtactaacctcgggatggtgatggccgcgaccgcctgatgcgtgcgctgcggctgtcgccgtctcggcgcgggaggcggaggagaagctggcggcggccgggggcgagcaacggctgtctccccgtggacagccgcgtcgtcgacgccgatgaggaggagagcatcccctcattcgccgtcgctgccgggtggttgttggtgttgctggcgcgggatgtggcctccatggaacggccgcctccccactgcggccgccgccggcagccgtcgcagcgccgctctcctcctttgccgcgtcgccccggcggcctcctccccagccgccgaacagtttgcccagagaagaggagaaagaagaagagaagagagagagtatgaggaggaagggaaagagatggcgtggcatcctgacatgtggggtccacatgggtcctacgttgactcagccgctacgtaggataaaaccggggtcaacactatcgaaggagctattatgaccagttttgattagttaagggacggtcgatatctgattttgcggttgatggatgattttgtaacttgacgacaagtttagggaccttcgctgtactttttccttttaagagatgtttctttttcgaagcattagcgggcacaaggacctgtgcagtcgtgctgaccttgggtgaagcatttgacagaagaattgggaattgatcctatcatcaacgttttcagaggaaacgagtagccgagtactccctccatctcatagtaggtgacgttttcgattttttatttataacgtttgacaattcgttttatttaaaaaattagtgcaaatataaaaaaagataagtcatatgtaaagtacttttgataataaagcaaatgataaacaaaataaataataattccaaaattttttgaataagacgaatgatcaaacattgacaaacaaaaacttaaaaagacaagtaatatggaacggaggcagtaggtattaggtaaacaccgtttggtggaccgaatatacaggtagcagagccgagggttgaagagagcctaaaaacttgctctgggtgaacaatgggccaaccccttctgcttctttgatccgatgctacattccgacgtttccaaaaaaaaaaaaaatcatgacaacgttgcaaacgccatgagaaaagagaacatactaatagcatcaggcatcaattaaatataatcttataatcatacgaccatttcggggctaattaaccacaacataattaagtagatatcgaaatgcatgtataagttaaagtaaagcttctcttggcaaaccagaaacccaccagctgctaggatggaggtgacggcactctggatccaatccatacggacaaacggcatcaaaccatgggtatgctgcctagtgcctacgtactactgaggatctttgagcaccgtgatgacgcacctcattcagaatcacaagctaaaatagccgggctcctctccagatcgtcctgtttaatgagcttaacccagtcagagctctccctggcgaggtgaaatttgcgtgacacagtttcagccctgcagtcgtgctggttcccgcttgcatcacgccaacgtgcctccgtccaagtggagcggtgatccatcaggcggcagctgaacgacgcattcacgcctctcgcccctgcaggtccaaggaagacgagcctgaacgcaatacggtaatcgccatgtgtgatgaacacctttgggtagtagcggatctcccactcgtaaccacccacggtgagtcgcctggacgggaagtcgttttcaccgccggacttggtggcagagtagccgttcaccgtgatgtcgtgaatagccgatgtggcctcggtgaggttccacgatgaaaatgacattgctgccgatcgattgccttgtttgtggtgggttcgcactacggctactgcgagcgtgagatggcaaggctcaagcaactccttctacgagtaccctatatgtagatttgtagaggcaagtggagactggattaatatcggaacgagaggagcgcatgcgacgcccgggttgaatgtagaacgcgaatcgtttggtcactctcgagctaggcgtttcgttattctcaccgacgggttctttccaagggattaacacacgcctaagagcaggtacaatagcagactattagccagctataaacatattttaatgagataaaagatgagagagaagagcagtgggctacagatctgtagccagctgcaacacgaactccaagacgcagtgtgtgtatgacagtgagaccatatactaatagtataataaacaactattgtataaattagctattaaattggctatagataaattagagccagtagttggctataccattaaccttgctctaagagcacccgcaatagtaaagtaaggtgctatctataaaacatgtacatctcagcaatagactagattaatagtaaaccatctcaatagtatgtctacatgggtatctatagctctctaatacattgcctcgtttttctctatagactatctccaggttagtagatagctttgctctctctcttcatttaatctcttccaagtaggaaaatatgctgacatggatctcttatagagagcctatagataaccattgtgggtgccctaatactacatgcataatactacatgcagtcatgatgacctgtgaggctgtgactgttgggaggagaatgaaaattgatgtcaccggcaatccggcagtcctgcagacgggcagaaaaaatgtgtctgcaatgtgcagactctacttggtgcatactgtatgcagtacgtaaatttcatccaaatgccaaatctgccaccaaacgccttggcctcatatgccattcaacatttcatccagatgtactatacactacggtgccgttcttacaagtttgtataacttgaattccatagttcagactgcaacaatccgaaatccatgaaaagtataataacttaagggtgaattaacttaaattctaaattagtactacagttcatggaacagatacttcctataacttgggaagttctctgccgaaaatcagttgttctgctcagggtacccttttgactgctccagggaatcagttgtgttccatgtctcttagttgacgtaattttgtacaattgcttccgcacaccagtcgtgcactcgtgcttccaatgttatgcctggcgacaaactgccagtgacacttccacagttcaactgatgctacacgttggagcagatttcttcgtaggtattacctccttcctgaaaatataagggatttttgcattgccgaaatcccttatattttgagatgaaggtagtaacatgcttttcgtcttccacgagtttatatagcctaactgccagagtgtctcacgatataaacgtccttccatttgttgttattggtatttcatgacggtcatcgtccaaccacttcaacctgttgctgcggttgagcagcctatcccaccatgctgctcaggatttgtagcttcgaacagatatactgatctctgctctttccataaccttacaggtgaacagcaggaatgagttcatttctgcatccggaagttggaaactgtaatgttgggggaaaggttaaggatccgttaatcatgatatcaatatggatttgatagtttaatatacgtaccacgtggtgaaacccactgtcacatggggagcaggaacaactatccctgaatatatgtgcattctgcgtgcagcaccttcttgttcctgaattagccatttcaaggctcccccagctgccaagttagagcaggatagaagttacaatactttggaacacaacttcaccaaataacgcacttgaatatgggcagtttgcaactttgtatatctatcttacattacttatgttgcaactcataggactaatattagggtgtaacctagcaaatgtagagtgaaacccagattgacatgtggtgttaatagttaccttttttaataattgacataaccattctgagtgtccaggacgcagtacaggacattccagcccaacatcgcttgtactgtgtggaatccctaggctcttctcatctctatagctcatcgaaatcaatacttggcattattttcttcagtaggttgaatgatgacacaggtgtgtaacattctgcactgaactgcagcagctcattttctagaacagtaaaagcatcagcaaaagcctgccatacaaatgatcaaacagtagagttagtaaatatgcgcaatttgttaccaacaattgatgcttgaaggccaaacaaagttagtcctaatacagtatgaagactaaaatattgctttagaaattctgaagtttaccatacacagtatgataacccagaaaatagtaagaacaaaattccagaaggtgagaaaataaagatacaaacaacttaaaaaacacatactgcagaagaaaggtccaatcaaccagcaaagggagaattataagtaaccttgatacattggtgaatgcggaaacagttcctgcccacattattggcagggcaaagaggatcatcaatgtgtattggatcaatgctgcaaatcaagcatatggaaaaattacagaaggcaatagttgacagaaacagataaactgatacattgatatttaattttatcacctgtgacctctttctcggttcaaataaatgccacttccttggatagagatacgcatatggcgcggatcaaatacattcctgatatccagattactcactaattaaattccatcttagatgataattatattactactccaaaacgattgcaatttgcacaggataaatcgcatatgagccctatagtctttgaagtttgtgtcctcccttatgtattaaaggataaagtgtccagatgtatttttcttacccaaaaaagtataggaaatccatcaaaaggctgcccagattctgtcaaacatgaaggaacagatatgaaattaacttagaaggaaataagaaaactgaatttaactaagagagattgaaaaaatgactttgcctgttgttacaagttacatgaaggctgattaccaaaataacaaccggatgatacagaagcaaacgtctaataggaaaaagatacaagaactagtaatgaaatagagcatataaaaaacccttcttctctattcatgatttgcaacttacttggttaatgggccgaccaagatgatgctcatgctgaagaaaacgaacgattaacagtacctgcaaaggaagttataaactggaggattatttttcagtgggctctcaagataccaatattgatgcaaataatctggatttgcccttaattgaaagagagaaaaaagaaatggaagaaaggaagatcagcaagtatgaactactgtacaaaagtggcaaggtacaagcacaaattagttagctgaggaccgtactttactgggtctgttctttaaggctaagtcatacagtgctagataatactatggatagaaatgcatctgattaagagggttaatccagaaaaaaaaaacctaaatcaccaaatagtaaatatctgggactaatctactaaagttaaggagaaaaaaaatagctattcactcataatgtttttttattattatagcaacaatttgaacggtaaggtgtcagtttaagttcatgacatcattcacacctaagaaagttatccagagagtaatagatagccacgacaggaacagcaggtgttatgaaaagttacataccaaacaatatgaacttagaccaccagaatatgggtgatccaaactccggtcagccaaaaacttcttcagtattaaggcaagaggcacagcagcaggaaattgctgagttaattcacagacctgtaagtgaaaaaagaaggtgaataaatagacaggggggccttaggtctcatgaaacattgtttgatagatgtaagcttgtgatctgcaaactttcttactcatgtccttatgcacaatatctagcgagcaatgtgtgcaatatgtgcatatctcaaacctaataaacagctggctggttgctcattcatgtatatataagacttaatgtctaacaaaaccatgtcattgtggcatcaaatcctacacactatgaaaaaatcaaaatgttgtaacccattggttcttcaaacatattctttttctacaagatctcagtaaagcaaatacttatggcagattgtaaagaattattcactccgagagtaacataattatttcatccatatgatccgctaaggtgacagtatatagaacatttagcattcatttgagatgacatgtgacagttgacaagaaaacaagagcatgctgataattataactgtatgtatggtccgcatgtgacattttatgtactgcaataatttatatatgaatagtaaatacactttgaattgacatcatgcattcagcataatttattgcaatactaaaatggcaacatcgcacaggagccatggcaaagaataaataattagaaccacatacgaaaggtaatattctatgaatacaacagacagtatgacatataattgtacttaattatatacatatccaagaacctgtattgcaagcgcatttatgctataaattccttaatgcttatgattcattgttcaaagtctttgcatgaaggttgattctaaaactaacaaatagaaataaaacttattttcttcaaaatataagggtagatagtaatcttttttaacttaccaactcagttgtctggagtcctgtgtgggatggtgatttgaaacttatatcaagacgaattgactgcacaacattgccatcatccttgtttattcttgaacacattggcatgctgctaccttctgaactagagttgtcagaacgagaagggctcccttgatctccaagcacattgatggataattgttcgtgtgagctatccagaacagaagaatattcactggacaaatttgtgtcacagggcacttgagctacaagcatgatcacaggtatctgcaaatttaatgacatacgtatgaggaaaataaaaaatagctggtgagctagcaaatgaaggaacttaccgccgtgttttcaactgttttgagggaatcagtcctaacccagtcctggtttgcaagacaccgtgctgcatgctgaaacaaacaaaaagaagaagaagaaaagactcaatgtaaaatattttcttgaccgtggtctaaatattactgtagtaacgcgcatagtgttcagtaattagctaaaagccactaattcactgcgccacgaagatgcgcaggcaagaggaaaaaaaacatgtgcatcgcaagccatgtaacatgaaaacttatttaatatctagaacaattatgacgaattcactcttctaatagtagcatgttgacccccacacatgcattcttctaaagaatgtaaactaagacagataactccgatataattcatgcatttcctcctaatatccagtttcattgcattaataacttggcatccagaccttaagaggataataaagcgccattgtgcacaatacaatcaatcattaacaacccaaattcatcacaacaaagtaatttgctaaaattcgataatatgccatcgaccagtttagaatgcagagtaaacagcatactgatactagagaatgcgtcagtctgttagtcaaggcatcttacctggagacacgtttccttgatgccattcctgccttccaaaatcccagcttcttttataggttcctggaagcagccacaacttagaattgcacactatggcatgtaggcaggtacatttgaactaccagttacatgcataccgatagtaatgcaactcaccaaattacgaactggtggaagagaaattacaagatctacatcgcttgttggaagagccaaaccagtggcatttgagccaaatagatttgtacgggaacgaggccagagaacttgcaaacaccgtgtgacccttttgacagcccaattaatatagggcttcctcaccagattctcggcagaaacctaagtatcacatttggaatcagcaaataagaattgagatctttttaccatactataatggagattttcaaggactcaaaaacaagccatggcatgggattacttggcatcagagtaagtctttgattgtttgatctacggctaataagccgtggaaaaaatgaactaagaaccaaaagaaaaaattataggcagaactttttatatatgtgtgcttaacagtttaaaagccaatgctggaaaataaaactacgatgaaaaaacctcaaaagcaactctaaaattaacttttaatatacaaattttggttgtggctgataagacaacaagcagaaaatgggaggctaaaagaaaaagatcacatagcgtacatacatgaaacttgtggcacaaaaaggacatacctgcttacagaattgatctatctcttcgtgtagtgcattgtgcatcaaagagagggatgccttgctagaagaacagtttaacatatctggtggttgcagaggcaacgcaacatctggctgcaaaaggcataagttagaaatgcacaaagttgcataaataatattttctttggatcacgggcgtccttacatgttgatcacgagaaagctgtgaaatcttaacaaggtgatcctgcaagacagtatcctcaattgattgccccagagtaccagcaggacttcctttatttccccatgaaggccatacgacttcaggaccatccaagcaaaactgagccctgttcaaaattttgtcctcagtaaacaaacttctcatcccccaatgtcttgggcttgagctgccagatctaacaatagggaatcctcgttttcgtgactctcccacaggagaaggaggcggcggcctagggactcgaggaacactaagtactactggcgatggaggtcttcgtacaagaggaatatccctcctgtttgaaggcacacatgggctcctgtgatcatgaccccccttaaattcagatcttgatggtcttcgtgatattggaacaactattggccgcagcattgcatatggcaatgtatctccctttatcacttcgctgccacaagatacactctttgaaactggaaatagttttagagtcagaccgtcaggcatgcaagatggagactgcaacgactcactgttcatgccatttgctgtcattgaatgaccaacagactgagggagaggatctggagattcattttgggaacatactgaagtggaaggtggtgaagacacactatttgcattatatgtacaaggaatcccaacaggtatgtcatcaagaacttgactaacatctgcctcatgccaagcccatgcactgtcatctgagctaagagatggtggcctagaaaaaccagttccggcatgctctgcaggactccaatacataactcctcctccaaa

SEQ ID NO: 5706 - DNA, 94288 bp, Oryza sativa
tcgtgccaaaaacggcttctcccacaggaaaaaacggtagaaattttcctctcctcccggatcgcgacgcgcatgcagccgcgatggggggagatggcgcgcgcgtgctacaccggtgcgggggttggtgattggggaccacggtggttttcacgtacgagcgccgctagctagctgtgaagtcgatcgggataggggaggggtcgcgccgtcaccgtgtaggggtgtgcagctcgatgattgagttgtgtgtggtttgcatatgcacctgcaccaattattaattgtggcgcacccggtccagttatatgcatgtttcgtacctgggtaaatccacctttggattcgcttgtaccacgtgataattggtgtagaatttggccccatagtaaacagcactagagcagatcagcactgtcattcacattagcagaccggcaatcaactggagtacatacttcccaagtgacaaatcctgtaatagcatatactggagtatttgtgtgtcttaaaataaatacaccgcttatacttattcctggacacggagggagtacaaacttttatccttttgcgtatttgtgatacagtactcgtcacatctcgatcaaacgacggagtataccagagaagaagaacgaggcatggcggcgtaggcgtgcatgcatgatggcagggcagccgtgcagacatgcaaaataacgaaccagtgggtccctctaggagaggagctgtgatgacaagactaggcattgcatgttgcaggaacagcatactacccctagtagtactagtagtgttgcaggtcggatgcagagatcaccatgtccatgaacactgtttgccatgccgtcccgggagtagtagtagtagtagtaggattgctcgatcgtttcttcgtctcgagatcgtcgtcaacatgcatgcgctgcgggcggcggcagtagctagcaagcagcggttgatgggctaccatggacgaacacatggatcacatacgttgtgctggtgttaaggctgtgtttagttggggaaaaggaaatttttgggtgtcacatcagacgtttgaccggatgtcggaaggggttttcggacacgaatgaaaaaactaatttcagaactcgcctggaaaccgcgagacgaatcttttgagcctacttaagccgtcattagcacatgtgggttactgtagcacttatggctaatcatggcctaattagtctcaaaagattcgtctcgcgatttatagctaaactgtgcaattggtttttctttttgtccacatttaatgctccatgcatatgtccaaagattcgatgtgataggtgaaggggaaaatttttgagaactaaactggccctaagtgtgaagcgaagatgatccagttcaaacaccatgcaatgtgttgtctcgtcaatccgtcactctggtcgccgttatcttcatactggtatttgatatccgtacaaggaatccgctccactgctgccaaaattgaatcaaacagtgtgtgttgacaccaaaattagaagtttagttgaaattgaaaagatgtgatgaaaaagttgaaagtttatgtgtgtaggaaagttttgatgtgatgaaaaagttagaagtttaaagaaaaagtttagaaataaactcagccaaaagttatataatgtaagctcactgggcctagatttttattgctttatgttggctgtgtttagttcatatgaaaattggtttggttgaaattggaacgatgtgacataaaatttggaagtttacgtgtagaaaaattttggtgtgattgagaagttgaaagtttgaagaaaaagtttgctactaagattagtattatggcatagtaatattgcatactattccaaaaagaagacaaaaaggtaaccttagtagagaccataacaaaatccaaaacgacaactagaaaaccataatacatttccgcctacaggaggaggaggagcatcgcatggtgcagctttcctcggacagagcagcatgacaaagagcatatggagggccctgttcagttatccccataaccccgtttttggcgtttccctgcagttccattccatgcagcgttttgtacaactgcatgcagctgcctgtgccctgtgccctgtgccctagcaaacaagaagtacttgtatacgattgctggagtaatttgcacaaatgatgccctctttttcctgcgatcgatcgggttcagagtggctcttctcttccatcactgatctgatcatcgtcagacaaggctagctctgtagcagcagtaaacagggcgtcgtttcatgccgtgtcatgtcagctctgcttgccacggtagcgagatctacagttgcagggcttagctatagctcgtcacgatcagcaggtcagtttcgttagagttgcggcgagatgagaggaagcatggatgagccgtagcaacagtctctagatgccaagttcaggacttcaggtttgtgccactcctctctgcctgccgctaccaacaaagcctgcaactgcaagagccaagagaccggctggcctgtggcctcttctttgtactctcactctctaaagcaaagtgatttgtcgaagctgaaagcatctgacgatgcaaattaattagtactcatgaggcttaatttctgcagatctggtttcttctggcaaacacagctgattgattgtagcatgatttcagagtttggagagcacaaatgtttcgttgacagttttcaggacatgcatgtgaattccaaagcgattcagaatgaactgttccatttctccctgccagattcataggccatgcatgcattgatcttgctttcttgtggcaaggacggcgtgagtgtctttctttgtccactaatcatcagaggagtagctgcaaacggcacatgggttccacgcaaaacaccaagaacaatggcagatatggtgtacggtgcacattaaaatagacgatacggtcgtagaagctctcccgtccctccattcaagtactcccttggtcccatgtaaaaaaaaacaatatattctgataatctagataggtatacaatatagcataccctttaacctaaaaagaattaaatcctaagtacgaatctggataatgcttattcatgttaatagctatgatttaagttaagacatgtcttaaaaaaatatcattaactaaattattgattagaattatttacttgattataataataaaaataattttaaaaatagattcaacaaataacttctagcacgtggtctaagtaatgcagccgaagaaaatttgttaacaaaacttatttttaaacatgtgatgctggaaataatctatggcaataatttgatgaagtgttttattcacccattcattttacaacaagccacataaaaatttaaattttagaattgactcagagctttttctctatattttgtagccttgatttttggataactaattagaagttaaaaaaagtgtcgaagttaaaagtcttaccgtcattttttttgttgcttcattacttttttaggtttataacccatagctcaaccaataaataatttgttgcataacacaaatgttgtagtagtaggctggaatctccaaggcatggtactagtttcaattaaaccaacactagcttaaactatttcgattttaaatagtaatctgaagtcaaacgataatttagaataattctcttgtttctatacgggacccttagagcaagtataatagtagactataagccggctaaatgctgaggtggaggagagaagagaggagagagaagaagcgtgctataaaattatagccagcttggacacaagaaccaagaaactctgtgagagagttaagtgggccctgtattaattataaagagctaactattatatggataggctgagagaaagctacaaagaatcttatagccaacaggtcagcttaggcttgctcttaacatgccacctggtctgaaaattcccgtgccacaaaacggggaccttgtgtcccttttggtcccatgcatcgtcgttcttaacaagcaagatcacgttttggtcccctttcactaatcatgggaactaacaatcctgttgataagatgttcattaggccactgtttattcagcacggtttctattttataggtccttttccatgttcttgcatagccaaacttaattgataaatgagaataggccatgtgctaacacagagttctaaacaagacagcacggaaacaaagccagtttaagcgtgacaagacatgggagagagcagcacgtaacaacttctccaataataccccagtcctattttaaatacagttgtaggttgtgtctaatatttaatcatctatcttatttgaaaaatttataaaaatatattttaaaaaagtcacatataaaataatatttatattttatcatcaaataacaataaaaatattgatcatgaaaatattttaaataagatgaacagttaaaggtaaaaaaactcattactatatttaaaatggaatgaagggagtaaaatcgacaagacatgacactacgattgccaacgtaaccgagagtcatcatggacgcctatccataatcagacgaggttgtaggttggtagaagtatactaatacatctgtcctaaaatataataatttttttgttatgaatctggacatatagttatctatatttatagctaaaaatacttatattttgaaatatatggagtatatgtttgttcagaaaatggcagagatatgtgtaaaacgacatttcatatgaatgcacactaaacgagggtcactttctcgtaaacaaactaatctagtatagatgttgaatctcgatatctctctattcatattgatagtatagtgttaggctgttagcatatgttatattcagtattagattgagtatttttagtagggctaacgccgaaaatcaaacaaaccatttgatgaacattttttttaattcacagttgttgttctacctaaaaatatgtttaaaatgaaacttaattgaaagcttctttgagttacagtgtgctgtacaggttggagtcgcatgcatggctaaacgggagaagttgaccgagagggcaaaccgaggtgtagagccgtgagcagctcagcatcgatctatggtcgatccagtaggatcggtcgatcaaaatcgaaatggatctcatgagatagctttctgaccgaagccgacacttctctagtccccagaaaataacacctttcgcccactcacacgacctatggtctggaatgattattgtttctattatgagaaaactttttgtgaattctgacttgaattaataaatagtaactctattgtatttagggttttttttagtagtttagcaaagctactaaaagttttcttttggttttgcaccaaaaatgattagaacgcgacataaacatatcagaattgtcaaatgttatgtagcaaaaagtaactgtcccattcgtcttgttttcacaagtaacagtgtgctactaaaactgtagtttggtttggcgcaaaaaaaaattctttttctactgaattatcacaaaaatgttaagatcacgacatagacaaatcggaattatcaaatgttctgtagtaaaaattgaccatacataaaactgtcccattggagcattgggacatcatggacacggttcaaacatgtggacaacactagcccgtgcaacaggagcacctaaaccgcagactccgctcactcatcctcctaatcacctcggaagtttggaaagagagaaatacgtgagtcttccagcacatcaccacaacaccgatcataattatgggtaatttggaaccatgtcattataaattttcaaagtttgaaatatgtcattggtatctcaaagacacatatgacccacatgagtcaatgacatatggattaggatggtatatcttaaattttgcaaaatataatggtatggttacaattttccccataattattgtagcataaacaaaagaggaggccagagcttggtgcctagtgagggcaaaaaaaaaaaaaaaagcttaaagagctaatgttgttgtgagaatagtcccctatgtaacaccccttaacacttgcacaaaactaaaccttcttctttgttaatgaaaggagactgtccttctaccctcttattcaaaagaaaaaaaaaacagactttttcaaaagtaacagttcttggtacaaagagcggacttttcttccctaaaaacttttaggccccgtttagttcacgagacgaaaagtttcaaagagtcagatcggatatacaaacacacattcaaagtattaaacgtagactaataacagaacaatttacagattccgtctgtaaactgcgagatgaatttattaagcctaattaatccgtcattagcaaatctttactgtagcaccacattatcaaatcatggagcaattaggcttaaaatatttgtctcgtaatttacacacaatctgtgtaattagttttttttctatacttaatactctatacatatgtcaaacattagatgtgacagggtgaaattttttttatttacgaactaaacaggtctttacatagtttgaacacgggtagggctgtatttagttcacaccgagattggaatttttgttgaaattggaacgatgtgatgaaaaagttggaagtttatgtgtgtatgaaagttttgatataatataaaagttggaagtttaaaaaaatattttgaaactaaccacggcgtaggtcgaggtcgatatggatcgtatcaatcgatcatggcggcaggcacgagctaaggtacggtggcccatgcaaggcaaccactggcaacaggcaagcaaagcacggccgccgctagctccagctccatccaactccaagcagcctaggggcaacattttctccaacgcgacacacaacacacaagtggcgagctcgatcgtcggctgtccatgccggtcaaaggacatgcacaagctgccattggtggatgcatggcccgggaccgacaggcgacagctacatgcgtgcaagtaccatggccatttgcagattaattcaatgcccaaaccctctctcgctaccatcgtttcacactatttccaatgatcatttatccagttaattgtccttgatcgcaacaaaatatagttcctccctccaggttgtaatacccgttgtttcggataaagacatgatttaaaaaaaacaactttaatcattattttttattataatatgtatataattgttaataaatatatgattttattaaagtactttctaatactaatctatgcatgtagtcacctgtcggtgatatgggcccgggaatatgcacagtaaaggaaagtatcgatcccatctagtcgcataaccacgcggcctcgtctccccacgccccacggatagcgctaaggtggccagggagcctcggggtgccacatcacacccctcgggctttcgggacgctctaccccgaggccctcgaccagccaccacgtggcggggagagcgggcgaggcagagggcgcctcttagggcctttaatgcgcggcactccaaccgttcctcactgcatttaatgcggtgtgggtggacgtgcggcgccgcccgatagacccatgtcaatcgggcgtgaccggtttatgaccggtcacgggtgattggacgggcggtagcgtccccacgtcccaccctgtgtcaggcggagtgggggcaggtatgccccgtcctatcgatgcactgccaggagcgccctccgcgcgtggtgagccaccaaagtctccatacatttaaaggggaatgacagggatgtcccccgtgtcaggcgggggacggtgctgggccccacccaaggacgcacgaccaccttgcttttggttgaaggcatgaatggcggtctgatccagacagggtgggtccccctcccatgggaggggtaggtatagacggtgcatgtggtatccccttgaactataaaaggagaacctcgcccatcgagaaaagggacgactctcgattgcttgagctctagaggaataacagctaggtttccctaggagctcaagatctcttgtaagacctaaccataatcccacacacaggagtagggtgttacgcttcccagcggcccgaacctgtataatcccttgtcttccacacaaactcgtgaacgatccagtagttagatcccaagcggaagtacgctcttgatcatcgcgccatctcccccggccgaactcacaaagggaggtctcacgaccacccgctagagaggatcactcctcgacatcacaatatttgaaagacaaatattttaaaaatgattcataatcaaagattctaaagtttgacctcactttttgtctaaaacgacaagtattatctgcccagaaggagtatatagcctcgtagcttcgtttatgtttataaaactaaaattcaaatttatctgtttataaagctaaatttcaagtttacaagataaattttgaagttgatttatggaaaaaagttaattacagtttagtgttttataacatgtgtttttcaatagctgagaacacgtatataaaagttttaccgagaaacaaaacaaattattttgtttgttaataaatagtatggataaccatgtgaataagcaaggaaatgaggctaataaacacatgaagaattctcactatcttacatatataagaagatatatatatatatatatatatatatatatatatatatatatatatatatatatagtttttgggaagtgtacacataggtagcgagcaaacctaattaacccccattacagcaagtacaaaattggtagccaatcttttggggtccctgcacaggggcccccacaaagtccgtgcctacctagtcttgtaacagggaggagtttgcaagcttagctggttctctcctctctcaaatctcgtcaaaacactgcttgccctaaagatggtgaccctagccagccaaaggccacaccatcatccatcaccacaaccacacacacactctctttctctctctacaatgctactaataatcataaggggattacaattaagataggtaatgagagcaactaattatataatagtagggggaggtgttcatgattatctgtactagcgatcgaaacacggtttacgcgtacgtgacgatctgatgatgatcacgcgagaggcgacctgtgtggggcgcccttcctcctgttgttcagtgacagcacgatctgggggaagaacccgccgccgccgccgctcttcttcttcctcgggacatcggccgtcgttggcgccggcgacgtgctccggccgttgttgctggagccgccgccgccgtagtactggtggtggtggtggtggagggggtcttcgaggatggagttgggtgtggtcacctggtggtcgtcgtcgtcgtcggagaggccgccgccgccgccgccgccgccgtcgacgcggaggttctcgaagcgcgggaagccggcggcgaggtcgggctcgccggaggagccgccggacatgtagaggatgttggagaggtcgccgccctgcatcatcacgtgatccacctgcatgccaatgcatgcacaaattaattaacgacacacagtcgttgtagttagtagctcactctcacatctctcgtgacaaaatttttcacccgtcacatcgaactcaaatgtttgatacatacacagagtattaaatatagaaaaaaaaactaattacacagattacgtgaaaattatgagacaaatcttttaatactaattgctccatgatccaacaatgtggtactacaataaacatttgctaataacaaattaattaggcttaataaattcgtctcgcagtttacatgcacaatttataatttgttttgttattagtctacgtttgatacttcagatacatgtccgtacatctacgatgtgacacgctaaaactagtcatcctagatctaaacccaaccttattatcattagagttgtgtgtcgttaattaatatttctcaatcgatcgccaattcgccatgacagtaaaaaaattttctggaagatgtgtacagtggctatactacactactgtaccttgcaagagaggcagcagaaatggaagggctcctgcaggatcctgtcacatgtcaagcagatgttgccagagcccttgaacggcctcgactgaggccttggcttcagaaatatcacctttgcgctgttgatcgtgtatggctgaaatcaaattagaaccaacattaataattagctctacataatagtaaaactgaacagattagtttcagagtttttattgccgttcaatttacctgaacaaaggagcagtcgatgagcttgtcgagatcatccaggcgaacaacgtcgttgtacacatacctcctaacctatatacacgtataagcacttcaatgcacagtatacttatacgtacggtaccgtttaattctagtgctagtaaaagaatcttcggacccatcgtttgcaaacaaaaagtaatttgtgaatataacttttatatacgtgttttagacaatataaaagtaaagtttgaaaaataaacttcgatgaaaaaactctcaaaatcagctctaaatttaaggttaaaaatttaaattttagctgataagcataggccattattccattattccatccaaattcaaattttagatgagacccttctagaagttgtaattgttgatgaggtaaaaaaaaattccattattccatccggacgctgagccaggcagggaaaggatagactcccccggtaataattgcgagcctttgaccggcggctcgtcgtcatccacatcgtgggagggagaaacaaaccctaatttaccataccacccctacaccttccacttctctcggtcacacaacccgaggtcacaaatgtaaaaaaaaaaacacctccaaattaaccccatgacactgtaaaaaaaagatagagagtgtgtgttactgcctgaacgaatgaacagtatcgtcacggcgaccttggattatacagagccggagcaacagtattggggccttgtttggtaggaggacagggtcttttaccaagcacacatatggtaaaaaaaaaaacagagacactgctcacttttttttttactgcatctcgccaatggcttctctgtggtctgtagcctgtagtttctgtcactgtgactactgcagctgcgatcttaacagctctggctttggctgagacgatggatggatcgtagctagtatggctagatagacacaggattgcccatccatttatcaaccaaccggcaccgtctatctttgcagggatagagatcaagatcggcatgctttgctattcatggctaaacaatccggataacccaacccatttttgtgctaatagatcaatcttgctcactgctgcagtttggatgtatttaagaattagagcttttgtagttgcaccagactctctctggaaacacacaaattttataaaagtttgacaaaaagaagtggttcattttatgtggtgatcagaagtttttactggttaattataatggagagcaggacacaagggctattgtttgtttaccgctgtcaaaaagagagatggccttttttcatcagaggtgatgactgtgtgtgctggcctttgctgctgctgctgctgctgcaaaatgtaacttttgcaggtggtgaggtgaacagaagagaagagagagcaatgcattgcatatgctttgcacaccggaatggggaagatgtaagatgggactaggcttaattataagactatggttatttcaggcgtatgggactgaggctcgcagtaacttcttgccagagagagactcatttttcacccttcttcccaattttaaccactccacatttctactactcatggcccaccaaacagcagccaaggacaggaagaaaaattaagtttggcaaagaaaaatacgcaagaaattaaggtggtgattagcagtgtgaaagtactaatgtgtgatttaggtgactaatcagggtgattaaccgaggggtcactttgcaaggagcacaaaacgaaggccggaaaacgacaaggggaagacgaaagatgggcacagggttctaaaagggtcgagagctatagctgcaagtggttaagtgagacaccccatgcgatgcagcttaagcccaagcaccgccgcaattaagcccaaccaaatctaaccaaattatgctagaaatactactgctactagtactcctagtggcacactagcatggtcgctgatgagaggcaattagcaatctttcctctgaaaatgacacaattagcatgtcatggcacatggaagaatcaacaagatcctctagctgcccacatctactggtactagtagaagcaaatcttggaataagccaagacggaaaggctagtgaattaggccaaagctagtgcttttttgttaagtacaagctagtagctgctatacatgcaaaagctaaaatcctagcccacacccccacaaatccactcaattcagcacactgtagcacacccccaacgatttcaaagcagataaataaacttgtaattgaagaatttcaacagactaacacactctcacatcacatgcataatctgaaattctgaatacagttaagatactgcaattaattaacgaagaagatagacatgcatcatatgatgcatgtagctagagatatatgcagtgtatcgaggacatgcatggcatggcaattgggtcgccggcgccggcgccggcgacgaagacggcggattgattacctggaggagagggtggtggcggtgggagggggcgcagtgggggcagatgctggcgcagcagccgaggcagaagatgttcttctcgttcttcttgcggctctcgtgggcgggacacccaacgaagaagctctcctccacgagcccccctacccatccaggcctcatccccatcaaccccttcgtcttcctccaatcctcctcccaattctctcactttcttggccacagctacctagctaccaacaatctctctctgattgagtgtatgtacgtgcgtgcgtatgtatgtatgtacaggtgagaacagaaattaaagatcgatgcgagtttggagaggcgaggagaggagaattgggagggattagtggtggatagcaatggaggaagccatggcagggtatatatagagcgggagaaggtgaaggagaaggaggaggagcttggtgtggtgtggggcaatggcgtcaaggggacaccatggggttcggcggtcaaaggaccaattgggcgtcacggtccaagtgtcggggaccttctcgacaatatccaaccaacttgaggggtgtttctgaattatccttgctcccatggaaaatgatcggtctctgcaaattgattctttgctaatttaaaaagtactaataagaaaatggaattttgtagtgccgtttgtacggaaacaatgctaggccgagcggaaattttcgtgaccgtttttgtccctcacaactttgtgtgcagtcgggcaggattagaataacagcgttatggggtgctttctgcgaagggttgtttcgctttgccaagggaggaggttattgccacctgcgattcatgtcacgactcgtgagagaatataaatcatttttaagtaaatttcataaaactataaatattttaattaaattttaacaaaactagggatatatcacaaaactataaatttaacggcaaatctatcgtaactttaaggctaagtattgcaaaactataaatttaataataaaattatcacaaaactacatattttaagctttagttccttaccactaatgttatatttgagttatgaatatccaaatttagtgattaaattgacactaaacatgtagtttcgtgataattttgttactaaacctgtagttttgggatactccaacttaaatatgtagttctgggataaatttagtgttaaatctgtagttttatgatatatcatcttaaatctataggttttttaataacttgacaaaaatatttatagttttgtgaaatttactcatcattttgttttgggtaatttaatacttgttcactttattatcaaaattaaccaaatatttggcactttcaaaattcagtacatttgtcgctactaaattttggtgtcttttgatatgtcgtttagtttgaaactttttaaattttggtcatgtttttgtgagagattttctagaacttccaaattctaataaggtagatatggtaagaatgtgtttattttgctatcctaccaaaattggtaatataaaaaaatagcagggttaaaaatgataatgaagtgaacttaagctgttgtttgcactgatgaagtgatgagcattatacccctccttttattttattttttttgaggacgacccctttttttctgtcatcataaaattgacgaagatactgataatttcacatatctgctgctaatcttgatggacatcggtgccataaataaccatcttaattatccaaaaactgccatttgttcttccacctttgaccacataaaacaggagcaggcattcccacatgcaacagccgcacggctgcctgaagactgatatgattagtgcctgatcgaatgcacacaaatctttttcatcagctaccatagcattagcgtggtcctgatctatgctactaactttttaatgtgttcttgaacacagtagtacagcacagacaagaagaaaataaacctcctaggttgctgaattccagtcatctcaaaatataataacttttagctattaatttgaacacatagttgtctagattcataactaaaaatgcttatattttgggatggagggagtaacaaaaactgcaataccactcgttacaatctgaaatccccattcttgtcaagccttaatttcaattttttttcccttcaacacatacacagcttctggcattattcttccctgcctcttcacaacctgatcgagcacttactgctgctaccggagtagtacaagtttggtaacgagagaagaaattcgagctgttgctggtgttcgtcgctgctcacacagcatctctgcctttccggttagcccagtacaaacagtggtacgtactgctgccttttggtttcttgttttatgtggcccgaattcttttttaccctcgcagcaatttcaaagctcctttttacaattttttcacagtttcttggccggtagcgaacgcttctagcttttttttcatctcaatggcgcagtacactctgtaccatctgctatctcctacccaaaaatataaaaaccttgaatcagatgaaacgttttctagtgcaatatatttgaataaagatatattatactagaaaacatcgagtccatccaaatacattgtactatagaaatgtagcatccggttttaagtttttatatttttgagatggagagagtagtactacggcagtgtttagttcctcccaaattcccaacttttcatcacatcacatcacatcgaaaactttcctacgcacataaactactaactttttctccaaactactaattttctcccacttttcaacttttacaccatctaaacacagcctacgtaggagtacgttgtgttgcttcaaattttacagctgtatcccatttcatatttcttggcatgctagtgaacttctctagggagcatatttggttcattggttgttgagtagtagtactaccactataatttggattgctagctactccctccgttttaaaatatttgacaccgttgactttttagcacatgtttgaccgttcgtcttattaaaaaaatttgtgaaatatgtaaaactatatgtgtacatgaaagtatatttaacgataaatcaaatgatatgaaaagaataaataattacttaaatttttttgaataagacgaatggtcaaacacgtactaaaaagtcaacggtgtcaaacattttaaaatagagggaatacattatttatagaatttcttgcccaagttttgtggagcttgtaggggatgattgtgttagctacactaaaatgtttttattttgttaggtggagaccaattatatctagctagtagtttttcctggtaccattccttttggggccggtctgtggatataattttcggactcagcatcattgcatttgatcagttcctggccagatcatcagtttagcagtttctctaacacgtgtttgtagtgcacatgacatgatcaaccaaattcgctcatttttatgccctctctggcgcatctcctgcgcccatgtagttgcgaatctattcttaaccttaagcaatttttagcatgtcctagctaagctagagtgtgagatctatattatattattccggtattatttcgcatgtgcggccttgtgcaattgtgcacgctggtggcggcgtaaatcgtttagggccgtcctaataatttgaaagccatgtgtcaaatataaaaattaaaagtcttatctttagtaatactaattacataccccctccgtccaaaaaaaaaaataatcctgagtttaaatctggatggatatatatgtgtccagattcaaatctagaattagtttttttttcaggttcaaatttaggattggttttttttaacgatatgtgtcaggattcaaactcaatattaggatttttttttgatgaagggagtaatagaataatagaataggctatatcttatatttacaatataattaaattgcagttagtggccttccaaccatgccaggaaagctagtatcaatataatgctcctttatttaattagctaattatatcctgctatcaaacgaacagaaattattcgcaaccaataattactagcgctatgtcaagtagcttaattacccacctaaatatgtatgacgatctgaccaagtagaagaagaaccgttgaaacaattcagctttttcttactaaaagaaaaaataaagctgtagccatgcatggttactatatcgaagcttgtcggaattaaaaaaaaaaacagcttgttctagccgattgagtggagaaaaacagagatttgagaaaatagaataaacagattctaattatatcggaacatattgccttgaataatagctagatacatacggagtgaaagccctatacggttgcacagctcacacgtgtctctagatatggacggacctgcgctaaatataaatttcggtagacacaacacatcaacagcctaatcaacttggcatatactactccctccattttataatgtaaatcattctaacatttctcacatttatattggtgctaatgaatctagacatatatatctatctagatttattagcattaatataaatatgagaaatactagaatgacttacattgtaaaacggaggaagaagtagtacgctactgtaaacagcgtcggtaaatcacctttccaacctacgccgccgtacgtcggatcgacaatctcgccgacccaatgattttgccggccgtacaagcccttggacctcaccgccggtgacaaaatggtaagtgcaatgcatggttaattagccagccatgagctagcaaattctacgcaacaaatcacctgctgcatatatatacactccaaaaccatcaccaatatacagacgacaggccggttcaggttcaggccatatatatatatgctctctaacctgaaactcgatcaatgcaagagtagcattggtagctaaaacaatacaacatctcgatcaaaatgtcattatctgaaaataaaacaaattgcaaatgcaaatgcaaatgcagcacatgttgtagtggatagctactaccactagtggcatgtactagtgctaccccggcctgcatgtacttgctacatgtgatggatggatcaaagtaggggcaataagtgcgagaggaggggttagccgtcttgacgacggcccttgtcgtcgagcccgttttcggcacgcctacacgagccctaggggtgtccatttccggcctcgcatgtgccttttaactcttgctccagtaacctgatcatattatgaattcagggtgtgcaagtcaagagaggaggagagaaattcaattcaatagctgatcctggcccatgtacatgcattgcattgcatatatatgactctgtgctagctgctgccattcgatcggtttatcttatccatcaagtgtgtttgtgtgtgtgtgtgcaagcaatattatggaaaccctgtgccatgtgaacggtttctttctctctcacctgaacaaagctaagagcatgccatgataggattggtggttgaagaaggcatggaattttatccatgtgcgtgcgttcgcggttggactatccgcttggttcaaggtagcttttagcagctgcagggtttatcttttcgtttttgaaataaaaaccgcttcgtattggtttactgaaaacataaaactggtgaccttcggtaagcgatgtacgaaaaccagctaaaacggatcggttttcacaaacagacaattaatgtttttacagaagatgtatgaacggttttgcgaaaaaaaaagatcggttttgtgaactctaactttatttctaatctccaactctctccaaacaattcatatttttcattcaaattcttaaaatctgtagttataaatcctaaaaaaaaataaatcaaagttggttattactacctttgaaaaaaataaatctgtagttattgctttatgaatttgatttttatgcttcttcttctctctttctttttaaatattcagctttgatgaggtttagcaggattgcagctaactgatgtctatgcatatgacaagagcaataactctgttcttgtcaaatcaggatatatagtataggtgggtgaaatagcatgtgtgcatgtgttgcatttagaagaaggaaatgcatcgagagaaattaaagagcatgcattgcattgcatgctgcctttgtcgttgtccctagccaagttttgatgaggatcacagaggggcccaaagtgcatttaggggactgtttccaatacacgcctacaggcatatatatccacggctcacatataaccaattttttgttagtaatagaagatttgactgaaactgttaccctatcataacccaagatctctgtcctactactactactatttactaaaaaaaatagggtgcaacaaaaaattaattaattaatttattaacatgcatgtcacgttttcgcaccgctgatgaagcccaaacttaatttgcagcaaaggacatatatatatgtgtccagtgatgaagcccacaggtaaaggccttcttaatcttgagattacgccaagaacggcccatgtatcatatcgtcggctgtgttgctaagatgcttgcgtgctcactttcagcttggaaaaacgcaatgaacagttgccggggcctaggcttcgtccatccaccatggaatcacctacgtgagagcagtattgcagtaggttataccacacaacgaatttctgattaagataggttacataattaacataatcgttcaattaagatgcacattctatctcgattttcattagcatgtttttcaaatcaataaacagcttttttttaaaaaaaaaacttagtagcaccctatatcacccgttggttcccttagtcgacatgtatgaatcgacctatggtgggcgggacctcatgtaagacgctgggcctcaaagtatgggtcaaagcctaaatcatagagagtgatatccccatatacgaggagactagcttttgggatctttcttggtcaggctccgattaagctcttcttagtgaaataccatgggggtggtttttcccaaccaactaggtttatgtgaaaactttatatttgtaagttgccctaaaattttaaataaatttatttttaaagtctataaaaatttatactcacttaattatataataatggcttaactcgttttacatgggctaaaaaatcttcgtgtgctagtgagaatttgggtgaatagccaaaatggtccttcaagtttcatctgatgctcggtttagtccttgatgtttcaatctatctatattagtccttcaagttttcattttagttcaaacttatccttgaaccaacaactctcttcataaatgacatttataccctcatcattcacatctataagagaaaaattgcatgcttcaatttttttatagataatacatagtatattatgtaaaacgaaaaaaaattatgtactaacaagtgtatacgatagcaattgcttaagttttatgtgcacatgttgaaataatgggaagtatatctgtaatgttgtttattcatgttgcctttctcttttctagtatatagatatatacaaattaagggtaaaaaggacattttctaatagaaatattgatagaaatagccatatggcatattaagtgcacccaaggatgatttcaagtcaaaacaaatatttgaaggacctatgtggacaaaatgaaacgtgaagaaccaaattgagccttagctgaaacttgagggactaaattagctatttacccataagaatttcagtgtggttggtgtttttgaaatccatttcatgaaacaatagagatgcaagtgggtagtctcactacctgtataaaaactcgcttgctagtttatttctcacacaataatataaaatttaaaagaaaaaataaattaaaaatgagataagcgggctaaaaaaaacctacatgcccgtccggcttgcatgcctacgaaacaatcccatgtgtggcagcagtggacaccgtgtggccgccatgtgaggcgcgggcgctgcacctgtgcgacgatccaggatgtgacgcgtgcccccttatcgtccgtacgatgggccccaccgtggcctgaagtgggggaacatgccaagtggggcccggcccggccgacctctttggagttgttcctgggccgtcagatggtctcatggaagaggtccaagaggaggacgtcgctcccgcatgttaggacagtttgtggggcccacggtgtcagtgacagggcgttgtgcctagtcaaagttgttgactggctgtattgcgtacggaaccaccgactcttaccatcgagatggattgtgacgtgcagtgttacagcttagggtgtgttcggcagctcaattactgtggctgtttagttggtgaaataaaaagttttgggtatcatatcagacgtttggtaggatgttggaagaggttttcggacacgaatgaaaaactaatttcataactcgcctgaaaaccgcgaaacgaattttttgagcctaattaatccgtcattagcacatgtgggttattgtagcacttgtggctaatcatggcctaattaggctcaaaagatttgtctcgcgatttatatgcaaactatacaattagtttttccttttatctatatttaatgctccatatatgtgtctaaagatttgatgcgatgtttttgggaaaagttttttttaactaaacaggcccacagtggttgtgcagtgctgctgctgtagcggctatggctgaaattgtatggtgctactgtagctattggctgttagtacaacttttttttaagagctacaacatgcaaatttcaaatttgattcgagcttatatgacatgcgccggtgtatttgataggtctaatctcgcatttcagatgtgccgaaacatataagctaaaatattagcatccatcccaaaatataaaagttaatatttactgctccatccgtcctaaaatataataatttagaactggatgggacatcctggatgggacatccggttctaagtttttatattttgggacggaattatcttgtggcattaaaattttagtgtaaaatttagttatctaaagttacttttgtaaaaacagtttaaaatttttcataagctaaattttgcagtgctcatgtacgactgtcattgttgtatcttcgcaccggaaaggccaaaacagaattatctcgttaggcaagtaggatgagacgatgccacaagtagcatgagatgagactacatagtggcatgtgacacctttacatactacagctcacatagattagagatccatgcgtacgcagtcctaaaatataaaaataaaggaatgaaagcaacatattctattactgtgaatctaagccgattcatagtacaaatatacatctcattttgttatataggtttttataatttaggatgaagataataatggctgccacttcactcaaaacaacacaagattggaaaagatgaggtctttcgagatagaaggagtgggaaaaggagagctcaaagctcatgactcgaatcagctcggattggtttaaaggtaaagtcgtagcgatatagtaagttcgagccaaattaggcttttaagttttaactagtaagcttaacgagttagatcgcgagctaccttgttagtataagataccaacgtatctttatatactttgtgcttacttagcattttaattacatctaaactacttacatttagtgagttctttattactttgtgtttattattatgttaatataagataaatttaaaattatgaaagtaatataaatgagatataagaagtgaagataggtactccctccattctaaggtcttcatcggttggctttttccctaacaagccaaaacggcttattagggaataaaaataaatttgtaggtaaaacttttatatatgtgttcttggtgacttaaaagccaatataaaaaagaaactacgctgaaaatatctcaaaatcaatctccaaattaagtttgaaaatttaaaatttggctttttctttggctgattaggccatccgatgagagcctaaaatatactacaacttctactcctccgtcctaaaatataataacttatgggctttaatttttttccaaaaacatagattctctttccaaccaaccataacccctctaccattcaattttttcaactacctccatttctcaaccaatcacaatctcattccatttaattctatatattttcttaataatcgtgtccaaaaaataatattccgggacaaaattagcagcatttaaaattcgtttcaaaatataacgatttcttcacttttattgagttctcaaccaatcataatcttcgaccatcaaattctccacatatcttgctttttcaaccaatcacagtcatttctcatttaatttcacctactaccactctaaaacctgttatattttagaatagaagtagtaactcattaaacatgtcctctatatttggtttggggatgaggtgggatgggttagactcatttccatttcttggattcgtccgtcaattttttagggaccagaccatctgaagggaaatatttcctctcaggatcatcctattccagttattctcgaatcaaacgctattaaaaataaatcttgctatacgtacgactgagccatacgatttgtgtccgaccgagtcatacaaccaatcactgaacttgtttactaccatgtgggcccaaacaaatagcatatatgcttatacatacactagtcggatggatgggtcggacttataggtcggacgtatagcaatttcgataaaaaatagattcagcctgatccatcccaacattcaaccaaactaagggtgtgtttagttcacgccaaaattagatgtttgtttgaaattaaaacgatatgtgtgtagaaaagttttaatatgataaaaaaagttgaaagtttaaagaaaaagttagtaactaaacaagggctaatgcataagataactgcggggtcgtcatccacccgaattgcccatccggccacggccactttggccgcagcgaacctctgaagcctgaactcggcgatgtgagatgagagaggagagactggcaaaagaagaggactgccattctgccaacaaggcagagagagtactcgtcaccctcaccggccagtcggccacactcgagtgtctggacgaccgtcgtccgtcgtgtcgccaccacacactcacactgtagctagctatcatctcatcactgaaactttccaccaatcctttcctctaaaaaaaggctccgcttttcaggcgacacacagcgccgcgccgcatccgtccacgatccatcggcatcggcatcggcatcggcatcggcggccatgtgaagcgcggcccccgccaccgccaccggcgcgcgatcgagctgagctgcgaggagaggagaggcagcgaggcaggctgccacatgggcgggagacacgcaccggcgttgccaacctcaccgggggacagccgtctcgtcgatctggtgagtgactgttgtctgctggtgtgcgcaggcgcaggcgccatggatctggatgatggatggatggccggtgtcgaaactagatttcggcaataataaaagtgtatgggtttggcagtcaaaattagatgtttgtttaaagaaaaagttagtgttgacagtcaaacttgatgttgacagtcaagatagggggtggctatcaagctggaaaagtgtatgggtttggagacaaaggatttatacaggttcaggccttcttataaaagaagtaataccctactcctgtccggggatgaatccgccgagtgtattattgattgtatgatttagagaaaatcaacatccgcccctagaggcgcccagaccctccttatatatgggaaggagtccgggttacaaaagataatctatatccctaacggaatacatagatacagatcaaatacagtcgtgaccgactaagtctcaaggtgtttccttgatgtacaagttaagaaacaaacccgagatacaagtaagatattctatctatattcggtatcctatattcagcccaaatattgtcgccttgtagatatgggatatccataatctccacagtagcccccgagacctttgcagtcaaccatcgtagccttcccaaagataataatccgagtgcttcaaacttttcatgccaaggcctaccgagtagcgaagacgaagactgtaaagggcgaaaagataaagaatatggtgcatcgaatagatgcacctaattaggtgtagcccccaactatgtgattagttaacaaactaatcatatagttgagaacaaaataatagcataatcatgcatcatatgacaatagcatacgcggcgcctaaagaggcattcttgccgactgctttttagccataataaaagaaatccgagtggttaacactctaaaaggttcacgaatgaacacactggacaggcatccgaatataaaactctaaagattacccaccaagtattataaaaattatggtaatgaataagtctaatagcctaggctatgactatttaccataatgaaaataggtatataacataccaaggaagtgactatgataaaaacaagtcattccaaattaacccagacagcttttgtagcctaataaagctaacaaaaagcagtataacacctttctgtcgggcacctcttaatttgcattgcaataattccaaagaattatatgaccgcataaaaaggattttatcagcattgggcaacactattgtgcgcataatattgccaaagcaaaatatgcctaagtccctaaggaacacaatgggccacgctgttaaaagtattgggctgaagtactgttcaggcctaggcccatttgcacctccgatacccttaacaagaaatcccgagatccaagcgacgcttcgtcttccccgccggaactctcgccattttccccactccttgctacagtgcagaactgcgctggcgaactagggttcaccactccactcaaatccaccttcgaaaaagtgcatcaaaatccttcccgtgatccaccgcctcaattcctcacctctcccaagccatccctcgaatcaaatcagcgcattcggggaaaatcgatggcggaagagaaagaaagctttgaaggccagtgggcgccgtctgacgtaacggaagagaacctgaaggagatggtggcgcacggcgttctccctgccaaggagatcatcgggtggcggccagcgtgcggtgagatttttccgacccccgatacacacgagattgtggtcttctctcatttcttctatggcggcttcgcccttccgacctcgaaatttttccgtgggatattaagcttctatggaatgagcttgcatcacctaaacccaaattccatagtccacattgccaatttcatccatgtctgtgaagccttcttaggaattaaaccccacttcgctctgttccgccgaatcttctttctcaaacctcaaccaaacaagagtaagccatgtgtagtcggaggggccggatttcagctgaggggaactctgagccagaaatacttctcaatgcccttcaagacttcaaacaaaggatggcatgcgaactggttttatgttcagaatcctgagcctgctcttcccgaatactcttgtcttcccccggtgtaccaagatacttggaactctcttccaatcggagatgaagctgcccaagccttggaattgttggatcgcatgttaaaactcaaagaacgaggcttgcaaggagagcagatcactcggcatttcatcaaatgccgactggcgccaattaaagaaagatcccgtacagcttttgagtttgacggcaagcatgatcctaatcgcgaagaaccagactctctggatttcaaaatcatgaaggagagaatgtataaaatcttctcaaatgctattgtcgtcagctactcacatcagctgccagttgtaccatataatgcattcaatccgcctccgcaggtatgtatctgaaatcttcaacttatgaccaaaatagtatcttgtcttcatgttgagttaactaaccatggaggcatcttattcaggaatatgtattgatgaaatctgatcccccaattgctcagcgccgatctcctcgccagcacaccattcagggaagtggagggccgacaatcaggtcagacccacaacctcagacctccaaaccggctgggcagacaggtcctcgcaagagaaagctggtgcttaatgacgacgagggcgatgacagcaacaaatctggggacaagggcacgcccaacaaactcccaaagcataccatgcccaggaaaaaactggctggccgtcaaatgccaaagattagaacatcttccaggtataaacttctcggtaccatctccctttgatatgcttctctcatagaaattacgctgaatatcgaaaggacactttgcaggaaaccatccgacatagatccaactggaaaagatcctgatccggctgtgacagagccaaatttatccaaagacgctgagccgtctgccgaaaaccagccgactgccgaaagccagccgactgccgaaagtcagccgactggcgcccatgcttcggatgacaaagccgatccgagtgaccagccgccaactggagaccagtcggcaacagctgaaaccgcaacaacacaagagcccccgactggaaaccagtcggatgtaggtcccgatgaagaaatccctcatgttcagccaggaacatcctcaggtaacacatcttctcaagtgatgccgatttaaataacttcagcttactcgtctaatgtcttggaaatacatcaggaacactaggcgacgacgaagaaacaattcctcgcataaaggcggctgatgattcccgtcctcctatcttactcaaatggtgggacgagaattcgcaagttgccggcatcgtcataaatcgtcaaaaagaagatgaggaagtgtgccagctgaagaaagcacttggagaagccactcgcattgtgaatgtaaatcttccgggtgactgcctttaataactttgttctctctttagcagaactgaaccatgatccatcatgcagagaatccatcttcgcaatgaggccaagactacaactttggaaaagctggttcctcatttgggaactcttgaagcagttagggaccagctgcatgaggccaaggagtacgccaaaaagacagagaaggagttaagggaccgaattgcccagctccaggattcaaacttcgagctaagtggttcatcaaaaggtaatcttctagatctgtcccattaatttatgctgtcatagctgtatcctcaaacatttggatttcaaacagcgcaagctaccaggatggctcaaatggagaaacagattgaagccttgaaaagagacaaagtagaactagctgcgcaaagggactcagccttgaaggaggttgaaggtactgccaactgacaatttgaactttcctctctttaatgcagcagactcttattataaatgtgttttgtagaccgtaaaatcaaatctcaagctcagtttgatgtcctggttggtaagatcaagaagcttgaaggagcaagagacgaagtcgccaatgtcgctacaccacttgtccaagctatgttccttaataacagtggtccgagtgcacttgacgcaaccgaaatctttgacaagctgagagttgcaccggatgtatacttcaaaaatatcaagaaagctggaagtatgggagctagtatggcattggcgatgaccaaatccttgtacccgaggattgaaattgataccattgatggctttgcagacgggacaagtgaagaagctgctcttgatcttatcagtaatgctcaaagtgcggctgacaagattgcaagtgatgttgtagagcaattccgcaacaacgatcttcagccgagtaataataactctgatgacgaaaggactgactctgactgagtatgaatgtaacaaatggaggctcaatttgtacaatactggtgtatttatgctgtgcttgatagttctagccaagtctttgatttcttaaaagcttttatcaagctttgttgagcctaaaacccaaagaagctattaaaaactttcagtcctcgcagactaagtagaaaaaatcaaacaaggcaatgatagaccaagtaagcaaattaaaaaaatcacactccattattatgatgatagcccccgactgacaacttcaagaagaaaacttgatgttgacagtcaagaaaacttgatattgacagtcaagatagggaagtacaatgataaacttaagcgtagaaacgacgaagatgttcaatgttccaagagttgtcgacaagagtaccgtcttcgcgcttgagtcgataagaacctggccgggtgacttcagagataataaatggcccttcccatagaggagataacttgtgccgatctcgtgtagtttgaattttgcgcaaaaccaggtcaccgactaaaaaggcacgagatcgaacattgcgattatgatagcgccgcaacccttgtaaatatcgagccgaccgaatcaaagctgcttcgcgggcttcttcgaatcggtgcaaatcatccactcggtcctcttcgtagcgttcttcacggaaatttcgaaagcgcaaagactcgaattcaacttcactcggcaacattgcttctgccccatagacaaggaaaaaaggtgactggcctgtggcccgactgggtgtagttcgcaaagaccaaagtactgatggcagctgttgcacccatttgccggcataaggttttagccggtcaaaaacacgcgctttaatcccttgaagtatcatgccattggctcgctccacctgtccattgctcatggggtgtgccactgaggcatagcaaatcttaattccaaagtcttcacaaaagtctttaaaaactccaccggtgaattgtgtgccattatcggtaatgatccgattgggcactccaaatctatgcacaatgttgatgaagaagtctcgagcattatccgctgtgattgtgacaaccggtttagcttcaatccacttggagaatttgtcaatggccacaaagagatgcgtgtaaccgccaactgcctttttaaacgggccaaccatgtcgagcccccaaaccgcaaacggccaagacagcgggatagtctgcaactcttgagctggtagatgaatttgtctggcgaaaaattggcaaccttcacatgtgcgcacaattttgtcggcgtcggacactgcagtaggccagaaaaaaccctgccggtaagctttgccgacaatggtgcgtgcagcagcatggtttccgcatatcccagaatgtatgtcgttcagcaattgtctcccttcctctaaagatacgcagcgttgcagaattcctgaagggcttttcttgtataactcagattcatgcataacataaagtttgctccgccttgaaatccgctcggcttcatctttatcttgagggagctcttgagaagttaaaaatcgtatgaagggctctcgccagtcggcttcaaccatagctacgtcatgaatgtccgcatcttgagcagtatctttatgaggtacggtcggtgtataaaggtgttcgacgaaaacatctgagggcgccgtctcgcgcttggatccaaaattggcaagtctgtcggcggcttcattgttgtgtcgaagaacgtgactgagctcgagtccctcgaacttgtcttccaatttgcgcacctcttgtcgatatgccatcatattgtcgtcaatgcaggaccactctttcataacttggttgacaaccaactgtgaatcgcctcgaacaatcagacgctttatccctagggaaattgcaatccgtagtccatgaaggagcgcctcatactcggcaacgttgtgggacgctgaaaaatgtatccaaagcacatagcttaatctttcaccagttggggaaatcaaaaccactcctgctccagtgcccgaaagtcgttttgatccgtcaaaatgcatggtccagtgctccatcttctccgtaggggtatcctcctggcactcggtccactcggcgacaaaatcagctaacgcttgggacttgattgaaattcggggcttgaatgatatgtccaaagacatcaactccaaagcccacttagcaatacgtccgtttgcttcgcggttgtgtagtatgtcaccgagtggaaatgatgtgaccaccgttaccgagtgaccttgaaagtagtgagatagcttcctggtagtaattagaataccatataacagcttctgaacctgagggtacctcgttttggagtcggctaggacctcgctgacaaaatagatcggtcgctggactttttggacatggccttcttcctcgcgctcaacgaccaagactgtgctcacaacctgggatgtggctgatacatacagcaacaacggctcttgcgggtgtggtgaggctaagactggtggctcggtgaggagtttcttgaaatcttcgaaggccttctgtgcttcaggtccccactggaagttatctgttttcttcagcagcttaaagaagggcatcccccgctcgccaagtcgtgaaacaaatcggctgagcgccgccatgcatccagttagcttctgaacatctttctgggtacttggcggtttcatgttgaggatagcagtaactttctccgggttggcttggatgcccctatgagacaccataaagccaagcagcttccctgacggtactccgaaggtgcacttttcagggttcaatttcatcctgaaagcacggatgctcacaaaggtttcttctagatccgagatcaaatcatccttttgcttggtcttgacgactacatcatccacataggcttcaacgttgcggccgatctgcgttgagaagcatctttggatcatacgttgataagttgctcctgcgttttttagtccaaacggcatggtgacgtagcagtatgccccaaaaggcgtgatgaatgaagtcttcaagcagtcggattccttcagtcggatctgatgataccccgagtagcaatccaaaaaactgagaagctcacagccggcagtcgagtcgactacctggtcaatgcgaggcaacccaaaaggatctttagggcaggatttgttgaggtcagtataatcaacacacatgcgccattgccctgttttcttccgaactagaaccgggtttgccagccagtcgggatgaaggacttctttgatgaagcctgctgctaacagcttggttaattcctccttgatcgcgtccttcctgtcttgtgcgaatcggcggagtcgttgtttgataggcttggcatcttctttgacatgtaaggagtgctcaatcacctctctaggaataccgggcatatcagatggtttccacgcaaagatatctttattgttctgaagaaaggtgatgagcgcgctttcctatttacaatctaactcggcgcctattacagcagttttagtaggatcagagggatctaggggaatcttcttagtcttggcttcgctttctccactctttgaaatcttggtagcgggcacttctccttcgctcgccgtggctgcagccagtcggatatcctctcgggcagacgccatctcgcgagtttgggccatgtcgcaactctccttgtcgcatgtgacggcttgcttgatgtcgctccgtagggataggactcctcggggaccaggcatcttcatcatcatgtaagtgtagtgcgggacggccatgaacttggctaacgccgggcgtccgagtatggcatggtatgctgtttcgaaatcagcgacttcaaagctgatgttctctgtgcggaagttttcccgagtgccaaaagtgactgggagggtgatctggccgagtggagttgcggataatcctggaattactccgtgaaaaggcgcattgcttggttttagctcggagcgaggaatctgcatatcgtccaaggtcttggcgaagaggatattgagtgcactgccaccgtcgatgagggttctgcgaagcttgacattacggaccactgggtctagtaccagggggtaccgccccgggtggaccactcggtcaggatgatccgagcggtcaaacttgattgcaatctctgaccatcgaagatactggggcgtgtcgggctgaacagcattgatctcccgttcagtcaacttctgcttccgtttagactcataagccagggggccgccgaagatatggttgagctccttgcggtgatcttgaaaacctgccggggtgtcgccgtcgtccttcttcctcgatgtgctttgttcttcgtcatagttcttccgtgcagtcttggtgtattgatccgcgaattgcttgtagacgaaacaatctttggccacgtggttggagttaggatggtgcgggcattgggagttcatgatcttgtcgaacgtgttgacgcgcgaacgctgtcgagaagagtgactggcggttgcaacaagttccgcaggcttacgcttgcggtacttatgattgttacttccacctcctcccgtagtcggcgtacccttgttttgcttccaactgggacccgactgctttgatgcggtgacggcgtcttcagctttggcgtactcgttggccttttcaaacataagcttgactgtcctgggaggcttacgcccaaacttgccgactagttcttcgtggcgaattcctttggtgaacgcggcgatgatgacgtcgtcggtgatgtcggagatcttgttacgttgttcagaaaatcgccggatgtaatctcgaagggattctccggacttctgaatgacgttgtagagatcatattgtgtgccgggacgctcgaaggtgccttggaagttggcgatgaagtggtcgcgtagttcggcccaagatccaattgtaccacggggcagtccatggagccaagatcgggcggaatccgctaaagccactggtaaatagttcgccatggccttgttgtctcctcctgctgcgcggattgcgagaccgtagacggtaagccatgattctgggttagtggtaccgtcgtacttctctattccagtcggcttgaagccggccggccaatccactcgacgcaggtcgtcggtgaaggctgctactccatcaaggtcgtcgttgtggcggtccggtgaaggatgatagcctcgagctgctcggcgttgtatgattgtgtcgcgaagatcgatggggcggcgacgaggtggtgagcgaggccgttccactcggcgctccctatattggtcgggaggtgagtgaatggaccgctcgtcgtgacccctgctcctgcgattggatcctgcgccggtgatgctgaggcttggatgacggtagtcatgagatcggaagtgggggactcggctgccagtcggcgtgtggacgctttcggagttaactgggaccgaagccgcaatcatggtcttcgtctggttcaagatgttgacgacgtggtcggattgattgagctcgttttggttgaggagggtgtcgagaagggtgatcgcggcaaccgcattctgttgaggggtgcggaaaaccggtgtcccttcgacatcttgttggccgatgagatcacgcgctcggcgccctgcttccaaagctcgctgacgtcgatcctcagcctccttcgcgatccgctcacggtcctgctgctcacgccgtagccgttcttgttcttgtgcttgatgctcctcctccagtcggcgacgttcttcggtctcccgggcttggcgttgctcctccgtctcattattggccatgaaaacgccaaagtagagaggggtgtagttgtcatctaggcttccgtcgaagtcgtcgaagtcgtcgaagtcgttgtagcgagaactaaattcgtcgtactccacgatgtcagtaggacgtgagtcgacggtgggagagctgttgtagtcatccagttgatccgtcgaaaccgtgccgagtggttggaggatgacgccgacttccctgaagctaggcgaaatcggtgttgaagccgacttccgcctaggcctacgggatgaagacgctgtcgtggtgaagacggccgctaaatcgtcggggagcttcatcaggactggtgggtaagccccgtcatcttgatctggtgtcgttggagaagatgcgatctcggccgagtggtttgaagccgactcggttgagatggtcttgaagtagctttcagccgcgttcgggaatccaaacgggaccgaaatccggttctctcccgactggtctgattccgagtcgaggagagaaatcttgccgaagttgttggtgacgaagtcgaggctgccgaaccgaaacgtctgcccgggcgggaagacgaggtcgtcgatgccggagacggaacccattgcactgatcggcgaaaagcttgacgctacccctacctggcgcgccaactgtcgaaactagatttcggcaataataaaagggggtggctatcaagctggaaaagtgtatgggtttggagacaaaggatttatacaggttcaggccttcttataaaagaagtaataccctactcctgtccggggatgaatccgccgagtgtattattgattgtatgatttagagaaaatcaacatccgcccctagaggcgcccagaccctccttatatatgggaaggagtccgggttacaaaagataatcgatatccctaacggaatacatagatacagatcaaatacagtcgtgaccgactaagtctcaaggtgtttccttgatgtacaagttaagaaacaaacccgagatacaagtaagatattctatctatattcggtatcctatattcagcccaaatattgtcgccttgtagatatgggatatccataatctccacagccggtgcgtgcgtgcatgcatatgcatgtactgtagtactacaccgtagcctgcactgcacctggccactactacacctgcgttcccgccacaaggcgctgtgcgtgtcaggcgccattggatgctttgcatctttgcttacgccatgtttagtttcaaaatatttattcgaacttctaactttttcatcacatcaaaacttttctacccatataaactttcaacttttccatcatatcgttctaatttcaaccaaattccaattttggtgtaaactagacacaattttggttgggaaaagggccctctccttcgttttccgcgcgcacgcttttcaaactgctaaacagtatgttttttacaaaatgtttctatacgaaagttgcttaaaaaaatcaaattaatccactttttttaaaaaaatagctaatacttaattaatcacgcgctaatggattgctctgttttccgtgtgaagggttcggttgggaaccaagtacaaccagcgaacacacccttatccgttaaaggacctctttgatttagaggaaaaacatagtaattttggaagattataattctatatgaaaatttcctatgaagccctttgaatcctatcctttcaaatttctatagaatggacaatcctatagagattttggaggaaatttagtaaaagcccaaatcgatctcttggaaacttttctttgagtctatctctctcatccgactcttgcgttttttccacggttcaatcaaaccgtcattcttgtgtttttcctgtgttttgtaatcctctgttttgcatttctattcctgttagaatcctgtgtttttccattcctgcgattcaaagggaccctaaagcttgttttttttattcatcccccacataccaatataaacattagaatgctcttactttatcaaatccggaagttattattttttactttatctacttccaatgtaattattccatactttcataaactcaaactctgatgcaataatttaattacttagaaataaacttattttgagataagtaggagtaaaaaataacttaatatgatacggaggtagtattatggtggatggagaataaagttggacaaacgaaaaaaaacaattgacgtatgattaattaagatttaattattacattaaaaataaatttatttcattttaaagtaatttttatatagaaaattttcatatgaaacatatttaaaaaacatgctaataaaaacctaagataaaatatgtatcttaataaaaaaagaacataacatttttactgagttctcatggtagttcagttcccacaaagttccttacagagttttactccgtgtttagttccaaaatatttattcaaacttctaacttttttatcacatcaaaattttttctacacacataaactttcaacttttacatcacatcgttccatttcaagcactttcaattttagcgtgaactaaacacagccttagtggtagttcagttcgcacaaagctccttcaaattgcctgcagtttcgaaggaggcctttgaatctggagtgctaattcggcaatggcatattttcgttcctgccgcctcgcatctgtccgtgcgtggccgttttgattggtcaggttttctttatgtccatctattttttttcacctgttcaagaacccctgcatctgtccgtgcgtggccgttttgacctttggagtatggatagtctggatagtggcctagtgggtagagcacgatcacagtatacggtgcaacgcaccagattgctcagaaattcaggtgaaactcaagcatttaatttattttttttcactttcgagacgccaaacatcgtaggttcatgattaacttgtgccgatggcgagaaaaaattctgggggacttgtagcccaacactggaatggttgaactatgacaaaggcccagaaaaacaatggatggactgacaggcccagaattccttcacgtctatcccaacaaaattagtgggttgctgcatcccaacagaatgtttgcgttgattctgatattagacatgcagactatacaaagttgtgctaaataaacaagaggtgcaatgtactgaattcagcatgataaaaaacaaccagaaggttcagaaatatcaatgtcaaacacgttgatggaaggcacatggagacatctggccacctcccggtcatattcttccacaaaacttctatagttgcctgtgcaacaaaagcataataccaggggcacttagtaagtgatggacacaagtgtatgaactcgtatgcatatcttatcatcacaaccaaggttttgcttgttttgtagtgacaggattaaatttaattggtcaggttttctttatgtccatctatttaacaacagagataacaagggaataatataaattgaatttcttacttgtgaagactttccatggttgattcaagttttgtcgcattagcaccaaccacctcacctgtcttccgaccttggtagtagaaatggaatgttggctacaagagcaaaacatgttggcaacaaagaaaaagagatctagataactggaggaagctgcgcagaaatttaggcacacagtcatgagctatagtcatagtacaatgcaacttaccacagagaatatttttagatcacttagtttgcttccaacaccatcctgcaaaagcaacacaggtcagggaagtgcctatcaataaacatgtccaagcatggccataaggttcagataattatttcagccataatcaaaattggtaacatagtgaaacacattttgcctttcaatgtactgaaagtataggagtgttctcaatagagtattccagttattgagtgaactaaccaaacagtgtagcatattagtctttgaaatcagaatacaaaggtaggaagctctgaaccggacaccatcttgattaacagtgattcatggaacagtattacggatattcagtgaaaaattcccatctcataactttgccttctacatatgcagatcccatacttgaacataagtagtgctagaatgatgcgaaatatttcagactagatccagattggtcaattgactcgaggctttctacagaagaacaggattggttcaatcactagcacttgagttttaagcattgtagtttactaagggcacgtttggatttctggaatattttgcctagccaagcaatgccaaagtagtcaggttaggctatatagcctatggcaacaagagagttcatttggtttcatggctgctcaagcaaaactaccaacgatcattgcttgccgctggaggagagctgatttggctctccctggtgggcaaggattttgaggcagttattgcctaacttgccctcaaaatctaggattttttgtttgtaccaaatgcctctcctaacttagcaaggatagaacttcccttgctcaagattaaaacacaccctaaaaagcataagccaaacctaaactttgaaaggacaggggtcaaaaatactactctgcagttaacacatgggaggtaatgcaattatacatgacaaacaatcttcaactatgaacatatgagtaaccaaacaattttgcaattttaatcccaacaacacctatttgagcaagaagaacacttcggcgcatcacaatcgcagcgagatttggatccgcccacttaccatgtcaatgtcaactttgtagataggtatcttggggtaccggctgctcagttttgaaatcacgggtgccatcgctctacctacaaacaccaaacaacccatcttataacacctcacatcatcatcaaccatctaattccaaaaatcccaatttcggcacgaagatccggcacttacaaggcccgcaccataccgccgtgtagtagaacacggccggaagcttctccgctgcaaaaaggaaatcgcgcgcatccatgagaccatgatccaatcctacccaccaaaacactaacaaacaacagcagcaaaggtggaaggggagaggaagaggaatcgggcgcgccgcaccttccaccttggacatgatgctggtgaaggactccgccgatccgaccaccaccatgctggaatcacctgcaacaacaaagaagaaaaagaaaaagaaaagaaaacacgattatctcgagtccagtaaccacttgaggagaagtggtgagtacctgaggaggagggggtggtggagaagaggcgggagagagagggaaacggcggcggggaggagaggggaggaggaggcgcggggctaggttttccggggaggtagggtttggaggcggcggcggcggcggcgagggggaggaggcgaggaagacggcagagtcggtgagccagagccatactgtgccacgtcgccgtgaaagattttgcctcttttgtgcgtaaaagctcggagacgccaagcccacgacgaaaccgcatgggcctgaaagtttctcacacagtaggatgggcttccggcccagtgtatttcaggcccatttattctttacaagtctgtttatctttttatttgattgattgaataataaatactctctctagtttttaactgatgacgttgttagattttgaatatacaatttgactattggtcttacttaaaaataaattttacaatatgcaaaaatatcgattatccttattttttaataagacgaacaatcaaacatatgtctaaaagtcaaaagtgtgatctactgaaaaccggatggagtactaaagtagcaaaccgatttttaacaaaaatttaaaatgagttttttctttaggaaaaccacctaagctcagacagtgagcgacagttgcaaagctttgtttgagaccttataaagaatatctttatctttagaccacaagtagagattactaaagaatgggatagtggagcattattgcgcattatcggtgactgcaaaatccatcataaggcttggttataaaactcttcactaacattcactagttgggccacatgacctaacagaaaggataggaaattatttagggagagaaagaacctgatccaccatgtaaaattgagttgcaaggaaagaccaggacctaccaatctatccatatttgtccctaaaggctccaccagactgcatgaaatggaagtagctatgatgattactatttgagagtgaaactgaaaccaaatctgacagacaaattgtgtgtgcatgtgagtcatggtcaactaggtggcactgttgtctctaattaaataagattagtactctagcatgagttgacagagtctgaacaggagaggggaataaaaaggttagttactctgtctctccatgtgctttgtactttaccttgtagaaattcagattctcattttcaagtggttagaaaaaccttgctggtttgctgaatattgccactcaacgttgccagttcttaagagtttgcatatcacatgactagaaactgtaaaatggagtagaataccttttctcttgtaccttttaagaaaatctattgtgcatttgtgatactaataacatacaaaattcctttattgagagtgccctcaccatttgacagcacttgctgctgttgttcagtcaattcatcaccttgcttcagtaatgggtatggtttgatcatcaacctagctttttagcaagtattcaaaagtactaatgcacactgacctgcacccatgcacctaaaaaaaagacagattcagcaaaccaagaaaagatagctagcatgggctgcgtagttgggctatatgtatgaacatataaatgcaaaagaatatcctctgaaaaaaatcaatcgtgaacacatctcagtgtaatataacgaactcaaaatcagcgaaatgatcgtatcctagtttttttttgacaagttcagaagagatccagctcccaagttgacccatgaaagcctgcaaaggcaaaacgaaactatcttttgacctcatgacaccgactgtcgtaaaattcttcacgacagacatgatggtcattgagacttgcttccattccaagggccttttttccatcacccgaacgccaaaggcaatgccgttgtctgccggctatctcaagttcaattgcagatcaagaaaaattcaggtgatgaccagaccatagtaacaaaggctgagtttagatccaaagtttggatccaaacttcagtctttttccatcacatcaacctgtcatacacacacaacttttcagtcacatcatcttcaatttcaatcaaaatctaaactttgcgctgaactaaacacagccaaactgacaggtagtacatgttgtagatggtgaccattgctgctcagatcatggtagtacaagttttgccaatgttcaagtacttgcaactagaagcaaagtccaaagctatcagatgtaggatgccttgtcgatttcccccttttttcactgaacagttaggaaattgaagcttagcttcagaaaagaagttggaagagaaggtccaacaacttttgattaggtgaacaggcataccaataccatcactgaaagtgagactttggtgggttcagcactttgcagctgttcttccacaatattcggatgcttttgatcaagacctccaaactaaagacacattcagatatgactaatataaaccattttcagtgtcttaggtactagtactactatcaatttacataatcaagctgaaagaagtaggacatttctgctgcccctttgtaacctgttctttaagagttaggacatgttcagtctgtctgtctgcaggaaccgcacaaatggcacaatcgatgcatgcatggatagctggatatcaagctagtagttaatttagatgtcatggtccaggaagaacatgctaagctacaacatggagtatactaaatcatgatataggaggatatcatcgtcacctgacctaacaagcgtttgcacttattcattattaagccgtggatgattatttattactagtacaatcgtaaagagataggactaatgggtgattaattaatgaagcatcataagtatggtggtggtggtcgtactcttgatctggtcgatcgaatcaccaggacttttggtgcacgcccacaggattcatctggcccctggattttccccttggcgggaaaaaaaggtatctctgtttaaatcaacaccgtttactgaaaataaccaatctgtctgaacaattttatttcagcagcctgaatttgtgactgagcattttgagcattctgaacttttttactgaacatttgagcaccaagtgaccggtactaataatcgagctgcagttacagaaagatttatgtctcagatcactgtttatcatcagaagtggtggtgaaggattctctgacctgtgagtcaggaatcactgggcgtgtgcttgctgaggcagcatccatggcgaggccagtgagatgcagcgcggacggcactgcatgaggccgagagctcatcatcatccaaaagctgctgtttcctttaggctttagcagggtttatgttatcatcatcccacggtttagcggttaccacaagatataccatgattttgaaactgaaaaggttaccgcatattccctccgtcccataaaaaaccaatctagtactgaatatgatatattctaatacaataaatctaaatatagaatatgtaatatcagtcttggattaacgaaacgatggagggataacaatatgataatacggttttgtaaatcccaggttttagctactgaacaaaccaaatatcgtgtctttacatgattgccatcttgcttacttcgctgatagctccaactcgtaagtcgtaactgaagcagtgtcgatctcaaacacggaagttaaaaccaatcaaatgcgaactttgtttttgttattactactcctagtacctgaatctttgcctaacttcagctcgttcatcatcatcatcatcaccaagattcatcatcattcattgcatcgaaagttgaaaattgaaaattatagaaacgaaaaaaaaagcatacagtactaagagcaagtataataatagtaggctataaaccagctaaatgccgaggcaaatgatagaagagatgagagagagaaaagaagcggactgtaaacttacaaccggcttggacacaagaaccaaaaaaattctataagagagacaagtggaccctatagagaaggctaaaaaaaaacttataaacaacatatcgattgtattattagccttgctctaacacacaccagcttgtatgcggaaatgctaaggggcgatcgatcgcccctgggcgctcccctttcctccatatggtttcattttttggcaccacattactttcttattttagtaaatttacgcacctaaagtttgtacaccttaagtttacacatctaaagtttagagacctaaagtttatacatctgattcaaatttgaatttgaattcaaatattttttatatataatatttctatacatctaaagtttatacacctaaaatttatagacccaaaatttataagtcaaaagtttacatacccaattcaaatttgaatttgaattatatccaattcaaatttgaatttgaattcaaatattttttatatatagtattttgtacatctaaagtttatagacccaaagtttatgtcaaaagtttatatacccgattaaaatttgaatttaaattcaaatattagtttatagacccaaagtttataagtcaaaagtttacatacctgttttaaatttaaatttaaatttaatttttttatatatagtatttctatatataatttttttcaagcttatgttttttattttttaaaaatttatggtgtagtaggaagagaagaagatgaggagaaagaaaggatggggggtgttagccgcccccgcttgtatgtgtctaacgcgatgggtcaacctcgacgaaccggatttgtgcatgcgtgtcgtcttggcttacacaccacgccacgtcggatgggccccacactcagagccaagcctacctacacacacctacccctccgacggacggcctcacccaatcacgacccaggccaccccgggcccaccgtcacagcgaccgttatcgatcagcaggtgggcccccacggggatctttgattattaggtgactaggtgaaatcccgcgcattgctgcgggaatttagtatgataacaataaaaaaataacgtgtaagatagctaaataatatcagattaaataaattaatgtggtttatgataatttaaatttaaatagtatgtagaatgatgattcaaacgtaaaaagtaaggtggtatgactttatagaataagaaaagtagggagatagtttggaccgtagattaatcatctaaaggctaaaaacaattgatgtgatatgccttaatgagaggaaaaaaggagaaagataatttggaccatagattaatcatttaagcactaattaagtgaggatgaactatataaatatataggatatatcataaaacataataaaaatatacattgaaacattatgtgaattatattggatgataatttaacatgtttatatttgaaaagctcttaaattataaaaactataaagatatagcatgtttgtatgatgtttaaatgtgatgattgttagtagatgatgatgtggcatcttgttaattaatggattagtggatgatgatgtggcatctttgcatgcatgttaagtttaaggagttggtgggggataactttatagtaagataggattagtaaggcgctaatcacccgattaaagtcgtaacatactactccgtgattagccgcgcggaacacgtgctccggaacctggccaccggcacgcggattcccgcggcgaaaccgctcgtctccttctctcctcgcgcggtcgctctgaatttgtttgattttttttttttgcttcgattgcattttgaatttcgatatgatttgggtgcattttgcgatgggtttatgaaatttatgatgggggttacattttggcagaatgggcgttggttttagcagtggagtggagtgcctgcatccgcaaacacagcgacagcagcgtaagaacaaagcttcactgtcagagcgaaacaaaaatgtcgctaacctaatgttttggactttgtaaagggcatgttggtttagctcaacttatcccaaatcatgctaatttcaaccaaacaaagcccctactatattctaagccaaaaatgtcagaacaaaataatcacaacaaaagctcacatataaccaagcattaacttactacaattacgaaagcagttacgctatagtagaccgtaacattggcttccccaacacggtgatatcatgtactctctctgtcctaaaataactgcaaccatagtttttcgcgctcaactttaatcattcgtcttatttaaaaaattttaaaaaaaattaaaaaaattagtcacgagtaaagtactattcaggttttatcatcttataacaacaaaaatgctaattataaaaaaattttaaataagacggacgattaaagttgggcacggaaacttatggctgtacttaatttgggacggaggtagtaatactagtactaccaaaaagttcagaattcgaaaacccggtcagagagattttcttcgaaccatctgagaagaagtcaaaaacgggaaagttcatatggcgaaatttgcctctcccagctaaacgcacagataacaatttcgagcatttgactaatccataatttacaaataacctcctaaaaaatgcaaaataattccactttgccccctgcgctttaacttttttttccctctccgtttatataatccgcctcgccccattctccatcgtttcgtctcctctctctcttccaccaaatattcccacctcgcgcggctactctctctctctctgacaggcatggcccacctgcagctctcggcggtcgccggcggcggccggccggcggcggcgggtgggggaggggacgagatggaggacgtccggctgctggactcgtacgacgaggagatggggggcggcgccgccgcggcggcggcgggggaggaggaggaggcgcacgtgcgggtcaccggaatgacgtgctcggcgtgcacgagcgccgtcgagggcgccgtctcggcccgccgcggcgtgcggcgcgtcgccgtgtccctgctccagaaccgcgcccacgtcgtcttcgacccggcgctcctcaaggtgatttccgcgcgattgcgattgcaattgtgatgtgatccttttgcgtggctgagcccgtttgtcgagccgagttttgcgcgtctccgggagcaaactgggattcgtgagctcgttgacgctcacgcggtggtaaattttttgaagttttttcttgcgctggaattattgcgtaggtgatggttggtgcggtagaacaggattctaggaagctggatcgcgctgcttgctcgtggtttttctcgagcggttagaagttggtgaatcggaatttactcttgtctaataataagttgagtttactaattactatgtgtgtgagtgtgagaccgagtcaatcgtgtatgatattgcaattttgggttttagctggagatgattttttttttctttttgacttcaccttgcgatgacgacttttcatgagttgattcgtgaaatgtggttagcccacagtgcccagaggccagagtttttgtgctccttttgctttggcggttggatgagctgtaaccttgttgcaagctcgtgattgtggctggactctctggattgtgggatttgggagctcaaaaaggctggcagtttgctgcgattggttgttgctaccggcagaaatggggtaactgctgtactacgataggtttgattggctggtgaggcagggagcagccgagtcatgttttcggggggaaagggtgctaagttaaggatcccaatttatgtggcttctaagtactcattgaagtttcctttgagcaaaattgaatgcaaaatgatgttacatgctaattttgggacaagcatataatctcattattctaggcccagtaattaccatgcaagtgtataaactttcagcagtgataaaatttagtcttatcatagtaataacagtgtacttcacaattgaaatttattaatgcttatggttattatgttgtgaagtactctacagtttctggttttaatgactgttaatgtgaatattagttgagttgtagcgctagcaactttttgatgagcctattgtagtgcagacggggaatgttgtgtttcatccttttgcttttgttggaactattaaggatggctttcctgactattaagtagacatttaccagcaagttctatctgctacctcctgttcataataggcattcatttagtttgtttttaatggccacctactattcattgttgacacacatttttagattatatgggtcaattagctacctgcaatttttatttgggtacttgtttatacaggttgaggatataatagaagctatagaagatgccggatttgacgcagaaattatcccagatactgctatctctcagccaaaggcacaaaagactctgtcagcacaatttagaataggaggaatgacatgtgctaattgtgtgaactcagttgaggggatcttgaaaaggctatctggtgtaaaaggagctgttgttgccttagcaacctcactaggggaagttgagtatgatccttctgtcattaacaaggatgaaattgttgaggctattgaggatgctggttttgaagctgcattcttacagagcagcgaacaagataagattttgctaggcctgactggattgcacacagagcgggatgttaatgtgttacatgatatcctcaagaagatgattggtttgcgacagtttgatgtaaatgctacggtctcagaagtagaaattatatttgatccggaagcagttggtctgagatcaattgtggatgcaattgagacaggaagcaatggaagattgaaagctcatgtgcagaatccatatgcacgaggggcttcaaatgacgcacatgaggccgccaaaatgcttcatcttctccgctcgagcttattcttaagtgtaagttttgacctttgctcttctttttcaccaccagcatagttatgcatttttgcacaaagatttttagttggatcaatgtttgtgacaatatccttgacatggttgtgacctggaggacccttctggacttctgttggagcattttagttatgtggaaaaacagcaatcatcatgtccctgtgccatttgaatcagttattttctcctaaccacataatagtttagattttttctatttactttcttctatcttacatgtgagatccacttgccataggaaagcatgctgctttaattctaggtttgggggtttgggctgttcataaaagataacaagcacattttacttcatacttgaattaaatttggcagtactgaacatttgggagtgttagatgatatgttccctagctacgtagttcttttgcttctttatatttcagaatacttttgaacttctcttctgcttgcttactaactctatccaactgtgtccttgcaccagattcctgtattttttatacgcatggtctgccctcatatacctttcattcgttcaatactaatgatgcactgtggaccatttcatatgggagatttgctgaagtggatattggtaagcattgtacagtttgttgtcggcaaacggttctacattgcggcttatagggccctgagacacggctctacaaatatggatgtgttagttgttcttggcaccactgcatcatatgtatactctgtttgtgcactcctatacggagcattcactgggtttcaccctcccatatattttgagacaagtgcaatgataattacatttgtgttgtttgggaagtatcttgaggtgcttgcaaaagggaaaacttctgatgctatcaagaagcttgtagaattggtccctgctactgctcttttgcttctgaaagacaaaggtatatggtaaaattttgtccttcaaaacatatacaattaagtcacagtgccacactcatcacattagttttagaagttatttctgacttgttttaggcaaccgcctgtgttttttttttcatttcatactatcaagttacacaaactcacattgttcttttcaaatgcagaaggaaaatatactgaggagagagaaattgatgcgctattagtccaacctggagacatcttaaaagtgcttcctggttcaaaggttcctgctgatggtgttgttgtgtggggaacaagccatgtcaatgaaagtatgataactggtgaatctgcaccaattcccaaagaagtatctagtgcagtaatcggagggacaatgaacttgcatggtgtccttcatatacaagcaaacaaagtaggatccgagacagttctgagtcagatcatatctctggttgaaactgctcagatgtccaaagcccccattcagaaatttgctgattatgtgagtaacctcccatattcttttctgtgatgtccttcatttgctttgtctgtacttattttaagtgtttaccgtgtactttacatattaactttaaaagcgtcagagcattttttgtgatctatttactatttccgatacttgagaatgttgcaggcaaatgttgtttgtttatgagaatttgattgttcatatgccctcttttaacatcatcattcttatgttgctttctacttctgatgtaaaaagttgtaacttgtttaatctcaaaacattttggctgcttaggagtaccttccagtccaaagtttttccctgtgttaactttagtctttgaccttctatgctttcttaatacaaacatacatgtcttttgtatattcgtgaaaaatttaacagaactcttggaagaatagactagtttcttttatctgtgaaaagctcttgtgtctcctaaatgtgcggtaatgattatagaggcctgttatggttaatgctgacactgcctacattttgctttcaggttgctagcatttttgttccaattgtcatcaccttgtccatgattacattccttgtatggtaagttcaacatatactaacacaatttttgagtgatactatgtttgaaacttcaatttttctgacatgtacattggctgcttttgtaggtttttatgtggatgggtgggagcatacccaaattcatggatttctggaactagcaactgctttgttttctctctcatgtttgcaatagctgtagttgtgattgcttgcccttgcgcccttggtctggcaacacctactgctgtgatggtggcaactggagttggagctaatcatggagtacttgtgaaggggggagatgcattagagagggctcaaaatgtaaattacgtgatttttgacaaaacaggcacactaacacaaggaaaagcagttgtgacaacagcgaaggttttctcaggaatggatcttggggatttcctcacattagtagcatctgcagaggtgaggttgaacttaagttgcttgtatggttcatatcaagctgtagtaaatgtgtttcggtattgtaactatgcttcatatgaatgtggtaatgccaaaatatgttttgctcctcagggttttagttaaaaaaaaagtgttttggtcttgttcatattgacttgtcaaaagtaaaaaaagttcttttgttttctactcaggcaagcagtgagcatcctctggcaaaagcaattgtggaatatgcattccatttccatttctttggcaagctccctacatcaaaagatggcattgaacaaagaaaagaagacagattatctcagttgctccttcaagttgaagacttctctgccttgcctggcaaaggagttcaatgcttgattaatgggaagagagttctggtgagtcacataagctaccataactcttccttgcccttcttgcagctgagttgaaaacagtgtacaagtctaacccatctactgctgtaccatttcttttaagcaaaccactgattatctagacataactgttttgcaggttggaaatcgtactttggttactgaaaatggtgtgaatgttcccccagaagctgaaaatttcttggtagacctggaactgaatgctaaaacaggcattcttgtgtcctatgacgatgattttgtgggtttaatggggataactgatcccctgaaaagagaggctgctgtagttgtggaaggactaaagaagatgggtgttcatcccgtgatgctcacaggtgacaactggagaaccgcaaaagccgttgcaaaggaggttagtctctaatctctattaccttccttgatccataatgttcatcatttacctgaacacctcttcatatacatgtctgcgattttctgctcttgcaggttggcattgaggacgtgagagccgaagtcatgcctgccggaaaagccgacgtggtccgctctctccaaaaggacgggagcatcgtcgccatggtcggggacggcatcaacgactcccctgcgctggcagcggccgacgtcgggatggccataggcggcggcaccgacatcgccatcgaggccgcggactacgtgctggtgaggaacaacctggaggacgtcatcacggcgatcgacctgtccaggaagacgttcagccggatccggtggaactacttcttcgccatggcgtacaacgtggtcgccatcccggtcgccgccggcgcgctgttccccttcacgaggctgcagatgccgccgtggctcgccggcgcctgcatggcgttctcctccgtcagcgtggtgtgctcctcgctgttgttgagaaggtacaggaaaccaaggctgaccaccgtgttgcagataactgtagagtgacattgacattgctcctgtatacgtacatagattccccctcttcaccgtttcatcacagaaatgaaatgagatgagaaaaggaaggccgatggcgtctcttgtaatttgtggatcgctctggacgctgtttgctttacaggttttttcgattttggtcgggttcttttattcttttattttccattttatctctcctggtgaattaccagctgtcagtaatcggttgtacgtttttgcttatcttttcgctacaaagcagttctcatggaaatgcttaccatcggctgtccggctagaaataaaaaatcggacgtctcagttgacaacagtgtaggtgcatagtgaaacaggttaggtgtactcacgagccaacggagcaatgcattcaagcatgtttcaaaatttaaatgattttttctcttaaactatttatccgaatttcaaactaactatatcattggattcgttataattaaatctttataacaagatatcacatgactacattccgacgactttttattttactttttaaatgttgcacacatttttactgaaatgttccaacaagcatttgttggtgttttactagtgcattagtaatgtttcatgttatcttttttatatgtttcagcaaatacattttttatgtttcaacaataattataatttgatatttcagtctaaatataaaaaatatttcactagtcgggacttaatgtttcatgtaataatgattattgttgcagtcaatactttttatatgttgtacctctttggaacaatttgtgaagtgggttgaaacatctccacaagtgatgaaacaattatttttaaatagttcaacataagtttgttttttttctaagaacacacatatatatttttattaaaatatattcatgtgagatcttgttataaagatttaattacaacgaataaagtcatctaatcaaattatagcggtgttattggatcatttccggattagtttcgcatctcccactttcagcctgtccttttttttccagtttcttttcatcttttatctacctttagtgtgtttgtaaataacttctatcctatttaatataacaccagcaaatcctggcatcggttctaaaaaaaacattcataatgctggagggcccattcaaaattttctttcctcttttgacctagtagtgatttgttagtaggggtggaaacgagccgagccagttcggcttgcagtggcttgtaacaaactaggcttggcttggctcggctcggctcagttagagaaacaagctaaaacttgagctcggctcggctcatttcctagctcgagccagcttgcaagccttcctgttgaaacacctcttcatatataatttgtaattattaaaaaaagtaagaacaaatcatcaacatgtaaaatttaaataagtttttatattcaattcttaaaaatcttaatgataaatttcaagttgtcaaataataactctataaaaagttaaataatcgatataaacacataatggcctaggctagcgagccaaaacaaacggctcgtgagccagcttgggctcggctcatttcagcaacgagctgaaaaggatacttgggcttagctcgtttggcttacgagccgagccaagccatccaagctcgagccaagcccgagctgagctcacgaatccgagctttttttccacccctatttgttaggtctttatttcactactactacttcagatttcttagatggtgtgcttcaatattgtattgggctcgatccgtctgtattttatgggccaacagaatattttttttcgtatatacgtgcgtatacatacaaactttgtatatatgcgtgcaaattttttatgtctaaatagtgtatacacatatgaaaaagtttatacatataattttgttggatactacctccaccatttcaagttataagacgttttgactttggtcaaagtcaaactactctaagtttgactaactttgtagaaaaaaatagtaatatttacaacactaccattgtttcattaaatctataattaaataaattttcataatatatttgtcttgaattaaaaatattactattttttttacaaattagtcaaacttagagtagtttgactttgattaaagtcaaaatgtcttataatctgaaacggagggagtacaaagataaaaaaatacacttacacgtataaacataaactttatacgtatacatataaagggtctcatctttttgcttatgcttatgcttatcagctaaaatttgaattttcatccttaaatttggagttgattttgaggttttttttatcgaagtttattttttagcctttgtttttagatcgctaagaacacatatataaaaattctattcacaaattacttttcattttgcaaatataccgtttctcttatttcgcgatggctccgaaagtttgtacacataactacgtaagggccggactgatcgtgcattaaggatttctcattccgtgctctcacgtattatctcctttgatttctagtgtaatgaaccatccatttctacatgtcatgcatatgcttaggaaaaagctatacatatggattttatttcttacaaaatttttgctaacgctaatgttacatattgtagtaaatcaatctagatctactatgacatcgacctagttaaatcaaacgggtgagaactttgttaacctttgttaagagtttaatttgtaagattttcttttaatacatatagcgttgttcatattttcaacaacgtttgcttcctactcttaatttcttttttaattactacaatgtgacgtgtctgaagttcacatggtgtacaacgtggtcgccatcccggtcgccgccggcgcgctgttccccttcacgaggctgcagatgccgccgtggctcgccggcgcctgcatggcgttctcctccgtcggcgtggtgtgctcctcgctgttgttgagaagatacagaaaaccaaggctgacgaccatgttgcagataactgtagagtgacattggacgagtaaagaggaggtgtgttgacggctgttaagtaccaaattaaattcgtcaataccagcataagaccgtaaatataaaacatccaacatagtggtagagtttatttctaacaatttccacgagtgttggtgtatattcgtatgcaggtgacaaactacctaaattgagaagaaatatatatgaaagaggaggagaatcaaactcgtatccgaacttatggagttttggacccaaaaacctaattaaacacctccaaatgtgtcaaacattcataccaatggattgaggggaccaaaataagtgtccaggccgaaaaccggagcgaacatagccgtctcgggtttggtcgaaccctcacggaggccgttggcccaggcccaagttcagttcggtagaaatccgcttcccaattacggttatggccgttttcaccggtagaaaccgtcataagcatggacacttgtcaatacaaaagagaagatgctctttggatgcttggagcatctccatactcccaagacacttttctacctataaatacccctctcatcctcacttgtaaacagacatcaagatgtagagctgaattataagaggctctaagtatacttagggctctttatatgttctatagtatacttagaatagggagagagtaaagtagaaaaaattggaggaattccagagttgtcggtaatcctctcattattcttgtactttgttaattactccactttaatagaaatatcattctgagtaattaagatttgcttagtgagaattaattcttggttagttcctaattactatatgggatcattgttcactatggtctagtaatatgtagtgattgctttaatgcttggccaacgttagagtagtaattaattgcgtagacgcggtgtctggctaattaattttcagtgattactgtgtatctcacggtacgtaggtgggtgtagaggtggtgacaaccctcaagagcacttaagtcctccacagtacgtaggtgggtgtagaggtggtgacaacctcaagagcacttaagtcctcgtccggtacgtattagagcgacatctggaaatagcgggttgacagttcctgaagtatcgtgttaggattaaaattaatctttctatagacactgtttttcacttgaaaatcctctctaccatttgcatatgtttgctttgtgtccttggatgaaattggagaagagctgagcacacacgttccttgtggaaatcgatactcggaatactgaatactgaagctacatcggtattctccgtgtgcttgtagattttatttgtgacgttaagaaataccaacaacaatctcgtttaccatgtacgcggattcgaggctacttcaaagttaatgtcagggatattcacttgataactcggtttatggccaatgggtttcctttaattggtaatatcccctttacatctttgtttacatttctgaatgatggcgaaatatattatcctccaatgctagatgcacattatcactcggtagtgttgattggttcagagattggaatcaacaatggaaaatcatcaacattctatgtagttagagacagttttggattcattcactgcagctaccaccttcaaaactatggcgcactactagtttatttgtgacttgtcttaaattcttattatccagtttagtaggtggacctatctttgttcttatgacgaagcgtcaaatctatgtatgcaattatatttgtggagttttgattctcatcatggaggctcaaatctatgtatccagtgtaatgtattagtgtagtatttgtgaacttgttctcttgttatggatgaaagagacattatccttaatttatcgatttatgtatccaatccagtatttgtgttatttcttttattttcattatgaacgaaatagttatcaatttatgcatccaatccagtatttgtgttatttcttttattttcattatgaacgaaatagttagtattgttctggacatgttcgtgcgacggaaaaaataattacattacttgcttcaaataatttgttgcgtgcatgctggaacacattgggcatattttctttttaattaagtactacactaattactactagtaatcgtattgcacgtttcccataatatataagcatactcaaagtttaatgcattgattttccaatgatatgtatatcacacgacatatacaaagtactaaaagtataaaattgtctcaaaatagtactctagtaaataacatttacatgatcaacaataatattctatcgtgtgaccagtagaaatttatatggtaagcaaaccatagaggtttatatctcagttactttcaagacattaattgtcacgtaatagtactctagtaaattgttatcggaatagtactcggtgtagttgccttaactgcagtgaacagaaggaaatgtcgagtgtgaacatgctggaaacgtcttaaaaattgaaatggcaactctgtatttctggtatggacttacagtgtatcccgtgaacatgtccaaactatattagttgagcactggaagggatttcacactgcacatgtccatcatcctagcagttgcaacccctcctaacgaaagaaaaataattcaataaggaaaaacttatcaaaggccaatgattttgaacccatcccttcgtccaaagaaaccccttctagttgtgattctaagttatttcactctacaagtaaagtgatattcaaatgagaacacatcatatatacatatattatttgtatcacaatactccacataaacttttgattgctgagaaaaatagcaattcaaaatagcatcctcaagcattcatatcatcaaagatcttgtaaaatgtgaggcacatgattttctagtagcagattagaatagaaaaataatatgaaaaacatgaattatttaaaaattacaactctgacaaaatgaagaactaatgaatgcattgaattccctcaaatctggacctaactacataacctaacagcacaggaatcaacacttcagggtatttatggcctaaacagaattcacatgacaccaattgttgggaggaattattccttaatgaaaattcaaaaatgatgaggaaaaagagcaccctctctttgaccatcgcctgtacatcgcaatgtttcatcatcaaccatccataaatcaagactattgataccatacatcagttgtcctcacacacatgatgtaaaattgtatctttgttaaaaaaaagtgtacatgttagtttggcaaggtaaaaaagtatcttgcagtgctttatagggaaacaaagaaaaatggagaaaaaaaagctacaattgacagttttttagaaatattgtgaattgaagaaaatcataaagttctacacgatttatatcaattaagtagactaaatacacattattcttgttctccatgaactacagtgtagtatacatgtcaataccaataaacatttgcactaaaattgacacatcgacactcaagaggtgtactaagccatttaggaacttcaagtgacaccctttctcaccttttcttttcgtttcctgattgcaacctttgcatagttggatttgttcaaaacattagtctagaccagatcaagagagccccagatggttcattgtaatgccatcgaatatattcaagtcatctaggctcctgtcatcgttgaacacctaacatccaatttatgcttcagaataatagaattcgaacacctgacatccaatttatgcttcaaaacaatagaattctcttggtcaccgtttctgcaagcacaaccttagagcagaatgattcagcaatttcactttaaaaaaataaaaaaaaaagtcctcgagctatttaaagtgtaatataagctcaatagtgtacagcgatcgcaggcttcagatttaacacgctatggacttttttgtattccacgttgaatttctaatcctacttgcgttatacttgaaaaatacgggaaataaaatttaagaattgctaaaagttgtttgacaacacaaagaaaaagttaggccctaattagcacatctatatcttgtatgacataacttaaaagtacatctatatcttgcaaacgatacatagtttgtcctttaaatagtcagtgtaccctaagcaagcaaatattccactaatttcctcacttgtcgcatagcacaatactcagtgtacccaaatctaaattggattcgacaataatcatatgtgtattccttagattacaaaataaatatcaaaaaagaagaccatttaactgaagatataaaaaagaactgcttcaatccaaggagctaaagctttttttttttcctttcaaaactctgtagaaactgcttccatctatgcatataaatcttttcacagatgaatacggaaacaaagatttaaacatgttcatgccctctcgacgggaggtaatactctactcttgtttgaggattgtatccgtcaaatattgtatttgatcaaatgatcttgttttggccaatgccctaagaggggtcccagctctgtttatatgggttgggggtatgtgttgcaagtagaaaatctagccaaactcgaccgaagcttccttaataaatattacaaaagaaaacccaaatagggatatagaatcgtaccttctcgcagttgtggcccaccttctgatagcagtcagatataaaggctatatgtaggtatcccatatctataatctccatgtgttctaataaatatgtgccataataagatgctaaaatgatgattttcaattatatccgtatacaagttaaagcctgaacttaatggaaaatgaactaatcctaccaaaatcttgcaaagtttctacattcctaaacaggctacgaaagtgtcgaccaaagtctgtctgcagtagatcttggtgtcatactttgctaactggccaaccctgatcaaggtagctagtacgaagagcaaaatacaacacacatacgcacacatggttagaacagaactactggttgagctgacaagtaattaccaaaagctattcaggaaagtattggacacgtgatggctgccactgttacgcatcagtccatcaccagatttcacaacccacggagaagaccgccatgccttgtattgtcgattggagactttcttaatgtatctgaaatccggctcaaaagtagcatgggttcaagattctatctgcaatgtttggatacaatgcgcctaaggctctgtttagttccctagcaaaaattttataccctatcatatcgaatgtttggacacatgtatagagtgccaaatataaacgaaaaaataattaattatacggattgcgtgtaaattgcgagacgaatcttttaaacctaattgcgccatgatttgataatatggtgctacagtaaacatttgctaatgatagtttaattaggcttaataaattcgtctcgcggtttacatgcgaattctataattatttttgttattagactacgtttaatactccaaatgtgtgtccatatatctgatgtgacttgccaaaattttacacccctagaactaaacacagcctaaagcattgtcacgaggaaagctaacaaggcgcatacaaaatcatctcaaagcacctacagctcatcatatatcaggcatcagcttgaacgaattttcctcagatgaaggcaatagaaatcaactacatatcagaacaaacgctacatccaacatacactagaaaattagcacgccaagtggcgcgctcattatagctcgtgtctactttctaattagtttccaaaattcaggtctataaaaggttggcaaatgaaagattcaatggtgttattaacttatgcaacaagtttagctaaattagcttccatggcacttctgctaaaaaaaacccttgaagaacgatcatcgaaaactggatagaactatagataaatatattttcatgaattcactaagataaaaaaaaagcctgatactaccatagttgttccggtctagcttctagctatggcacaatgaataaacacaacaatgtagttacacggaaaacaaaaataaagtttagaaccacagtctttcacacattttaaatgccagaggtcatgatttcgagcaccttgtaggcggtagcaatttccatcttcaatatcttacatatccctagaaatgtcaggaggtgaacacaaattagttggacctagactgactgatagaaggagatcaagagcaagagacataagttaagccagattgtcctggtgggctagtggcacaacagcaaaagcttgaaacaacattccttagtttttaaggaaaattgttgtttctcaattgttagttcttattatgggtgcattcaaatgataatggaacaacccgttgatagacccatcaaagtgataacatccacccaacagaacaaataggatgagggagcgatattcagaaaaaaatatctcctcagaaaatattatattctttatatatttgtcagataattgcaaaaatgcatattcagatacagagaatgtggaaagaaatatacagagaatgtggaaagaaatataacaagctcatgatgtattaacttaagaatgtggtcattatgaacagttgcaatcgatcgcaacttcagaatttctcaagtaatactcaggacattcccttgaatagaacacttgcaattagggcactaaccaattatgatgcaaatgtcagtaaatggcgccagttttatagatcattttcttttgtcaagaggagaagtattcttgaaagaaactattgtgcaggattgagaccaaagaaaaaaactatgtatcaatgcaggatgattataagtgttattagaaagggtattcaggaaaaaaaaatcaaacttgagttttgtcaagaactattcctgattatgttctttgagcacattaatatttctgttccagattatgctaattgtgtatatactaatagatctaactcatgtataattcgattgctactaagatgaaatcagtaatacataacttaactgattaataatccatataagagtttcatatgacagcatcaaattctgcaattccaagttgtgtgtttctcctggatttctgcagaagtagtagtagcaatagagcaataatacactatccaacaaaatagtcctaactgtgctatcaaatgcaactctaagaaagaacgaaatattttctttcttggtcatttcatcgaacaccatgaatgcacagttcgcactacaaaacagcaaccacacgtttagggaaataaatggaacaaacagtgcactgtagcttgctcaccaccgctggccatggccacgaccgataagcgcggccttcacggcctcgagcggaggccagcagtggggccaaccaccgcggcacgcccggcggcatagtaggagtaggacgcggttgacgacgcagggaaggggcgggcagtgggcgaagagccggctggccggcgcacgcgcagggtggccgcattggctggcgcctcagcaacgacgatcgtggaaggaggtggcatcttacaggtaggggtgggcattcggttttaccgaaaaattcggtctcggttttcggtttttcggtcagttcggtctttgaaaactcaggaccaaatttcatcaaaaaaatctcaggatcagcaaattcagtctcggtctcggtcttaccaaaatttttcaggagtaagtttggaatgaaaaaatttgacagaggcggcgctggcgcgatggaggacggaggcgtcgccaacgcggtggagggcggaggcggcagcggcgcggtggaggacggtggcggcggcggcggcgcggtggaggcagtcaggcggaggccaagcgcgatgggagtgcggcaatggtagggttgtatcatttctagggtttgttttagtgggcttattgggtttcctaggcctattgggctaaaatttcggtcattttggttaaccgagcccaataaccgaaatgaccgaaataattcggtctttcgagggctgggaccgaacagataaccgaatttctcagtgttggtctcggtctttttggttcacttcttcggttcggtctaaatatgcccacccatacttacaggcgaggggtggctctggtgcggacgtgcggcaagggaggctccgaacggatcgacgagggacggtactgatgcagagcagcacgctggagacagcccgcgaatagtcggtgaagggacgactatttctttgcaaggcttcaccatatctaccgttggttcctaatccaatggatgtgtgtgcaaattaaaccctggaatcggcagccacgtggcgcactaatcacccgagatggtgcgtggaattcggtataagagattgagctcaagctctgtctctacttcctccttcacgatccttgcagaggctagccggagcaccgcatccgcttcattcactgagctcgcatttatcccctccaccgagctttgcacccctaagcttaaccacctcgtcaagtttgagagcggcggtcagccaagcagagaaggcggtgctagagctcgacagagcagtgacactcttggcatagaggagggcggcgaagagcgctggagtcgagaggatggtcactagcgtagctcacgccatcctccaccacactgatagttcgacgcccaccgaagtcattgccaccaccgctatcggctcgaatcgagtatgagcccaagcggcagtggtgcgtccatcgggtttccttggaggttcagagaggatactgatggcaacgtctttaaaagaagtccacactcggcatcagtaatcaatgcatagattgaatagggagggaaatggagaagagaagggagagagaaagcaagatggtggtcaatggcaagtggactctgtaattttttttttaggatttttcttattggatagccacatcaacatcatgcaggtgaaatccgccttggtttggcctaagcagggtaaggtaaatggtattaaaaagctaaggaggtgtcgatacacgattttaaagttgaaaggtgaactttaaacaaaatgaagaattcaggagatcaaattaatggactaatccctgaacactaattccatcgagggattaacatcctagtccaaagttcttctctggacttggactagtgcctggcttgctagctgccctgcctgagctcgtgagcacatagcaaagagaaatgtcacatatatggcacgtcatcagtatcggacaatgctggccacttgtcatagtgcttttcattgagactttaagaagtttctactccctccgtcaaaaaaaaaacaaatccgagttttcgtgttcaacgtttgactgttcgtcttatttaaaaaaattataaaaaaaattaaaaagataagtcacacataaattattaatcatgttttatcatctaacaataatgaaaatactaattataaaaaaatttcatataagacggacagtcaaacgttggacacggaaaccagggtttgtcttttttttttttggacggagggagtatgtcagtattgactagtggctattggtgacgaagaagacacaagcaaactgtaaacaacacatacagagaagaaagttgtaggcgatttttaattttcgctatgattcgatgatagtgtcatgaactcatgataaaaggcacacgatagtgtcaaaagggcaagagaaatgccacatgtcacatcatcggtactataggggtttgggccatcggtgactcggtgctgcaaaagacaaaccatttgtaatgttctctgatcatgatagcactgaatataccaaaaaaaaaaacgtggttcagctaatgcagacatgaaaaggtcacatttacgatcgatcgtgtcatcgatcactacgtacggtgcattcttaaccattggccatgcattattgtactaacttgcctagttaggacttaattttgctccattatacagtgcaattcttgcgtggaagcataataatctcaccttttgcggctaatagtcagagattcttacacaaaacgtatcgattatcatcattatcactttaaccattcatcgaaaaaacttcaatcagcacagcacttattgtttttaagataataaaaatggtttacattttcggactctatcgacagagaaacaaccaataaattaaaataattatatagagtgattggacatgttgcattgaaagttaagataaatagaatatattttagtaattaattatataggtactatgctatccaaaacgaaataaaaggctacaacctccaagagtatagcaccacagtgtatagtatcttactatttttgtgctagcatcaaagataagtgtgaagccagatgagagacctgaagataacctgcatatagcctattttctattataaaaactttatcattttagtaataccaattaatttaccaatattatgcaccagcttcaaatggaactagttttcttgacctggacatcccccacaagtcaattcgcaattatatttttgccacaagtcaattcacaattatattttttgcaccatggagaggaggacttttcaaagcaaataagatacatcgccaagcaaattgctcaatatgacattcaaagaaatggtattgaattgtctcttgcacattagaaaacaattttgcttatcaccccttaatccccttttgcaaggttatcctttgataaaagattaattacttgaccaatattatgcattggcttcgaataaagccaattttcttgaccgggacatcccccataagtcaattcacaattatatttttggcactgtggggaggacgtttgaaagcaaataagatacattgccaagtcaagcaaatcgatctatgtgacattcaaagaaatggtattgaattgtctcttgcacattagaaaacaattttgcttatcgccccctagttcctctttgcaaggttatcatttgttaaaaaattaattacttcttatgaaagaaccacataaacattttgatgatttttagtggcaccttcgtcttctataatattgccttgcggcgcatgatcgtagtgaacattactatatcataagattgagtgaacattggttatttttatgcctcaatcgaataaagcaatcatttttatttgaaaatgttatattagctagccaggtacgtatcaaatcatctccttcgactagcttgggaccaataattatcaacatttagtgatattgtgccataacattgattccttccggctacgttacataaataacgtatttatcttttggaggatatgttcaatcaacacagcactcatggattttagtgatggcatgcaaatggttctttttggaaaagataaacaatgaagagaataaatgtaaagaaccagatttgattataaatatgcggccggattttgcatatgtaagcagcagatcatcagaattcagagctaatgcattaatccatcatccacactcgtgagggctgtcaggtgcccatctgacgccacgtacgtccaaccagcgcgtttcatgctctgcacaaactagtactccctccgtctcctaatacaagagaatttgatattttgctggtactgtttgaccactcatcttatttaaaaaatttatataaatatacaacataaaaagttatatttaaagtacttttgataataaagtaagtcgaaaaaaataataattgtaaaaattcttgaataagacgatggttaaacagtgtaaacaaagagtcaaaatccgttatattaaagaacggaggggcggaaaaaagagagcaatagtttgattgttattcatgtactccctccgtaaaaaaaaaaaaagaggatgtgaccactcttaggagtataaatctggactatcctttgtccagatttgttgtcctaggttgagtttttttttgacagagaaagtactccatccgttttaggttacaagtcgttttgactctagttaaagttaaatcgcttcaaatttgaccaaatttatagaaaaaaacagtaacatttttaacccaagacaaatttattataaaaatatatttaattatcgatttaagaaaataatttggtattgtaaatatactatatttgtttataaagttagttaaatttgaagtagtttgactttgaccaaagtcaaaacgacttataatatgaaacgaagggagtatcgttttgtttattaggtgaaagatgcatatacaaaactattctcaagcatttcacgtgcctttttatcgtgcatttaatgtgacaaaaatcaacggcaaaaaaccctacatcaataaaattatattaaaaatgcacatgtctaagtagtactgtatatatttgtgaagaacaagattcaagtgatacttgtgaacgccaaattaagttttgaaattgatggcatatggttccacatcacaccactggtgcttattaattaactaaacgatcgatcgctatcattggctgattttcgtgaaatcaacatttgtccccccgccaaatattggtaattaagtgtgaattgagcataaagttaaaagtgccaccttttcaaatgtggtaacaacacttttattggagccatttattttctccgcaaaaattttacttcgttacaaataaggccttagcatgttatggttgatgggactagggactgtttaagtaattttagattatgagaatcaactaatgggaattcagatggtagaaatctagaaaaattggaaaaaaaacatcttctgacttatagtgaatttcctggattttaatttctttatgattaaattgattgtaagagatgccgcagcggctaaagacaccctaaatagcttgtagatattaagatacacatctagattcatgatgtatcacttctggtggaggcctaggatacaagcttcatgcaaattctatacaattttttgagagaaaaaagcttggattttacatatagaaccagggcaagatgacataacttagttgtaggcgtgtcttcaagctgactccataatttgagtacatatataatagtctagtttagtatacgtgctatgtatatcctatcggttcattctactttacatgcgagtggtggtcgatcgagcagagaaacttgtgggttcgtccattcttatccgtcctcagattcagcctaaagctcttggcccgtcacactcaacctattgatctgaatatttggcacaagtaactaacacttgaacccaccaataaatcaaaataaataaatttacaatttattctaaactacaaataagttaacggtttagccgcacaccgttaaagccgctttttgggtctcctcacgcaccaggctgcacttgagcggcagaatccaaccccaacacgtccatctctccctcgatcacttggtgaaaaagttttttttgtgtcgcattaaatatacggacacgctaaaatattaaacatagtctaataataaaatatattatatattccttctgtaaactgcgagacgaatttattgaagcaccatattatcaaattatggtgtaattaagcttaaaagattcatctcgcaattagtttttctattatatttaatacttcatgtatatatccaaaattttctgttcgagaactaaacggcataagataagctagttgcatgcaccacggcgtccacccgtggaccggccccacaccatcctcgtgggcccgcttgtcagtgacgttacgggagctacaacttgggtaggtcgcttgctgggtttgttgttgttgggggactcgctggattccagattctgttcggctggatagcgacggccaccgttttgcgaccaccaccagattctctgcgcgccactcctacctacgatcgacttgtgtggatctcttctacttttcgagttttgtcccgtgtgtgtgcaatgcattgcacctgcatggtcagccagccgcatcatccgcccgtacacgtgtcctgcatcgacggcgcagacggtctgtccagaaaggtcgtcagctcagggcacttccgtgatgcaagggcactgtgtgttgccaaacggaatcccttcagttcgctccttttcttttcttttcttttcctttttctataattttccttgctttcaccattgctctcaaatctggctccgttcatgccatgcatactctcctcctttcgtgtcactaaaagatacgaaatgttacacattattagaatctgaataggtactaaatgtatcatattttatattggacttatttcaccaagagagtaattattgggaaggttttacagaagcagatttggcaagaggctcatatatgcattgagatcctctgcctctaaagatatcgtgccattatcattctcatataggatatcttatagtattacgaatataaacaggctatcattccgaattcgtagtcctaacaaatatcccattcaattataggttctatattttgaaacggatgagtatattcaaggttcatcggacccacgtgtcagctgattgcttattcttatattataagacagatgaggacctgtttggtagaactctaactcctaaatttaacttcagaagttagttatggagtggagttgtggagctgcctaaacctagcttcacttctttagtttattttgtgagagagctacacctagcttcgcttctatttttggtggagctgaaactgtagatgtgcccggagtatattcagggttcatcggacccacgcgacagctgacggcttcaagggctctcgtgggaaattgagggtgctataaaagcagccgccatgagccacagccacacccgctgtgggaagggaagagccagagaggccacacacacacaagcacaacacaaaagtggccatggctctcctcctctcctaccccaggcgccacccatccatccacctcctcatcctctccgcctacgccctcttcctcctcccaatcttgggtgggtcttggttcttggatcatccacttcattgccatctatcagaaattgcttcttctttctgattttgtttctttgtttgtgatggatgtttttttgtggtgtctgattgttagatggattggagctgggaggagatgggctctacagggagatcctcagggatgagacggtgctcaggctcaaagaacttggcaaggtcaggttcttcatgtcgttggaatattcagttctttgatccactttttaaggggaatctcgtccggattgtatagattgtttgggctcctgcatgctgctacctctgtttgttgctaattcagatagcttcataattggaaatataaattaattctaggtgttatatgtggacagctattgacacccaaatgaccatatataggtttaaaaaaatatctgtggggttcatgtgtgtacacttctttgttcatcagatgaacagtgtaaatttcatttttaggatacaatttcactctttcctcggagagaatacaatttcattttgtataacttaccagtacagaccatatcaagacagctagctgcaggctactcgaaaattatgcaaaaggattgcaaatatattctaggcttctcatctcttcttttttggggtgaatttcattttactaggcgttaaagcatcaaacttttgtaaggcttttgttccttttctctattagttatgtttattggtcattccaaagaatcatatccatctcctgtattcgggtgagatgaccttacgctatgaaggttgctcaatttttacgttctccagttgaaatattaaatatatataaactgaacaaaatcctggtttcaaagatccgtgctgcaccttatttttactctattgcctaacagtttagccatgcagtcctaacacggcgtcgttttgtgtgaatcagatatctgatggggaaggttaccttgagaggacatttttgagtcctgcctcaatcagagcctctgctgtcattatcagctggatgaaagatgccggacttaccacgtagatttttcttctcttgtttatactgcagtcattttctcaaactttgacctttgctgaccaatatatgccttatattaaggtggattgatcaaatggggaatattcatggtcgatttgaaccgaccaactcaaccaaggaggccttgttgatcggatctcacatggtgagaaatagatatatcttttcatactgtcgcacatcttctagttaaataaaatcactgataaaaaaaataaatcttgtttttttttggggggaaaacaggacactgttattgatgctggcatgtatgacggagctttgggtattatctctgcaatctctgctttgaaggttttgaaagttactgggagacttcagagacttactagaccagtagaggttagataaaaattaattaccctagataaaatgttttcatcagtgtgctagtgatgttactactttatcatcatagtttgtttctttcataagaatatatgtattgggttacattagtcgctatcctactccttactagttgcatgatgagtcacatgtgtcctacaaataagacatttatctgcacataacttgtctctgtcttgtgtattttactagtatcttagtatgtgtcatccacatcatcgatctcgtgttgatttaaattagcatagtaggtttcaaagaacgtgaatgggctgctatcacaatagattatcagaaagactacagatatagacatatttaatccaggatgaatccattatataatgtctctttactcagttggctgtttccctgcttatgtagagaagaacctataccttattctgatatctataattcataaagctgttgggcctcacggttgcctggtaaacctcaggtgattgcattcagcgatgaggagggtgttagattccaaacaacttttctgggaagcgccgctgtagctggtacactacctgaatcaattttacaagtatctgacaagaggttgtcttttttcgcataaatcaaccgaactgttttttgaaattgtttgctgattcagtatatattttgcattcaacttcttcagtggcacgacagttcaagatgtcctaaagctgaattctcttgagggcactgctaatgctcttggtgaagtaaggtacagcccggagtctgtcgggagttatgtcgaggtatacaagactgtattattttaatctaggtgtataacagatataagaaatttagcatttaccattctttttcattactattttggttaggttcacattgaacaagggcctgtcctggaagcccttcgttatccgcttggtgttgtaaaaggaattgcaggacagacgcgattaaaggtgcaatcactttctagttaatacttttttggtcaagagtaagcggtgacacttatagaactatatatgtgagccaaaacaaaaatatgacttgtttctgaaaacaaaactaaaagatgaccaggtagcattgcatactaaatttagaccaacttttccaaacaattggcatgctaaaatgaccaggacctagtaaacaatcaagtaagcaattatattgctggtcattctttagcaaagaatgtcagtgctcgaagtcaacgctgaggtcaggtactattaatcagtgacaactgaagaactttattagtacttcacaagattctcgtttaacaaactattttgaaagactgcaccagcgtagagttggtacttgcaaatcaagtaaaatgttatagcatgagctttctttaataaacagtgataaccagcttagctgactatcaccaaggttgatgtttgatattgttctgaattatccaaatccgttaatctcagtgtgattttagcatgagcagtgcttccttacactacaaaaactaattaaactagttttcaatctcgatgcccacagtaacagattagtaggtgctggccaaaatataatcgatcaaacaagctgggcttgctttcaactgccattgcttagcaactttctggtttctttaggtaattataaatggttcacaagggcatgctggcacggttccaatgaaattgcgccgtgatccgatggttgcagctgcagagctcgtcctgacactggagacgctctgcaaagaacccaacaagttcctcacctacgacgaggaatgcggctgcttcactgaggaatccctcgccggactcgtctgcaccgtcggcgagctcctgacatggcccagcgccagcaacgtcataccaggccaggtaatgtaatgtataattcagcttgatcattgctggtgatgatgcttccaggtaagctaagctggctctgctgaagcttttggagtttggtgatcttatgcaggtgaacttcacggtggacatacgcgccatggacgacaaggtgagggagacgatcgtcaccagcttctcgaggcttgttcttcagagatgcgacgacagattggtcgactgcgccgtcgagcagaaggtgccaagaaaccgaagcatttcgcttgtgatttcgcgatgttttttttgttttgcaggtggtctggtgttaaaactgcggattggttggtgtttgtttttttgcagcacgcggcggcggcgacgccgtgcgacgcggagctgacgtcgcggctggagcgcgcgacgcggtcgacgatctcgtcgatggcggcgggcgtgcgccgggccggcggcgagacgccggtgctgatgagcggagcggggcacgacgcgatggcgatggcgaggctgacgaaggtggggatgctgttcgtgcggtgccgcggcggcgtgagccactcgccggaggagtccgtgatggacgacgacgtctgggccgccggcctcgcgctggtcaacttcattgaccagaacgcggtggatgcggcggcggcgacggcggcggaatcgtgacgacgacggcggcgattcttttggtaggtgtgtgcctagtagcctacaaattgtaaatatggatttgcttgttacatttgtcaagaaataaaattgaattcaattcgttgagacgttcagtactgcttatctttattttatattttatggttgcagttactctaagttcaagttcttaagtttaactctctatagaatcgaatttcagactgcattatttgaaaggctaagtttacaattgggaggctgcatatatttaattggatgtagatgctagataaaaagtaccattctcagagaaaaataataattttatcttttttaatgttttttcgttatttttgagtgagaatcgtgctgcatcacgccatcaatactgtaactgacgagttggcccaacagatatagaacgtaagtttgccatcaatcccgttccagcccaaccaaatatatataggcccaaaatggttccgagtgccgctccggcccaatatatatgagcgtcacgtagatcgtactccctctattctaaattgatctacatatttcatagttacaacgagatcaagaaaagctaataactttctcatactatatttaaaagctaataactttctcatactatatttactctagcaacaaactcgatgcatgcaccatccctattatttcctagccaatagcaaatcaagatattacatgtgggttataaatacttatgtgtatggatgcatgcatcaatatacatttactccaatgcataaataacgaatagacttaataaatgaatataaatatgtagatcatttagaaataaactaaaaaaaatatatgtaaatcaatttggaatggagggagtagtcccgttccggcccaaatagtatgggccgtacgtagctgattccttttacggcctgcgaggtgtacgtgaagcagccgcgtcgagatccaaaacgccaactaacgtgtgggcccgaggttgttggggcccacatggcagtgaaccgtattgggccgggaggaaggagcggacggggctaatgttggatggcacgaggcccaagtttgctagccgaacggataaaagaagtgaaataccggctttggcatggcagtgggtaatatgagtatacactaatacgaaatagtagtagtagtagtagtaaatgataataagattattagatagcacacatcgagagtactagtgatatgaactagtgtgtgtgtatatatatatacacactgcagctggttagtatactactccctcaattacaacattaaagttttgtcctgaatcaaacttcgacctctaattttaaccgagtttaatagacaaaactaaatatctataaacatcaacagttttattaaatccactacaaatatcatcatagttaggatttcatccattccattttgttaatcctattacattttaacggaaagaaaacaacggaaccctaacagtgataacatttctaggaaaaattgattcatgcgatggtatttcttgaaagttacattcgtcgatggtattttttttggaataaaacacttagtttgtcaatgcatggcatttgtccgattttcttctttctatatactcgggagatatttgactttagacataactaaaatgacttattatgtaaaatgatttataatgtgaaacaaaagagagtattattttgttttccattttacatggtctctagtaattaatcctattatggcgtgtgtacaaggcagggatgtggcgagtggcttcgctaggccccattggagccaggtggctcaccagcttggttgcaatcgtgccccatagagggcacggttgagttgcagggctgaggcaaccacgctcgaagtacggatcacgagtcgttacatgttgggcaaggccgtggcctcgtgacgcatgcccctgcgtgttaactaggctagatttgacaaaaggtggtggtgcgatggatgaggttgaagaagataacaagtgcggtgggaaggaagagaagaggacactaccaccacggacaccgtcgagttcatcactacatctgcggatgctgctcaccttgatttgctcattgccaggtggcgctgccttgatctgcaccattgagattgctgttcaatctttgctcgccgatgagggaggagaagaggggccgacttgatctaccagacgcaccgtcgatgtcggatcccaatctctgccgaggttgagcttgccaccaccacctagctcctccctcgttcccacatgtcgtcatagagcttcttctccattaactcgtgaaagagatggcagcaaagagagggtgtgctgagctcctcaccaattctgcaacaaggaataagggatagcggcgaggagggtccgagggtgccacgacagggaaggaggagagtacaactccatcggcgcatgggaggagaggtcctcaccggttctttgaggacaggctatgggggagagagagtgagaaacaccgcaactgggagtggagaggagatggatgaggattttttatattattttctcggttttaggatatgtttagtatacaattttatatttttatgtaaaatgaataaaatatgagtgaaatagaaagcatcaggggctaaaatgaatgaaaaaatgaaaccacgttgtattatatgcaaaaatcactgctgggggaatcatctttagtcccagtttgcaacctcctttagtcctggattgcaaaccgggacgcccaatccaggactaaagctgccccatctttagtcctggttgaaataaccgggactaataaatgtttttttcttttttttcattgttatttttgctacttgcatattgatttcgaaccgaactcaacaacaaaatcatccacattcacaaaaacatcataaaaccatccacaaattcacagatcgaatgaacatactcaaattgacatcacaaactcacagatccacagaatgaacaaattcacatcacaatttcacagatccacaaaatgaacaaattcgcagacatcacaaatgaacaaattcatagacatcacaaatgctgcacgcctccaagtccgtcgccccacatggtgccagcaatcacgctcgcgccgtcgctccaccgctacacaggccgccgtagccagccacctcccctcccaccggatccggcggaggggagggcgctgctgccacccgtcgcctcctcttgcgccgccacctaccgcctaccgcctaccgtcccaccagatctagcgggaggggagggcgctgccgccacccgctcgccggcttgctcgctcattcgctccttgctactactgcacgaaaaggagaggataagggagagggaagagagagagaggagagaggaggaacaaatgaggaggaggagaggataagtgcaagggattatatacggcgcgtcgatctttagtcccagttggtcggttgatgacaccagccgggactaaagatagtgaggggcctgacattttttgaaccgggactaaaaatcatttttagtcccggttgatttatataagtgtcgttgtgcttttgaaccaaagctaaaggtcttatttagtctcgattcctattcgaaccggaactaatgtgatttttatcattcgaacaaagatcacttttccagcagtgaaccagctcagattttagaccggtgacctcaacttaattggcactgtcactgatgcctccatttttcatgtccttatggttccatgcatgcaatgctagtaggaaggttctgcatgcatccctagaagaggccacacagctgctgggactgtaagctgcctgtgagggtaattgtactcctacactactatagtcaaggcaagaaggatggcatgaaggactaacatacaacaatacacagacccaaatcatacaaccatgtgacccaaaaaaaaaagattccccttcttttgtaataaccaaataaaggtttctctcctcctaccaatgcaaatatactccctccatcggtccatcccataataaatttatttttaagctccttttgtatatcctaaaataccttttaagtaatcattataccaaagtttataaaagtagaagataaacatattgggagtagataaagtatgagtaattgtattaagatttaataaaataaggatatttttaatttttcaaaattttattggtagatgtatgtaggattagtaagaaataaacttattttggaaccaagaaaggacttatacttgttacatgcatggccgccggactcgtggaagattaaattttctgccgtggcaacggagcaaagcaaaagatacactgtacggttactgtaccctacacgtatcatgcacctggctggaaatcgaggcacgtcgtacagtacagtacaagtacaagtattcgctgacatactacgtgtagagatcagtacttgtactagctaactacttactccctccttcccataatataagggattttgagttataagggattttgagtttttgtttgtattgtttgatcactcgtcttattcaaaaaaaattgtgcaaatatgaaaaacgaaaagttacgtttaaaatactttgtataataacgtaagtcaaaaaaaataatttcaaaattttttgaataagacgagtggtcaaacagtgcaagtaaaaactcaaaatcccttatattataggacggagggagtagtagcttcctcttgtgcatatgaatgcgtatgtattgctgcagcatatatacagcctcgtacgctacgagtagttcgtactagtatagagatgcagatcgatcgatgcatgcttgtacgtataaacttaataaaggtgaagtgacttggaagatttaattttggacgcgatttgaaagagagagagcgaaaaaaaattgaagtttggccagtagatcgatcgagctagctatactccgtaattataagtacgacgtactccgtacagacgacgcgcacggtagatatcgctagatcgagaagcaagatggtgcgcactatactactactctgtgtaccgctaccacagctttgtgccaaccctgctcttgttaaacgattggggacttccagataatacacaaatggtactgttatatcatgtttataattatataattagttgagtttgacaaaagctttcattgtattaaaaaaggagtaattacatatgttgatggtatataaacttggtgtaataacttagtttccgaacttataataggctagcttgttatgatacacaaacttatctagtgtgtgtaatccaggttcaaaacaacatattataactgattatgttgagttattaggacacccacgatgtgagaacatgggtggggtattctgatatcaaaatataccttagagcaagtttaatagtatagccaacagctagctctaaattatctatagttaatcttatagcctatttatacaatagttaattataaaaatatactacattattaatattcggttccacctatcatacacataatattttagagtgcgtgttgtaactggctacaaatctgtagctcgctttcttctctcttttcttttttcttctcgatatatggttatagctggcttatagcctgctattgtacctgctcttatatattgttagggtcatagagtggtttctagatacgggtgtccatatgattatagcctgccctcaaggcattaaaaaatgaaaaataactcccttctctcactgaccaagagaaaagaagagacgaagggagagagaaaaaaacgattttcttttaaaagtgtgggttccatcttaattaggttggtcccaccttaacatcatcgtactacatatacactgctaaatcatcatccaatattttagacgacattagagaatcaaaatccatcgcaccatcagttgtatatactccctccgtccggatcacgagtttttgtttgtattgtttcaccactcgacttattaaaaattttttggaattattatttatttttttacttattttattatccaaagtacttaaagcacaacttttcgttttttatatttgcacaaattttttgaataagaagagtggtcaaacagtgcaagtaaaaactcaaaataccttatattatgtgacggagggagtacatgggactctatccgtgccaaaatacagcaacttttagcacttagtaggatttgtctcaaaatataataagttatccaccaacattcccttcccaatcaatcacaaccctccactattcactttttctacctacctctacttctcaactaatcataacccctcctatttaattatacctattttcttaataatcgtgtccaactctaaaactctctgtattatatgtatgataagactgagggagtaagttgataactcttttgaaggcattagttattcattgtatttcaccgtggtgaatctttcaaagaactcgggggttgattgttccaggtggtgtgtcaccagtgtttacaatactgtgtggtaaccttttcagctttttaaaccgcggtatatctcacggtagctatacagttttcacggtaaccgcaccagttaccgcgataacctccaaactatggggtgacgggaaccctactatcacaccccgaagttcttctccgaagtctaaatttaatttataaataaccttgagaaaatatcagtgtaaaagcaagagagaaaccctaaaggaattaatgcaaatactaatcggaaaggacatgtgggatttttcttgagttctacatgtcgaaatatgctaacaagatttttagtggaatgttcagagctctagaaataattttaaccaattaaaatttagcacgagcaattatttaatccatgggtattcatttctttctttttcctttcctttttctttttcctcttttttttttcttttcgaatgggccgctggcccattctcttctcctttccctccccgctgggccggccgaaggccaaggcccagtagccagccgcccacgcccctcctcccctagggtcaccgacaggtgggccccacctgtcgggcccgtctcccacctccggccgacgccaccacgccgcaaccgccgctcccgcctcttccgcgcgtccgcacccacgtctcccgccttgctggccctctcccgcacaccccgcaaccaccgccccacttccccgcccgcgcccgcgcccgcgctcgagacgaccgggattcgattttcgaatcccgcctctctctcctccccacctctccccactccgtcggcgaaatcgcggctatctcggccacgatcgatcccttgagcctatataaaccaccaccgcccttccctctctttttcactatttcgccgagctccctcgtgccctcttccgtcctagcgccatcgcccgcctatccgccgccgccgccgccgctccggtcgccgctagccgctgcgccgagccacgccatcgccaccgtcgggttcgcgagcccgagggccacgctgtccgcctctccgccgccgatttccgccgcaggaaccacgttcgcaccgcacgccggtgagcttcgccatggccggcgccctagccatccgtggtctctctctccctctctaactcctcccttttgtttccttaggtgatcccggagctcatcccgctgccgtcatcgccctccgtcgctcgccatcgtcaatggtcgtcggtgaggtccctcctccccttcctctctctctctctcccgcgccgcttagccgccgcgccgccgcctagccgctcagccgccgctagcgccgcccgcgccgcctcttcgccgctgccctccgccgccggccggtcgccccggtcgccgccttgcgccgccgctgcgtcgagccgcgccgccgcgcgccatgggcgccaggccggcttgagccgggcccgtgcacgccggccgcgtgccgccccctccgccgtccgatccaccccgagtggataggagccatcatatccccccgtctgcatgatgtccacgtggccgccacgtgtgagccacgtcggcgccacgtgtgcacctcgtggtgcgccacccactccccggtccatggacccgatccaccatggaccagcgcccggagccactgccatgtggggcccgcatgtcggcgccgccctctctctctgatgatgtcaccagggctaataattgcacaataaatcaattaaggatttttctgtttatagtaaaaacacagtgaatcttctaaaattcatatctaattcatccgtgctccttttaagcccattcaagtctcagtaaatcaagaaaaatgcaaagaatccattaaaaatggttttgttctctgtttcagtagtcttatagcctgtttgtatggtttgttttgtatgtcgcttagattccgactctcctaacgctccggtgtactttgagatagtcgccgaggttcctccagcagcagagcaaggcaagtcatgcttgtcacttgaacatattgaacctatattacaaatgctctatcgtttttcccttaaatactgcattgttttataatgttactatgggatgtttgtctattgttacagccatgccatttttgtaccttactcctttgttagcttggggttgtaacatgattagatgttggattaggaagtgcttagccatgcttagttcaactagcacacaatgggggacaacattaatgcatagatatcaaattttagtaatgatgttggttagtgccaccgctccggtgttggttaattaaaatatattaaatggtgggctgtgggtgcatggttttgatggtagtgcccatggcgattaaggaccggttcgcgggaaaccctaaaagaattcttcgtacttaccataagccagcgtgggcaacggctgggcttgtagtgtagctttcctctagctgacgcatccaggcaagggtgggccctgcgacggcctctgtcgcttccggattcacctagacacgagaggggactgcccgttgcccgctggggacgggggtgaaacctgaggtgtggtgtgcttggctagaggggggttatgcgaaaggtcctgtcacggccttattccggtatgtcatggtggcatgtcggtgcacggtaacgtgtcgtggggctgtgtcttgtgggtacagttgtacacctctgatcagagtaaaactattcgagtagccgtgcccgcggttatgggcggtcaaccagattcaccgtgattagtctcaccctagtttagtctgatggaattgattagttcaggtggatggttgggcttgttgcaacgtggtgtagcgttggacagtggatggttgatgttgattaattaatacaactgttttactgctttcaactactgtttataaatgctcgctttatgtaaatgaaccgctctacctatcctttggttatatcctacatcacaccccctgttccggtatgacttgctgagtacggtggttgtactcagtcttgctctattcccccccctccccagagtttgagtatgcgtcagatggtggcttttccgagttataggcttcgtccgtgccgtcgaggatgcctgtggagtggtgttcccgctgcagtccaagtcaaggcttagctccagttatccgttaattttccgttgtatttatgtaagactttataatgtttgtaagacgtggatctgtatgtcaactttatcgtttgtgtacctcggccggtcctggacggggggttttaatgcacattctgcttggaattctattcgggaatttctggacgtgacacctacccaaaacgatttgggaaaccctgtgtgtcacttcatcaaaagcctatggttttgggccgctactaataataagtcgtcgttaaaatttaaaattttattttgaaattttttatcataatttatcttacaatattgacttttacgaaaatttaaaatttacgaaaatttattgctgcgtttattttaggaccgagtagaagataagagtataaaatgtgaccggagcatgtggagaacttgagagttgtttggtgtatacccctatgccggttgcttcatattcatcacagctgaactgattgattgacctgcgtgcagagccttgaatatttctctcctacactcacctgacagctagctagatcgatctatcgatttgcctgctatcgtgtcactcatcaggaggagaaacagattgatcatcccgtcaccaatcgatcggtcgatctatgatctctctaaacgattgatgagcgaatgtacgaagaagcatttcaggaagggatagcactgtgcaaaaatggaagtggagtagcagtagcagagcaaacgcgaaaatgcagggagcatgagctgagctagggcgtagacgcgtagtagtagtagtagctagggatctctgcctgctttctagggctagcttagcacaagggacagtgacacgagagtggaagtggtaagagacaaactggatgatgcatgctttctgaattctgataggcaggtgcagagtgcagacatggttttgccatcaacttttggcctctagcaacacacacacacacaaagtttggatgtgttttagtttctgaaattagaaaaaagttcaagaaaagttgatagtttggaaaaaaagtcgaaagtttatatatataggaaagttttggatgtgatagaaagttaggagttgggggaaaatttggtgtgaaggccaaactctctcctaatctcattcactctgtctcttctctctcttccttcggctctctttgattttgggtttagttcacgctaaaattagaagtttaattgaaattggaacgatgtgatggaaaagttagaagtttgtgtgtaggaaagttttgatgtgatggaaaaattgaaagtttgaagaaaaagtcgggaactaaaccaggcctttgtttacagaagttgttagcagcagtagtttcttccagagtcaattttttttttcaaataatttagttttttctagattttgaaaatttataattgtaactcgtagaatcttaaaaataaattagaagctagctaacaaccaaccaactgcttattgtagtcgtaagctgtcccacgagctcttatattactaagtcgattttagtcgtggattatctacttgattatagaggtaaattaaatattttaaaatttaaacttaaataatttgaaataagtagtctaaataatgtagcacaagatattttttttaagaaaatgtatttttttgacaatgtaatgtaaataatctgttttaataatcgatgaatgagctgaagagaaatatggtgtgtgtttctcttatctctgtgtgtgttccttctctctctttttatgtgtttgtgtgtgagagagatactacagctttttggaagagaaaggctgatgataagtttcgagttggcgacttcaagtcaattcgtgtagctacgataccaagtgcactagctatagcttagccctagtactgcactggagtaggagtactactgtggttgtcctccatgtacgcaaacaaaaattttcgcatcaaagagacaacgccacagaagatattactgcagagtattaatttatctctactactcgcgatgcactactagccggagtctcaagcaacacatcacacagtgtaaaacaaatccagccacgaatttatacagtgagaaaactatagcaatatccattgcagacgtactcgcgtatattagtagttgtgagataacgctacagccgactacaggtaagggctccgttggaagaatttttttatatttttttagaattttttacttttaaattttattaataaacctctcaaaaaaatatttttcaaatctaaatcttttgtccacgccttgcagtgctggcttgccacgctagccccttgctacgccactatggctagcctggccaaacaacgctggcatggccaaaaggttcagtttttgaaaatatttttttggaaatatatattaataaaatttaaaaataaaaggtctaaaaaataaaaaaattcatgttggaacgcatcattcgaagaacgtaattaagaatagaaaaaaaatagagcatttaggcttcttatttgatttatatagaaatttcataggatttaaatcctatatgatttttttctatttggccctttgatacaaagaattaaagcttttcagatcctatgaaattcctatggaatggctcattgcatgtagatttaggagaaaacatagcaagagcttcaacttcttgaaaaatttcctttgagtttatctctctcatctaatataattcctgatttttcttgtggtctaatcaaacaattatttttatgtttttcttgtgttttgcaatccactattttacatttgcattcctgttagaatcatgtgtttttcctattcctccgtttttcttaaccctgcgattcaaaggggccttttatgtatggacaaatcacgcagaatttcaaaatacatgaagttgtactggatatactagggatttagtgttcttttgaaacacaaatgttgaaaaaacttagggatatgcattgagcttctgaaaggaaatcaaaaccatgaggtttgagcttatgtttgaaatccttcaaaaagtggaggaaagaaaggattcctatgaaaattttcttgaaaggaatcctatgaaaattttctaaccaaatcattcaaaccatatgtctccctagctaggaaaattttcaatagtatttcaatcctacaactttcctttaaaaaccctttgtttcaaaagagcctttaatggaggggaggggggggggcagagagaagatgcgttggcctcaccaaacacaggatcataaaaacgcatgaatgatcataaaaacacagaaatagaaaaaaaaatacaggtttggagtacccctaccacttcaaatcctatgcaggaaaactgcatgaatccgtttagatggagcgcaggaaacacacaggaatcagttcataagagtgaaagacacaaatgatatttttccaataggttgtacctcatgtcaaaattcctatactttgaaccaatccaaggaatttggtaggattttcggatggaaatttcctttgattcataggaccatgtataaaaattttccttaggattgagttccttcaaatttcttacaaacctgtcccaaaggagcactaaaataagatttgagctcatatatagtaaaaaaaatttccaatggaagtgatgcatatgataacagtccatagaaaattgtcatgttcatatcctttgttccaaaacacactagatatatataggaaaaaatccttcaaaattcctttgtgggctcctttggaacaatgtccaacactttcaaaggaattttaaagaaaaatccgaagatattttttgaggaaatgatgaacactgtccaacaaattgtttaaaatcaaccactgccgtgtgcaaaaaataaaaataaaaatgcatagaataacagatcagagctgagacaaaccaaaaccggcgttgcgctacccagacaacaacaacaacatgtcaacaactgctactctactccatatccaatcctttcccctctcaaatttaattacgcaagaacacacagtccatcgatatccatcatccatttatataactgttgctttgcttagattgcgattctcaaatttaatcatgaattctcatatatgcatacctttagctttggcatggctagcctcacatgaattaatcccttggcatctcgagtacaagctagtaccacagtttcactatcatttgatcgcagctgccgcttcacagctgcctcactccactccacttcacccttgaaaattttcagctcacgcagctgcagctgacgacgccgcgcgccgacgacgacgaccatgatgaaccctcgccggctgccgcctctgccgtcgtcgacgtcgtccgcctcggcagcggacgacatggacccgcgcgtgtggcgccggctgccgcagccgctggtggaccgcatcctggcgtgcctcccgacgccgtcgttcctccgcctccgcgccgcctgccgccgcttctaccacctcctcttctcctccccgttcctccactcccacctcctcctctcccctcacctccccttcttcgccttcgtcgtccccgccgccggccacctcctcctcctcgaccccaccgccaccgcctcctggtcccgcctcccgctcccgctcccgcccgtcgccggcggccccgccgcgttctcgcccgcggccgcgtccgccggcctgctcgcgttcctgtccgacgcgtcggggcacaagacgctgctgctcgccaacccgatcacccgcctcctcgccgcgctccccatctccccgaccccgcgcctctcccccaccgtcggcctcgccgccggcccgacctccatcatcgccgtcgtggccggggacgacctcgtgtcccccttcgccgtcaagaacatctccgccgacacgttcgtcgccgacgccgcctccgtcccgccctccggcttctgggctcccagctccctgctccctcgcctctcctccctcgatccccgcgccggcatggccttcgcctccggcaggtaagcgcgccgcgccattgatgacgcatgggtaaatactcttgcacagatttgctgatcttgccttggttgttgttcttaggttctactgcatgagctcgtcgccgtttgcggttctggtgttcgacgtggcggagaacgtatggagcaaggtgcagccgccgatgaggcggttcctgaggtcgccggcgctggtggagctcggcggcgggagggagggagcggcgagggtggcgctggtgtcggccgtcgagaagagccgtctcagcgtgccccgcagcgtgcgcctgtggacgctgcgcggcggcggcggcggcggcggcggtggcgcgtggacggaggtggcgcggatgccgccggaggtgcacgcgcagttcgccgcggcggagggcgggcgcgggttcgagtgcgcggcgcacggcgactacgtcgtgctcgcgccgcgcgggcccgtggcgcaggcgcccacgagcgcgctcgtgttcgactcccgccgcgacgagtggcggtgggcgccgccgtgcccgtacgtcgtcgtcgcgcaccacggcggcgccggcgcggcgggtttccgggtgttcgcgtacgagccccggctggcgacgccggccattggcctcctcgacgccacggcgcccgtcgccttgcatggcatgcatgatggttaggagcatactatgtgcttttttgtgcatgctgcctgcatcaactaatcaatttgttatggcctagggcatgcatacacatgttcatgagcaagctaggtttgtggtgtattaaagttgtttcagcaatggggatcatatgttaatttcttatgagcaattaagtgtgttatatgataggttaggtatgagaattagcatgattctagctagtagtatgtgcaagttagtagtatgtactaggtagcttaattaattaattaggttgtatttgtcatctgagttggtagtgtgctagattgacagtggtctgaactctgaagtggtttcatctctgttaattcagaaaacactaataattcagaaaacctactgaagggtttctactcaacaactactactactttgatcttgccatgagatctgttgaagaatattcatgcatgtgattttctgaagagtgttgatttagatggtttatcatgatcacatgaagcctacaacagtatgtgatcatttgagtatgatcttctggccagcatgactttgtctgttgaatccacctcagatcggtatatagtttctcagtttggatatgcatttcttccatatatttgcttaatattcacacatacttatgtgtgtagttgcatctttcttgtgagtgaaattagtacgacctctattaaataaagctagatactctgaaaaagtaagatgcccaaacttagtttatgtagcgcccttggtcgatcaaattttatggccaatcttttttttttcttttgcaagcttactctagctagaattgtactcctaacatagacattgtatatatgtaaacatagttttcccgatcgatcgagttgttgattcagtatatcatgcatctctggggaagcagtaacaagcaccagagatatggtggttcagatctttagccacccccaaccaggttctaatcacatccatttaattttaaaaatcatgtgtaagtaatatactgctagtatatatagtatgttctaaagatctcaataggattgtagaaatcccaaaggaactaaactgcaaaacatgctacgcactgattattacagtcatttggaacacactacgaagtgatcatgcatgcatgcatgaaactgatgaaagtaacttgtgtatatttcagcagactctgaataaaagagcatatgtgtttcagaaccatgaaattgtacgtcttctgtttttctgttgcaaagtatgacttcactagcttgtagagtatactccatcgcactaactatcaaattgcattttgacatataaccatccagtagcaaatatcttctgtactatatatcttcagatactggacgcactagtgaataaattttcggagaatatatctaacatacgtaccatctggtcctacgttgctctattctgggacggagggagtagcttatctaacatgcatcctgaatcagctaggtttgatagattttgttcgctactacttccgttttaaaatgtagctatttataatattcacttatactaaaataaagctatttcttcacttacttcatcttttcaactaatcataaccgttcttcatttattttttaactatttttttctctaattaatcacaacatttttccaatcattttcatattctagtaggtaggaagtactagtatatatatatagaatcataccgaggaaattatgttaactaacaaatgttaattataaaatgtgatcaaagagaagatggatatatctgatgttgttgttgcttgcacagtagaactatgtttggtaatgtacagtggaatggaggaatctcttatggggaatgcacatgagttaagtactgtaggatgaacagcaagctagggcaggggtatgagtatactcctatatgcaatgcaggtagtactgctgctgctgctactgatcttgaccggatcggccggccggccggccggtcggagggcctctgccatggccacaggaagctctgctcatctgcatgctgggctggctgcaacaatcgcagctggaatcctatcatttctttggctttggccaagaaatcaatggagcagtagtacagcctcaccagcaggctacacaaccttagaccccgggccctatatagtagacctcgaatattaattaacatgggtactgtattagtagtactttaattatactttaattagagattggattttaatttgctgatacggactatacttaattaatctgttactacttcattttacatgttgggagaaaaggatttctaaccattccaaccggtcactccgttttgcaaacaaacatatccataagtggccagttagccacttatccatatttctaaccatcccaaacaaacgcagactaagatgtaaaatactccacaattgatccttaatcttgtcagttaagtttataaactttcatgactcttttgaaatgacgtagaaagtttacaagatttttataagaaatagttcgtttcatgtaaaattccttgattccaaattaaaccttaatttgcatatacagtacagtgcttaaactctgactacctcaattctcaaaaggacggtgatttggacatccacgtaagcttcaatataatgcatatgctttataattactttcttaaagtatttataaaacatattaaaaatataactctaggaatagttttgcacagaaaatctactaattaatatcatttacacattttaaatcataatatttttatctactagtgatttaagattttaagatttgactacacacattttgggaattctcttaagatctagaaccaatgttgttgtaaagcatcgatatacacgtcaatagtttggatataagggtgtgtttagttcacgtcaaaattaaaaatttgattgaaattggaacgatgtgatgaaaaagttagaagtttgtgtgtgtagaaaaattttgatgtgatgaaaaagttaaaagtttgaagaaaaggttgggaactaaaccaggcctttatgatggcatgaagacattatactatttgttaactacgttatattgaattctacatcaccaggatattaattatgggcactcctttcccatccaacatccagtatttatatgttctaggtatgcacgatcctcaacaaactagacctcgacttgtcgtactcacaccaatattactattagtaacatgtagttataatgtttgtctagaaaaaatgtccaatgctgcttatatcctactattacaattctaaattttactttgcactttaactgtagaacaaagttattaaaacttgaccaaacagcctatcagagatctccaaattaaatcacctctggtcgccaagtagcagttagcatgccatttatactacatatggtgaattatgtgacttggagaaaacatataatatttttaataagaaattatgagcgtgttggaaattaaacatgagtatcttagggttgagatcacacacccccttctactaaactatcaggtgcatctcaaaaacgtatagtactatgattgtaagagaaaatattgaaatcgtacaaggtatagccttatgatctttttttctctaaaatatctatagggatagtccatttcatatatgaatttcaaagaaaatgatataattaattgcggattattgtactccagtctcctcgatctctcgtggacgttggcaacctggcacaaccaccacccctcgtttactgacgtttttgtgttgttttcaacaagaagataattattggatgtttgactacactttttcataagagaaacaaataaacaatgtccggtgtctctagcttcatgttaatttctaagtcattcatacgtttcacaatgtaagtcattctagcatttcccacattcata

SEQ ID NO: 5707 - DNA, 74809 bp, Oryza sativa
ttctggaaggcaaacaagaagatggttggagtgtagattcattctggccattctgcgatatgacctgctcattcatactaaagccatcagatgttttcacactctgagaacattctgtagtcaacaacgagctgactctgggagaatgcaaggtatcttccagttttgtgtttccaatgccttttacatctgttccattaagtgcaatggaagagtcacagcaattcactgctttgggaatgcaactcttggactgatggacatatgatgggagatgaggtgagacatgtgttgcttcaacaggtttatttggagcttctgtagcaatatgaggagcatctgtcttcaatgtgccagatccagggttctcagttttcatcagattatggagcttagtttttcctttacgcttatttctctttttgctgttacattggttcttgcagtcacccaacccaacagtttgctcctaaacatatggaggttatcactcatattcatgattaaactaacgcacacaaaaaggggggggggaattcggataataatgcttaccacctttggcgttggtgcaatttccttgcaaagattatcttcagatgcatgttcaatagtagtgcacacaacagatggaccctgttgatctggcaaaaccttaggatcatgactatctgagctactgcatccgatgtcctggaaagatgtccttaagtcagctaggtaactttgtcagtgaatcacatagatctgtgtctatatcaattgaagagcaagcaaagcatcaataccttcatttgcttagaagatgttattagctttttcaagctactggacttcttctttccttttcgagaaccaccgctgatcttttcaacatctttctttttggcagcctttggtgcttcatccccaatgagttcaagatttatactttccgttgacaccaccatgagaattcctcgtaatttcatgagtatatggtcagcaacagtaccagctgacattaatttagtgaaaaagattgcatcaccactacggttagaaatattgctcttcaagtacactatctcctgaaccagcatcagcctttgcaattctttcacgaaaatgggattcttcttacaagacagtgtgcttggaacatcaagacaacaaggtcgattccttctgaaaaaagactgccgtgtgctttcataataagtctctgcaacaaatgactctggttcacctaagcagaaactgaatttctcgctagaagcaatatatgttccttcaatgatctcattagcctgcaaacttaagctattagcatattaggtgtgcctaagccatagcaacttaaccaacttaactactaccaacttatgtgattttcttgccaaattataatcagtatgtaaaacaagcctgaacaccaatacaccacatcaaatggctaggtcagcaacaaagttcatatagtaacaataacaattgtttgattcattagttataacaagtctagtaagggcacatttgttgcaaaaaggaagattaattatcaatccacgtgtataatggaacagaataagtccaaaaggtttcaacttgttatgctatatctaggtgagaattgtgggtacatcaagtcatacaggccaaaagtaacctacttgtgttagcttggtagtaactataacataaaagcaatcctataaagacaaacaaaatatctgactcaacaaaacttcaaaatcatctttatcagaaacaaacaccaataagacgtcattatttgatatgatttttagagaccaacctttttggggaaaaaatgatagagttgagcaaaagagttattcttttcttctatgtacgtacagtacataacaacaagaattccgtatatcatttccaacgccagtaaagcataactaatgcttagtttgatcacccattctttagatgatagcaaaaccttgaaatctttccatggaaagattcacagattttcccttctattcaatagcccattaaatcttcttactgacttaaaatcaaacctacattgtaaaagttagcattaacagtttaacacaaaccaaatcatcacttctttctttcccatgattccatgaaaactagggagcacacgtttctacagagttgtggagcgcatattcagcttgttttccaacaactgattttagaatagcataactatgcatcagtatctttgcaaatgttactttgatcacatatttgctttatttccgcaccacctttctcacaatcgttccttttacacacaaaaaatggcaaagctaactacccaaaatacaagcatcgatgctttcgacttccatagaagatacaactgagaaatggaagcactgcagtatcctaaatccatgaatgcaaattatttcaaaatgcagtacaagtaagcatattaccagtgctgtagtgcccttcccaaagaatgctcccatgatccttgctctcaccctcggctccagcctcatccaccaatccacataccctttctccctccagaacgcatttgctgccaatccagctttctccttgacacccttcccaaccctcaccgccttcctccccccacctccacctccaccacctccccccgccgccgcccacgacatccgcagcgcgatctccacccaatttgccacgaactcctcgatcacgtagtaccccttggccttcagccagggcagctcggggaactcctcccccaccattgccaccaggtccacctccccgtcaccgcataggaacctcccacccgagatctcgtccatggccgcgacgaaaccgtcgaggtcgccgaggagttcctccgcgaccgtgatcgcgtcgaggcgcgacgacgacgtgggggaggaagggaagaggaggaggtggtcgaagacgagcccctgcccgcgggatgcctccgcggcgcgggcgaggaggccgcgggagagccgcgagaggacggtgggcgccgccgccccctcctcggccaccgccgcggaagaaggggaaggaggatgcagcacgaagaaggaggagtggccgcgagcgcggaggcggcggagcatggagaggagcgcggcggccgcggcgggggtgaggagggaggtcgcggccgcggcgcggcagggcggggagagggaggcgagccaccggaggatcgcggcgcgcggggaggaggaggagggagggggaggggtcgcggcgtggtagagggagaggtgcgcggtgagggcgtcggcgagctgccgcgcggtgcgcggcgaggcggaggcggaggcggaggccatggtggtcgcgtggtcggaagtggggaggtgtgcggcttcgcctccggtggggttggtcgggacctgggaattgggggaggagggaggagtatggccagtgtgggctgggcctgcgttagaggtggccaaatgggccgggccaaacgggccgcgcgcggcacggccggacctgtagcaggcacggcccggcacggcctgctacagtaacgggccgtgccggcacggcccgtttagccgtgccgtgcttgggccgctggccgagcacgcgggccggcacggcacggcccggctactgtagcgggccggcacggcacggcccggggcacggcccggcacggcacggcggcggcccgtcaggcgcggcaggcgggcggcggtccaatgggacggcgacacgtggcactaacggctatttgaccgttgaaatttgaaaataaccgttgggaggctaaaaaattcataaaaatttcaaaaaatctcaaatttcgccctataaatagggcatgaaccccagccatttctcctcatcccacactcctcatcttgtgctctcaagtgttttaagtgctctctttgttctcaagtgtgcatttttttttgattttgacaaaatttgctcaaattttgtcaaaaatcaaaattagtttcgtagttcaacagtttgatcgcagaggtttgaagagctcgcggttggaaagatgtaagtaatattcaaatttgtgtattatttgtattgtgtttgtgaattcaataaatattcgaaaatttgtttatgtcggtttaaattttcagaatggatccgaactttccataccagtcgccgtcgttcaccttgggtgatttcgaccccaactacatgtcggggtttgacggtacctccggatcggctccaactccaccatctgtggaggaggtaccggttcatacggctgtcgttgaggaggtaccggttcaggaggcgacagcttcggaaggattttccggaaccgcgagcggaagtgtttcgacacacaccggctcgaagagatcgagaacctccggtgtgtggcaaagcttcgacgagataaaggaaacatgccccgacggaagggaggtatcgaaagcccgttgtagaatatgtaggcaaattttatctgctcgttcttctggtggtacaggtcacctcaagcgccatgcggagtcgtgtgccaagaagcaaggaatacaactccggcagcagcaacttatgctaaacccagacggtacggtacgcagttgggagtacgatcccatggttgctcgggaatctcttgtccggttaatcgccaggcaagatttacccctgaactttggggagtcccctgcttttgaacattacattcagcaatctcataaccctaggtttaaagctgtgagtaggcaaacatcaactagagatttagagaatgtttatcacaaggaagcaactgcacttaaggaactgtttagtacatgtactttctctgtttgtgttacttcagatatatggagtagtagagctagagaggattatcttagcgtagttgttcattttgttgatgatgattggcaattacaaaagagagttttagggcttaggttaatagatgtctcacatacaggagaaaacatagctgaaagaattagggaagtaattaatgaatttaatcttgctgataaaatatttgctgtcaccctagataatgcatctgctaattctagggctattgaaatattgcaacctttattttgtgtgtatgctcaatcttttctactccatcagcgttgtgcatgtcatataattaatttgattgttaagactggcatgaagagggtaggtgaccacatcgatgctgttcgtcaagcaatcgcgtggttaactgcttctaacccgcggattgctgcatggaagaggttttgcattgcggccggtgtggaagctcgtaagtttgccaccgatgcagagcatcggtggaatgcaacgtatttaatgttaaaagttgttttaccttatagtagtttactttctgattttgttcagtcacgtggtggcccaagaaacagtgacgggtcttcagtactgaacgagcatgtttgggcaattgtccaaaaattttaccaatttctagaaactttttatgattctactctaacattgtcacatgtttattatccaactgctaatataattttgcacaaccttcttgaaattgctactttatttaaagaatacgaaaatgatgacgttctaactgaacctgtctttcacatgaaacaaaaatatttgaaatattggaaaaatatacctatgttgtatgctcttgcttttgttttagatcctaggtgtaaattaaggggattgtctgctattttatcacttgttggagatactataggtgtagattatagttctttttatactgaggttagacgtaaattatatgaggtttttggaagatatgaagtaaagtttcaggaagttcgccagcggagaccccctcctatccccactacaggtaagaagaagatacagtggggtaggatttggggtggatcgtcttcaagttcaatccaaggtggtggcagttcgtcggctacaagtggagacgcctcttcgcatgttgtggccgaagagttgtccggttatttggacagcgacgccatccaccacgaagcacaagatttcaacgtcctcgggtggtggaatgaccacaagataacatatcctgtgctttcaaaactagcacgggatgtgttgacggtgcccgtgtcgacggtgtcctccgaatcggccttcagtctatgcggccgaatcatcgaagaccggaggacgactctgcgcagcgaccacgtcgaaatgctactaagcgttaaagactgggagcttgctcgacaacatgcccaatacactgcggacaaccaagaattggccgcccacttcgagcaactctacctggatccagaccaaccccagtagaattttgttagaagtagttctgacctttgagctgtactcttttctttgtcatggttttctcattttcccctatgagtttttacatgacaaagtttttaacgaggcagcatgtatcattgtatcctgtaatgatataaacattaataaaggtcattactatttttaacaaattcttttgcaatattttcgcaagtgtggatttacctttaaattatttcaaaataatgaatcacaatctatatttttaaatttttcaacacaacaaaaaaataccattttttcttttttttaacattagcaaatcattacttttttaaaaaacttttatttccattttttaaataccattttttcattttttaacattagtaaatcattacttttttttaaacattttatttccatttttaatttttttttccttatacatttcctttcctttttttaaaaaaaaaaacactgtgcatgcactgtgggctggcggcctgccttcacgggccgccgtgccccgaacggcccgtgggccgcgggcgtgccgtgccggcacgggcacggcccggccatccacgggccgtgcttgggccggcggctcggcacgtgggccgacacggcacggcccgtttcatcagccgtgcctaacgggccgtgccgaaacgggccgtgccggacccgtgcccgtgccgtgccgggccgggccgcccgtttggccacctctagcctgcgtccgtagacgggggagagacatgtgaagctgtgtagctggcaggtggggccagtggggacgtgaggcaaaattcttttgcatttttcacctgttgttcgttattcctttttctagacttggattgatggttccaaatattttgcacttattttgtttttttactaggtgaaaccccgcgcattgctgcgggaatttcgtatgataacaaaaaaaaataacgtgtaagatagctagataatatcagattaagtaaattaatgtgatttatgataatttaaattcaaatagtatgtggaatggtgattcaaacgtaaaaggtaaggtggtatgattttatggaagaaaaaaaataggaagatagtttggaccgtagattaatcatctaaaggctacaaacaattgatgtgatatggcttaattagaggaaaaaaaggagaaagataatttggaccgtagattaatcatttaagcactaactaaataaggataaactatataagtatataggatatcataaaacataataaatatatacattgaaacattatgttaattatgttggacgataatttaacatgtttgtatttgaaaagctcttaaattataaaaactataaaaatatagcatgtttgcatgatgtttaaatgtgatgattgttagtggatgatgatgtggcattttgttaattagtggatgatgatgcggcatcttgttagtgaaagatgatgtgtcatctttacatgttaagcttaaggaattagtgggagataactttatagtaagataggattagaaacacggtacaaacatagacgcttattatagcgcacacacacttaccttacccttatgagcacctccggaagactggagcgatatatcttgagattgacgaagtcaccacgcgtaagtgcgagcatccatatcaaatctagaatttgaatccaagtggcctgggttcgtcaaaagaaacctaactagttgagttacgctcacttcgcttttgctttttgtttttttgttccttttctagaagattggtggttccaaattccaaatctagaattggcaccgtgaccgtccactaatctggtaacctagtccttgtgaacttctctcttatattaagatgggtgatcaactaattattagatgccagacttgagtaatttgtggctcaggccacgattttcattgtttgtggttcaggcttgaagagcgatcaaaaccaacgaagttgcaggtttgatagtgttgacaggttttggtacatttttggtagcacgaatgcacgatcaactaaccaatataaatttaacgccaacattaatcacatcaaaactgtgatcacagctcagatatgatccgttggacaaaatttgtcgttgcatgcaaaatatatcaggcaaaatttgtcgttgcatgcaaaatatatcagggacacaagcacaggaaaccaaacatgacagcgctatcattttgtccctgcatagttgatatattaaatgaagttgcattgacaataattgctgatgatgtaggagtactataaatgtgataaattgtcgaatttactaaggtcagattggaacatcaaaaaagtagtaattccatccaagccattaaaaagcacgcacaggattgcctgtgaaaggcacaccctttgtattctaccattgtacgagtccatcaccatgaattttcccggttaagaagtgattgcaagaaacctttttcagctaattacattttataattaaccaagagtaagttacatgtagtatgccaaaaaatccggccggcaaagtaaagttagtgtacaccaagaatcgaaaatatgaacatcttacagcatgttccattcctacaaaactagtgggatttaggcagggagagctgccggcgtggctgggggaacccggttctcgacagggatctccgtgaactcggagagaatcgccctgaactcgtcaccactcaatgtctccttctcaaggagcacctccacgatcttgtccatggcctcccggttgctcctgatctggctcaaagcgatctcgtaggcctcatcggacaaccgcttcacagcggtatcgatgtcctccgcgagcttctccgacatggagttccttgccatcatcctcatgatgacatcgccgctctgagctcctgagtccattagcgaccacggaccaatgtccgacataccgaatgtaaccaccatctgcagaagcattgtgaccccaggtgtaattagcaaaagaaagaaaggggaaggactaagaacagatgtttaatatatatgtaaatgctgtcagtttttctagcatgttattttgcagcaaatttatcctccagactggtttgtaagtcataaaaggtgcagaagcagaacagattacatagtctactgcttcaaagtttctgtagatcaattagcaaagttctagaatagaaatatagcgtacctgcttggctaggccagtaatttgctgcaagtcaccagcagctcctgtggtcacctcaggctccccaaaaatgatctcctcagcagcacgaccgccaaggccaccaacaattctggcgaacagttgttgcctggagatgagcgttgggtcgtccattggaatgaaccatgtgagaccacgagcttgacccctcgggatcaaagtaaccttttggacagggtcgtggccaggcgtcaaagttctacaaagaatacatttccagatatgaatagttgcacggaattttgatatgcaagtaataaacaaaagcacagttagcaaatatgcagattatctcttacccacaaattgcatgcccaacttcatggtaagcaacaagacttttgctcttcccatctgtcatcacagttccttccataccagccactattctgtcaattgaatcatcaatctcctttgaggaaattgctgtccgaccacgtcggcccgctaatatggctgcttcatttagaagatttgccaagtctgctccactaaagccaggtgttctcattgctatgacttcaagagagacatcagtatcgaacttcttgttgctaccgtgcaccttaagaatctctgtccttccgcgtacatcaggaacatcaacacttacctgtgcaacaagttaaaaggtatatccataatgttagcaaggttttggacatatgaggataacaaaattctaactttgagaacactcaaagataactcaagctcgaaaccaaaagcatccaaactgattgcgtgagtaagctacaaccaagaacgagtatttattggacttctagcctaaaaccacgtgagaacttcaataatacagaacaaaggtaaacgctatagctgaaacatttttacttaattgtgtcacaattgaatgagttaaaaactagaatacaacagatgttcacatccaaaagaatgttcagtggataaaaactaacctgtctgtcaaaacgtccaggtctgagtaaagcagaatccaggatatcagccctgttggtggcagcaataacaatgattccagtgttcccctcaaaaccatccgtggtcagtcagcaaatgattcagagtgtgctccctttcatcatttccaccaccaatacctgtccctctttgcctcccaacagcatcaatttcatcaacaaatactatgcaaggagcattctcctttgggcccaccccttcttgaagagatcacgaacccgggaggcaccaactccgacaaacatctccacaaactcagatcctgatatcgagaaaaacggcacaccagcttcccctgcaatagccttggcaagcaaagtcttaccagttccaggaggaccaacaagcagaacacccttagggatgcgagcaccaacagcggtgaacctttctggtttcttcaagaactcaaccacttccatgaagtcttgctttgcttcatcgacaccagcaacatcatcaaatgtaacaccagtgttgggttccatctgaaacttggccctagattgaccaaaaccaaggggaaagccaggaccgttaggtccaccaaggccaccttgtgctcttcttgacagcaaaaatagaccaccaataaggataagtgggaaagccaagtttccgatcaggttgaacagaagagaaccagagtcctcctggttgctgtgtgcagcaaaatcgatattcttttccctcaacttctggagaagctcctggcttagaccaggaagctgcacacgaactctctgcacacggttgccgagctcaggagaaatagcctctacaatggcaatcgtgccattctcaaacaaatcaaccttcttcactctgtccttgtctagatactcaaggaacctcgagtaagacattctcgacgacgagacaccttgctcttcagcaagagctctcttagcacccaacaaggtgggaagcccgaccccgaggttcccaagcgcgagctttaggaacttccttctggcatcattagtcttgtgctcgagggaggcagtcacagaaactggcctctgtgcaacgccactcgaaggaagtgtcgagaagggaagcggcgtctttgcagcaaggctcatggatgttggagccatcttcgctcactgttaaaagtaatgaaagggagatcttgtcaatcatacaagtgttgtatggcagaaattgcttcatccgatacttcaactaagctaatcacttcatatcaatccaacttagctgtaactaacaagctgtcctaccgtaagtattcaagaacaaaggtaaagcatctcttcacaatcacccctacaagtagaagctattgtaatcccttctcgaactacaaacagctacaaccatcatccccaaaccagtatgaaatccgaattcagtagctcaccgtagcttctacttgctgattaacctatcgattggaacgaacacgctaacgatctcagtcccaccatctttaccagtaaaaagctagaccagtactccaaattccgaaaagcatactggctaacaaacagaacatccgcatcgcatcagagaccaaacgccacacacttacacactggattcaagctagaaacagaaccagacgcacgcacccacgcacgcaagcgaaatcgtaaagggaagcactgaatccaaagcaaacgagcacgcacctgagtggatcggagcggggcgtggaggggagagggggggggggtgggccgaactaggaaggggagggaggagggagtggagtgtataaatagcccgacaccgacgaggagggtagcggcagattgatttttcctcctccgctcgcttggcctctctctctctctctccggtgcgcagttgcgtggggatttggggaggaagaggaggagagggggatgggggcgacgtggccgcctccgtgcccacagcgtcgataaggaagagatgagcccacttagacggaagccaaagcccatggagacgaagtgaaatatctctccgtcctggtgaaattggcaaatggctcgtattttttgcgtgccattttcgtagccagtggggttttcctccgatggcttgtagtgtcgtggctgctggactcacggctcacgcaagattggactgcttggaatcctggagatgtgaaggcgacacactggtcagagcatggcaatatgacatactaagttgctgccaacattagttattgggtaaacaaagccagagccgtccatttcccttgcacgacctgccgactgaatttttttcctcgtcgaatttacacatagtgtagaattttcttctatgatgatatactaatgattattctctatctgtaaggaatacgattacacaggcaaaactctgtagccaagatgcagaatggtaaagaattacaagcacatgtcaaactgtcaaccactcgtcggcaggatcagtttgctcaggatgtgggaaaacggtggagggatggatgcacacgatgttacagggcgtgaacaaaccaaggcaacctttgtgtttcactaatctgatgacgagatgcgccggatcttgcagaccagatgggcggtggggaggtcgagctggctgccgccgtcagacttgatgaggtcgcggacctggtctctcggggtggagatgcaggtgtggaaggtggcgaggaagggtgggatcggcatggacagcgccgagaggacgttgctcaggtactctatgtccgccgccagctgctgcgcgcctcggtcggtgatgtaatggatccctcgcagctgctccatgaacagcgcggtggcgccttccgcgacctggttcatcatggaaacagagatcagagacagttctagattaattcatcaaaagatttgggttcggtgtttatgttgtggtcagattattggggttttatgtaatgttgtattcagttgcaatgcatgtagttctaaatggtcaactcttctgtacggaatttgcgaaagtcgcagtgtgaagtatgaatggttttgtcgatggtatgttgcgaatgtacacagcatgatgaaaaaaaatgctttgaatatattaccttaaatatccattcagtagcaaagaactgagcctcctcgttgccagcctcaccgcctgagataccttctgcaagtggctccaactgctggggtaaagttaggagatactccccaacactggtcacatatgcctgcgggtaggcactgaagcttggaaggggaaggccacctggttcctccaccgatgaccaaattgggaggcgagcaacctcattgagacgctgtcggactttagatatgagcacgtcatagacgagttcatttactgtgtctgagaaggccgcaactctttgtgatgtcagaggtagagcatggaaccttggatcttttgactgtataacagaaatgttatctttaaattagccatgaagacaaacaaagagttacttgtgatacttgggaaattataggtcaaaaaataggttctatgccacatatgagtagcttaaaaaaatgcataatagaaaaggaaagctaaaaaagatctccgaatttcctataaaaccagataatctagcttaatactaccacctaagtttgcaatcaggctgttcaaacaaatcagagaaacatgtgataactctagtgttgtgacactagcaagataatttaaaaatatataacttgcctgttctagtacagtgaagagcttcttagacttgtctggtagatcggtgaggcgaatagctgcaatatcaagtgctgccctccctgtgataggcacttctgcattctcatcaccatttgctgcagttgatttatctaggctagaaccaaaaccagaaatagaaaagttggttccaatcctggcaagagtagcccttaaagaagcttcaaaaactgaggttctgctagttaggcaatcagcaactgtaagaatctgcaaagcaccctggacaatagaccattcttcctcttcagagacatcgaccaatcgttgtgcttcttttttctctagtcctgcttcctttttagaggaatcactatgtgcagtattatccaccccacatacaatcctaagggattttaaagtttcttgtaggtttgatatgtactgcagcataatgtcatctagagccaataccagttcatctgcctctgaaccaccagtaagactaatgcatctctcgacagctgcttcaagaagcactataatttgtgggatggattcctccattctacgaacagtttcactcagctctataccctgtgcacccacaccacgagcaatggccccacggatatctataccagccatctcagcagaaagtaaagcacgctccatttgcccatacctacatagcatgaaacaccactggctgagtactacagcaatagcaacaaaaaaaatctcaccaatgcagttaactgcatgcaacagaatttttcacaagttttttttttaccttgctttaaaagtctcatatggggaataaatagctttcaatgtattcagcagaactaaaagatctgactctgaaaataaatgttggatgttccgagcaaaagtgcccgtcatgttgtgcaggtcgatcagtgctccaagatgcttattctgcaatttggtactttttggcaagtcacctgataaaacatctagtatacctgggtacagaggacataaaatcaatttattgttacgaaagaagtacgcatatgtggcaaacaagtaatatccttttttaattgaacagagaaaaataaaacatgtaattcaatcatgaaattagtatagacatacaaaaatgaaataatacgagaagtttatgcattaccttttgcaacagatctagtttcaggaacagcatctccagttgctaggttgacacgagagacaaaacttgaattcaactcactcatggtttcaacaagtacttttgggactagtgatttgtattcttcagggaaagcagtcaggcaccttcagcattagcattgtagaacatccattaatttttggtggagcaaaaatattgtccgaatgcagctaaaagatgctgccaaaaactggcttctgtttacaagggcaaacattgctgattcagaacaaaagacaacagggtacaatgaacataccacttccattcttgttcaaggtaaagtagtgtctcatcatagaaatttggaagccagctagcaaatgagagactgtttatgctttctccaccatacttctccatctctacccgcttagctctctgttttagatcaaaatcttcccaaagtttctttagaggcttgacatggatcttagtatattgcacctccagtgacttgaatctgccaatacgtatcagtattccacgaagatcttgcacagcatcgaccttccaaccaaaatttgtaggctttagatgaaatagagatgcctgtactactgtttaacaaatataaatgagattagtaagaaaaaccttgcggttagaaagtgcatccaccaaacgaggttgaaccatgtcatctagccgttcttccaatacttcaagctgctttctcacattagcgaactccgcaacctgaaagcaacttttatataagcaaaacaaatagcttctgcatataaactcagtgtactgtgcatgtttgtgtgagagagtacaatacctcaccaactgccgacaagcaatgtctcatggttgccagggtttctgcagcttttggaagatcaccactagaaaatacatcctcaacactttggctcaactgagctagtccagccgcatcctggcattccgaccaacaagctgttaaatctattaaaagataacctaccactgtgagtgaagcatttacttcagtaacatgcaccatagtccacatacaacttacctgtaatgttgcatacgccgcttccattcgttgtttcacagtatcaattcgtgctagtgcagttattgactctgcagatgaaccctcagcctgattgaagaaatcatcatcatcagtaatacagaatttatgaaatgtagatgggactgaatacctagttagttgatcatacatgcatatgtatgtcatatttcattcattaacacccagtattcagcattggccgttacaaagaaggaatcactcagtacccaaaaaaaaaagttctagtgctagcaaattcattccagtgtattctacaaaatgtcaagctaaatgttatgagaagataacgctacacgtaacaagaagtacatgctacaggagaaaatgttttgcttgtgatttgatgtagcatcctgacctatcacctatatgaactaaatgatataagtgacggtatcccattataatagactataggcatagttttatgggcatcactgaactgctggatttgaatgtcctctacagcatactcaaagtttacatgcacataactgcattgcataagtacacagcattataacatcccgacacatgcaaggattttgccaacagagctccagcttggttttgccaagcccacgcaaattctgacttcagtttcagttaacagagatgatcaaattaacatatcatttgataaaagcgtacagcgataaaattgacatgactaaatacagttctagttgtacgcactgttcaatgcaaagcgtacaaggataaaattgacatgaccaaatacagtacgtgagatccagatccaagtgaaaaaacggggggtactaaaagcggccagaggctgaatcatacgcataaatgaatcaaactaaaacctattgtgccaaattggttcaacatttgctcattcgcaccaactattatcgcaagttcgtaatcctccaaaatgatctgggtttcgcgtgatacacgtacaattgtgcacgagtgaactgtgagatccagatccaactagcaggcgagcgggggcgcacctgggagagcgactggaggacggaggcgagatgggaccggagcgagacggcgtcgtcgcggaggcggagcgcgtcgcggcaggcgagcgggacgcggcggagcgcgtcggcgctgtcccgctcgagcgcggccgcggcgtcgtcggcggccgagcggaggcgctcctcggcgtcggcgaggaagcggtcgagcggctccgacgggtggcgcgcgtccagcgccgcgttgatccaccgcttcgggtcgaacccctccgccccgaactccgacgcgtccaccaccaccattttccgcctcccctcccactcgctgcgcctcctcctccgccgccgccgccgccgcggctcgccgtggacttgggcgagggagacgaggaggggtggctttgagttcgctggattgctactagtccttttgctaggtgggagagtcttccgtctccgcggctactcgtagctaacggccgccatgggagggatcacctcggtggagttcggagggggaaacgcctgccaaaatggcgtgttctcttgtgggagacggagtgtattttacagcggtttttcctccaaaatttatgtcttgttgtttccagccatcatgtttttattagtatcaaccaaaatataatttatatgtaaaacttttagatcagttctaattaacttaaaaataagcggctctatttaatgagcattttcggctgttgcttttgtgactgcaccatgatcgacacgaatagtgccgcactcactgtgcgtagctacaactgcaaccattgtagccggccagaagaacgctccctatagccttagttatggctgcaagcagcggcattacacccttaacaacaaaaaaatataagttaatacaaccatagccattagcagtgaacccgctaagaaaattaccgatggtccttatgctcatctaacttatgaagcaaccttctcatgtgttcgatttaacttagtaagggtgtcccacatggtataaatacataacttataactgtaaaaaaaaaatcaccagtattcaatgacctctgttgacccttactaggtactccctccattccatgaaaaaacgaatctagaataggatatgatattttatgtccaaattcatagtcttaagatgtgtcgcatccggtactaggttgttttttatgggatggaggggtacgccgctaacagccatgaattccgaataggaacatgctgaattcgggaaaaaaaaaaacaatcttggaagtggttaatattccgtagaaaataaatgtgatggaatatgattttagggtagagttttacatttctacttttatcagcttaaagaaaatgatgaaaatgacacctagaataatttaaaatgaagtttaaaaatttcaatttttaactgcaacctgtaaaccaaagagcaaatgatgagggtagaaatgaagatgcacttcagtttcagataaaatgaaaatgcatatcaattcagtattcggatacaaacaggtgccaagaaggtcgaaaatgtacattggggatgggttgtacaacagcagctatagaaccatagcgcaatcaataccagctgcaaactcaaacgaacttagatgaacacatatctcgactaggtcatagctttgaagatagtccacaacttcagagctcacatttcacaacagtggggcgccctagagactacacccgagtgccccactggtttattgtattattacctcaaatcagtcaacagtatctttaagcattacatgatcacacatatttacatacatgtatacaaagatgtacacatacaaaaacatttcgagccatgccccaccccgagggaaaaagaattgctgagcacacaaaactggctatctacatgaacatgattgatgagcaaaactagcctagggttagagcattattggaagctatacagatgccacggccacaacacgtgctagcgttggtaaactgccggatcagccgtccacaactccagtacaaagagaacacaagaacgtcttgtggaaacaactgaagcttcgtccgcatacaagcagttctccctcactcacttgttaccctggagtacgaaaagttgcttcagcaagatgggataaaatcagattacaagcacctagaaaacgagagtaactgaagtattacatgaacgggagatggcaactctgtggagatccaagattttccatgccttcagacttaattgggtccccaccagaattacatgatgacagcaagctcagctgcaatcaggtagagtcaaaatgtcaggacattgcactataacaaatcgaagtcaaatgcaagtgttgtgtagaacataaaatatgcccttattgacatagctaatgcatttcatatctgtagaaactatataccacgaaaccatgataataatatcctatttagttattcaggaaaaagaaaagttccgtataaagtttctatggctgttgtagccagcccaatcaggatcaaatcctgcaaagtaagtttgagaggacatggatgcggtcaacttgacactagatatccagaagaacacaggtggatgagagtaagcatgtggtaggcaactaatgcaatctgatcacagtaatcatgaaagtagccagtcaattgtttgttatttaaaacattattagctaccccaaacttcgaacacaaattcagctaacaagaaccctaaccacaataactagccaaaatggcaaaccttaacgctagtacagttcaaactctaaattactcataacatgtttagatagctacaagatgcataatatcagtggagaacaaatacaaaaacagaacaacttacatgtgccgcaaagttggggctagttaagttcatggacagatttctcatcagcagtagtacctgtcaatttgtcagatcaaccagtgttcattgcaagtgaaataaaatagttatgtgaagaaaaactagaagtaacaatggtacggttgtccataaaatagaagaacatgaattgatcgaaaccaatgcagtagaatggtgagacaacctatatatatattgatacaatgaattcctactgtgtttagcataaaatatacgaataacttctttcaaatgtggaaagttgcagcagatgattttttagttaagggtaagagctatgaatggaagagaatgcaaagtcttattttggccttactgaacaaagaaaggcttctaagaacaacaatagtgaagtgaaatgttagtatcactgaaacttttacagctgttctacaactggggccccataaatgcacatctgtctaacatttccgctacttcaaaattaagaatatctgtgttgggaaaaggatacgatataatcatagaacattcagaaactatatctcaaatctcaagaaacataccgtttcaacatcaattggatccatcgcctttaaagtctgcaaatgcccactagtatctggatcaaatatgcttcccagaaagctgtatacttgtgcaaaatctggcatagctgcatgtgtaaccagagaggaacaaaattataagaatatagtggaataaagcactgaagcctacctcaaggaatatttaacaatttaaatatgatataatatttcacaataagtaagtcaaggacttgttgcatgacaaaataacattttcaaatttcaatacacgtgaaactatacgtatgtgaatagtcaggcctcaaaggtagatgattacttgcaaccatgcaaacaacatgagaaacttagtttccattgactatagaagactagtctaaacccccccatcagggatcatcaattatgaaatgtgatgcctttgtggaaccaaatcattaactaagttccaacaccgttggtccaacatacaaactaagctgttgatcaacatgcatttgccaagataggtctgcaaaccgtatactaaataaaggaaactcaccacgtagtggtcgaagcatattttcttgttcaactgcttcagaagttggccaagtagtagaaggactctctatgctactagagcagttatttgtagcaacagcacctgtacctgccaaatttagttcgtcaatggcatttgttggatttttctcattaattttggacagaggtttatgagcatagtaggtaaacataccttgcgtgcgacttgcacttaaaggttgagcaatagaattgtcccaggagggtactacagcactggcatttgtatttctgatgacaggagatgtatccatggacataacacaaccttgctcccccagaggagggggttgtgatatagcagctggcgaaactgcacaagctaaataattccgattactacttcccaactagaaatagttgatggcaaaaaatattacaagactgaggctgctgagcagtacaaaccatttttagaggccttctgtggatatggatgagctgccttccgctttggcctgggtggaggcagatgttcacctgtaccatttttctgaaccttcaaaaagtatttttgtgcatggctccttatctgtcaaaagaacagctttttagattttgcagagagaaaccaaaatggtgtaggagcatttcattttaattggcacaaaaaaaacatcttttaaacttgtaggatactaatatgcattttgaacttccagaatatggtcatactcccaaccgttcagcatagggtagttgtgcctgctaatgagcacttactatatttcaagtttgcaaatgtaatttaacttcgcgctcgagaagtgtaatccaagttgatttgacttgaaactatatttgaactaggtgcatagattacagttgcacagaaatgcctgtttctttttaaaaaaagaaggaaagtgaaattccaaggcttcaagcatagcgcttcaattttcatatcaggcataagattctataagtcaataaaatgacaacaattaacagacagaatacaatggtgtgtttcaaataatatgtggcgtgcataaatttcaaatgatgtgtgacactgccaaccagatacatatagaacgcctcaaatcaaacatcaacacgccactccaaaggctagcagagaagaatgaaaacgttaacttgaaaggtagctatgaaccatacctgtatcacagtttttgagccaacgtatgcttcaatctttttccaatcacgatcgaacctaaatcaaacaaaagaaaaggaagcacatttaagaggtgtgtacacaacattgaccaccctaattacaattaatcaacaagaaaattttagcgatcaaataaattatacagaaaagtcaccctaacagccatgtgtatgatatgtagctagttaagttcgaaaagtttagcagtaaccagcaacattaagagatataagtcttataaaataaacaggcccacgttaattcaaattacaagttcaataagattaccactactgttgtatgttcccacactgtcaatatctgtcaatcctctaataataatgttagatctcaaaggttaatagtgataacaaaccagcacatccacattttagaactattttttctctgaattattccaagatgcaccctttaccgtgtccaatcctaccatgcagaaacaaccaacaagagacattaacagaaacctttctactgaaaacatctcgatccaacctatccccactactgtcatgttttcctttggttagcctatagagatcagcctagtgcaaaggaaaactggtctgaatgaatacccacactgtccagcgtttcaaataactggttacataatagtaatactaagatgcaagactgctggaagcctatggcacaaacttggtatgctcgagaaagctaacagttcaggtaacctattagaattcctgacaagtatgatattggaagttcaaagcttgcaacaactctggccaatctgcttcacataaaggactgtttcaggatgaaaactgttatctgtcgcctgctaacaaaaatcatcaagtgatcccttgcatttggatctatcgagcaaaacaaccacactatatgcttattaacaggtgggtattctaacatttgatatcattgcatattgctctttcccttatttataaccttttcaatttctgtacaggttgtaccacctatatccctttatttcttttttggtttagccctacatggcattttgtagcacattttaacttccattaatacaatgtttatcaggtagagcgacctctatcatcccacataaaaaaggaagcaatgaaatgcttgttttaaactaccatcagatgctaattgagttcaggaaaaataaatattgtaaccctaacatgcaggaaattctataaccactggtacatttagataataccaacagcactcttcccaacattaaacccagcaacttggttcacaaatccaaggatcagaatatcataaacctccctactcctacagctacaacgagattgtacttcctccgtccaaaaataaaccaacttttgtaaatgaatatagacatagcctatgtccatattcacatacaaaagttggttcattttcggacggagggagtagacatgaaagaagcacgcctgtcaagctactggcccctactgaacgcatggattctagcaccgtaattcagttaaaagatcaatcgaaaatcaaaacatcatagtctacccaaaatgtgagacctagaaggtagtgcctcccaaccacgactgctcagctcaacagattcgaccacccaattcgacccagcaggctaaacctatcctcaattgaatacctcctccaaaaaaagccgtctttcaaactacccagggttagcattcgcaggaggagcagatgcacaatcgcatccaaactccacaacgacacagacgccaccatacaagattaaaaaaaaaaagcagcacgaaagccgccaaactatccccaaccacggggggcgcgccgcgcgcgcgcagagataagagggagagcgagagacgggggcagaattgggggcactcacagctgcagcgcctcgaggaacttgtcgtgctcgggctccgtccagctctccctcgacttggtgatggtgtacggcttcctcaccttcctcgcctcctcccccaccgccgccgccggtgcaggcacggccatcggcggctgcagcggcgcagccaccacctgcttctccttctccttccctcctcctccccctcccccatccccacctcccccgccgcccgcgacggcggcggcggcggagacgacggaggcatcgatcggattgggcgtcgcgctcatcgaaaccatcagccggggtctctctcgcgcgcgcaggattcgccgcggccgcgagctagggtttgggtgcttgtgctgctggtgtgcgtgcgtgtcgatgcgggggacgaagcgaagagaaaataagaatgcgaaacgcgacgctgtgctgtgcgcgatgtggatgtttctttatacttcggggcgcttcgttgctggccacaagaggggggtgaggctgacgtggagggcccacgtgtcagtagagagaggggtggagttggttgggtttgggttgggttttgtgcaggtctggcacgtcccacgtagtgtcacacggaatgatttgtttgtgctgctgcggtggaacgtgtcctgtgtggtacagtgcaggttggttgactactctgtgtagcgttttttctcttccctcggaggcaggcctgggttgttcatgggccggccaaaacaaggccataattgggcctaaattttgggcccaaaactaaacaacatgcaagattggttgaagtctgagaagtttgtgagaaatgcggcgccatcgtttttgcttatcatgggaataagccaaatggcatatttgtaaacggaaaataatttgtgaatatttttttatatgtgtattcttagtgatctaaaagcaaaggctggaaaataaacttcgacaaaacaactccaaatttaagttgaaaattttatttttggctaataagtataagcataagcgaaaagataatgccgatgatttttctacgtgaccctcttttgtattgcttcaagtttgtgagattcttactatgaatgaatttatatatgaaataaaagttatttttatctatgatataaacaaaatgtctcgtctctaacaaaacaaatgtctcaattactttgatctaccatcggctcaacttttaaggatttctagcgttaacgttctctttgtttaaacttataatccaaagcaaaaaaataggtttttcgtttggcttttcaaagttataacttataagtcactcttacactattaagccacaaactaaattggagaagttttttttaatgtaaagtagatgtataacttcacccttaaacttaaaactttatccaccgacttatagatcattgaaaaaaagacttaaaagcctaaaaaaaaggccataagaaaatccaactaaaaataagcgagttaaagttatgtcaaacaaaacacgctatctctgtgtggagtagcactagtacagatagcttacaagttagtaatctgtaattcaccattattttctcttcaaactgtcaacaaaacacgcagcctctgttcaattcagaactactccgtataagctggtacaaaactgggtctcgattgcctgcgagtagtaactttttcctatttccagaagtttggcatatagtagaaagttgctgtcggtcacccgcaccgtcctctactcctctcaacgtcagatactaagattaggccccgtttacttcgcgaaatgaaaatttttgggtgtcacatcggatgtttgaccggatatcgaaagggattttcggacatgaataaaaaaactaatttcataactcacatggaaaccgtgagaagaatcttttgagcctaattaatccgtcattagcacatgtgggttactatagcacttatggctaatcatggaataattaggctcaaaagattcgtctcgcaatttttcccctaactgtgcaattagtttttgtttttatctatatatataatgcttcatgcatttgtttaaagattcaatgtgatttttttgggaaaaactttctagaaactacacagggcctcaggcatgtgcaccatcagaaacttttcttggttgttgcatgaacagtactactttgaacacagcggaatggcagaaagtttcagtggcactcctgttgttgctagacagtgccagaaagtttcaggcaaaattaagcctgaagcttcttctccccacacaaaatcaatgcggttgatagcacagctcgatcggtctgaaagcgttcatgtccactgatgactcagcgatttctgaatcacctgaaatcctgaatataccttatggtcagactgcacgtagcaacattttgctgtgagctcactgctgaaattgctgatgtaccgagtacgacagtagtagaagggaaggggcatggagacagaccggtagatgcaagtgggtgatgagcattgaagatcttcagaacagtgaaaggacaaaatacaccaaaatcgccgcccaaactcaaattatcttatttctgaattttttaaccgcaaaaaaaaaagaatctaattagtacagtactaagcagattttttttaaaaaaaagagagaaaaaggtgatggtgcttgtgcggtgagtgagataagcactgggaagaaaaatactgtgcctgcctgacgataactcaactccaaggaggcagtgatatttttggattttttaaatatattcatcagtttggtggtcgacccacggaaataggtcatagaaaaacagcaaaaaggcatctttttgaggggtttggttacaatttcttctcccaatttaaaaaccaaaagaaaagggaagaggaaagggaatgaaagatggcctttctctctccttcgctctcatcagctcgagccccgacagcaagtgtgagctactgaactcgagaccctcctgtcgcgcggcgcggcgcggcgagagtggccttttgatccgacgaagctagtaagttccctcgctcatccgatcatctcgtccgatctgtgagctgggttgctgattgatcgtagttgggctccatgagcatcagggtttggccgacctgagtgatgaggctttgcttgttttcctgggtcttgggtggcttcttgcttttgattgttttgattggattgattttttctttctagattgatatctcaatctgatagatatctcttgggttcaattttcactgatgagtaaagatccccaggtggtcgtgttctgagttaggactgggtaggaaaaaaaaagcccctttagatggattcatccaagatccgattagttgattggctaaatctgtttttggaatcagttggttacccaggtgaggttattggcaaaaaaaaagacggttactttggtccccaaatggtagggcatgtaaaagtttagcttatctgcgactaatctgctatgtggtgtgttcctttgtttctttattgtctggtcgatcagttcgattccttggaaagcactcattctgagtaccgttctaccaagtaccaacggatcacctcgattcgattaaaagcagtttatatttttcggattctaatatggagtaaaagaggttataggagttggaactttttagaggcagatcaattacactgaaagatacacactgatgattgtgttggagggaccctcctttggtttgcagttgtgaaaacacactgctgcttgcttcttatccagtccattatcggtagtcactttcataagccatttgctgattggaattggaatccgtgtccagaagatcctagtttttaggcattaattgtgatgagatgtaaggaattcaaacgtgatcgaaatatatccttacaggggttgttaagatctgtatacatttgctgtccaaaaattttaaaacataacggcatgtttccatcttagaacatgtgttgcagctcttaatatcaatcaggcaagaagtgcaatgtttttatcatcttgttggttgctacaagttgttttgaattttttcttatcatgcgaatgcatgttgctggactcctacaataattttctgctacttgttttctttgaagccttttatcagtctaagaccctgccaatgtccatttggagataggatgtcggaacagcaggatagtactagtaaaagctctagctcaagcatcagcagcagtacacaggagagcgaggaggaggtatctataacaataggtagcctcctcgcccaagcaaagaacaacagtgggcatagtcttggaaggcgcctctctcaattgggttcaatcccggtaatatacagtcatccatatttttctttgttccccccttggcatttgttcccttgaactcatcttgagctgtaccatgattaaatataggaattctctctcaattgtacataaatattccaatacagtactcaatataataactaatacgataattattacagtttttaactgcagattgttaaataaaaaaataaagttcttaatttacaatagtgtgccttcggctatgttttatgacaagttactaatgccctcatgtatggcagcacactcctcgagttaatggaaaaatccctaatcttgataatgcaactttggatcatgaaagattgtcggaaaggtaaaaaaaaaacagacctctctctctctctctagaacagtatggccattgcgctttcttatatttctcatttgtcctgatccttcttgacaggttgggaaattatggtttggccgagtttcaaatagagggtgatggaaattgtcaggtttgttttaccattgaacctaaatcatcatttcatttatagatacggtgccgcatcatctacactatttcagagtaacattttgaagcagctgttttttttttgtatttactgttttaaggctgctgccattatcttatactgaatagtgaataatagattggcctacattcttttgaagattaagtggcctgtgttgtttgatctttatagctgatactatgaggtgtttagtagaactacaccttcaccagtctgtacttaaacctgttcccttttcacttgatgccatattgttacagttccgagctttggcagaccagatatttcgcaaccccgattatcacaaacatgtgagaaagttagtcatgaaacaggtggatttcttgcctcaatcatgcactgtcatgaatatgcaactgtgctgaaacactatccctgtttttcagctaaaggaattcagaaaacagtatgaaagctatgtacctatggaatataaagtctacttgaagaaaatgaaaaggttataatccaccatccagagagtttttccattacttttggcctacttactcatacttcataaccatcaccttgcagatctggggaatggggggatcatctgactttacaagcagctgcagacagggtaatgttagctgttgtggtgttatgatggttgaatagtttgtgggaatacatctttttttaactgcaggtccccctttagacttttttttatgcagatatttctgattgtttttgaacgactgatctttctgattgttgaacttgttcatcgtttataccttaaatcctacttcaggacatcaaatgaaactgataaatgcatatatttatgattggcttattgctggctaacatccattataatgtccttaggaagacacctgcagtttacctgtttgataacatgtcattgtttcatactgtttggttgaaccatataaagaagaagtgaccagtcaggttttaatttgtattgatattcatatacccccatctgaactgtcattcaagatgaacgcatagtctgtcaccttggacatcctaccattatatatcatgtttctagatcatctaacacccttttatatctccaattgtacacagtttggtgccaaaatttgtttgctgacgtcattcagagacacctgcctaattgagatagtccccagggatgtgactcccacaaggggtgagaactgggatgctgtgttgctccgatcatcacatacttagttccatgcgacgctttttatctcaccgatggtatctgattctttcatgacccgcattttgtagagttgtggctaagcttctggtgtgaagtgcactacaattccttgtacgcaactgacggtgagtgtctttcttagactatatgaacatcgaattttcgcttatgattcttacatcattaaattctaacattccctaccatgatattttgcattgttagttctgaatgtgctcctgttatgtacaatgcagatctcctaacccgcaaaaccaagaagaagcattggttgttctagggcgtctcacctcgagcttccttgagcttctgctgctgcagttcttttcccttcaagttagcagcatctgtggtgcttactagttttactaccatggcaacccagccggcactgcaattccctaacctgaaagaagagcttatgtacagtttaactttcagtagtatgtttcgcaaggtacaaacctagaactgtgcaactttcagatccatgagtcccatgttctacccggcgagatgtagttttgtttttgcatagtatattgtgatctatccaggtgcttgctttgtaaaatcatcatgtgagctggctagattttttaccatatataagcttcagttgaattctcgaattccaaagatcgttttgctaaactgaagtctgaatttctcagtggtaaaaacaagcacagattcaacaccattggcaagcgttttgtgggatctctaaggtagtgtttggttggtgggatgggatgggatgggatgggacaaacccacttttagaggtgtttggttgaggggcgagtgggatgggttggtccctagagaggaatattcctcccagatccgggacaaatccatccggcaaaatcggccggacgagctcgtcccacttggatggagcacacggcgtctcctcggtgaccgccggcgctcgtccgcgcccgtgcccgccgcctcctccgtgaccgccggcgctccgccacgactgcctgccaccacctctgcgaccgccggcgctcctccacgaccccctgccttaacaccggtcgccgccgcgagcgagatgctcggcgccatcccgccgctcatcgtgatgctcgacgagagcggttgcggcagctgcggtgatgtcgacgcggcgggctcgagtggcggcgaagcttggaggtagggagggcggcggcggcggatccagagaagggggactcggcggcggcgaaacttggaggtagggagagcggcggcggcggatccggcgcaggggatctcccgatccagccgcggcgacgacggtgggccagcgggttgggtgctccggcggtggtggccgtcctgctgctgccgctgtgcttgatccggttgttccacgcgtggatgcaggtggcgcaggcgacggtcgttgacggtgatggcaaacggcgtccatcccatctcttcctcatcctttcaaccaaacaaaaaattggaattatcccatcctacaaaccaaacatgtgagtggaatcatcccaactccaaaatcagggatggtttcatcccatcccacttagtcccgaaaccaaacatatgctaagaaaatttttatcataagacacattttttttcgttgacattaatcagatcaaaattaaattactagttttctggcatttacgatagaacgctgcgaaatcacgtcactgccaacgggacaaatggggcgtgcgtgtccttgaatgttgcaatttgcaaatcaattttgacgcacttgataagcatatgtgtgagacgtgcacgcagcacgccgtaggtggcgcatgtggcatacgtgtttgcatgtccttttacatgtttaagaaacagtttcaacgtcattaatctacggaagcgtcctgtaggtggtcagaaataaaccgaaaaactataaggaataataattgaacattttttttcgtttatttagttttctttcttaagtgctcccttcgtttataattaatactataaaacacttaactttttttaacgaataagatgttaaatatttttaacgtagtttctttttaagtattgacttttaataatttttaataaattatttttattttctagtaaaccgttttgatttattacagaatatgagcaatcgatgatgatgacctaaattttagtcaagcctaaaatttaattaaagaaaaaaaattaaagtgtatagtactccacgctgtgttcggagtctagtgatgggagcgcgtgattaattaagtattagctatttttttaagcaaatttgattttttaagcaaatttgattagctattttaaaaaaatagattaatttgattttttaagcaactttcgtatagaaactttttgcaaaaaacgtatcgtttagtagtttgaaaagcgtgcgtgtggaaaacgagggagatgggctgggaacatagggatgcaaacacagcctatgaaatggaggagagagtactcaagggaaaaaaaaactagataaactcaggttgtagacttgtcgtacttcaccttggccgttcccaacttccatcttttacttccatccccttccctctgcactgcagcaacgcctgcgtggtttttctttgttttttccaacagaaattaatccggcttatatttttctcctgtgaataaaaaaaaaaccagaatctcgaagaaccgaagaaaaccaaaccgaaccgaagagtgcgtgagccattacgtcgtctacctcgcgccgctcacctctcgccgtcgtcgaagccacacgcgcgccacaatttcttttaatcctcggtgagacgagagcacgagacccatccccatcgatcccacatccacggcgctgacttctccagctccactccacgtctcccagcacgaggggaggagaagaatcaaatcaaatcaatcagtcgcaatcgaggggaatcccacaattctggacaatccgagaccctcccgctccgctggattccccgcctccccttcttggattgggctcagctgggatgattggattgccggtcgcggtttgagctgaggagattcttgcagtcgagggggggagggatggaggtgagcaaggaggagttcttgaggcagttcggtggcgactatggctacccgggcgcgcccaagggcgtcgacgagatgcgcgccgccgagttcaagcggcttgaaggtgcgcctaatctcgaccttgtcgattccctttttgccaaattctgggaggaaaaatggaattctattagtgttttgtgagaacaaaaggatggataggaacttgtggcgttcggtcagatgaccgcgtttcttgctgtaactcactgttgtatcgataaatctattaggtttgttgttgcggagagtgaagaatctagcatcctaccgaattttgctacataagcttcaacaattgtgcttgttttgatgtttggaactgcagtagtgtgagctgcaaactatgtaataagaattggctatagcttctatgaagcaaatccgggttgatttccattatatataaaaaaacaaatgtgcttgtatttgtagcaggtttctagatttttaattttctttctttcttgatcttgaggagcagggatggcttacctggaccatgccggtgcgacgctgtattcagaggcgcagatggcggatgtcttgaaagaccttgcatccaatgtatatgggaacccacgtatccttagactttgagacagtgttctggacacttcattgttgttaccttggtagaacattgcactgcagattcttggggatgtgttctttgacatgcttattagatagtcagagtgattcaagcatggctgcgagtgacctcgttactgctgcacgccatcaggtattgtgtgctagttttccagaacagttacttcgggagaatagtgaatttaggctgcctcatggcaatagtatttaagctctatcagtctatgccaatgctcagcattggcacattgcatgatgagtcatcctgcatccattttttttccattttacgccctagttattgctactttcttatctactactacgtacaatgatttgtgccccaggaagttgcatgaattgttttgattccaaggtactacaacagggtgcctgcacagctacatctttactatatccagttatgcgcatggtacaagttttgccatctgctaatttctttgtagtgatgttgacctgtttttcacaggttttaaaatacttcaatgcatctcccagagaatacaagtgcatatttacctctggggcaacagcagctctgaaacttgttggtgaatgttttccatggagtagagaaagctgttacatgtacacgatggagaatcacaatagtgtgcttgggataagagagtatcctaccacaaaacgtttctcagatcattataactctattatctgactagtcaaagcatacagaactatgcacatacatgcaaaactagtgggatatacagctggtttatgtacatagcttgatatcttgataccttcatcagtatgctcggtaatgtgttctgcattcaaacatgaggcaatgaatttctcctgggcagtttctcaaaattccatttattcctgtcagtctatgtgtaggatcatgaaattcacattggcacatagtatcttgtaaattttgtcttcccttagcaaatttctagatatgctctgagtaaaggagctactgtgttggccgttgatgttgaggagggtgctgatctggcaaaagacaatggaagttatagtttgtataagatttcaagacgcacaaaccaaagaagaagcaaagatgtgctttcacacaattgtcagaacggaagtctttcagatatttcaggtcagtcccttatgatttttatttttgtcctttacaattgctgaataacatattcttgatcaggttcaattattgatcaatattgtagaatttacacagagaatttgattgtcttatttccaatctgttaatgatgttttcagttttctctagctttcttttattctttatgagggagttaactgggaacacatttatcattcctggatttttccttaagaagtttgtttatttggtttattggtttgacatggtcatattgtatgaccatgcaatgtggaatgaacatggataactagaaatattgatagcaaaacttttggtttgctctcatttggaagattaattccagtgcgatgcttaatatttatgctcactccccattcatttcttctgtagggaacaattggaatatatttgcattcccgtcagaatgcaatttttcaggacaaaagttcagtctgagcttggttaagctcatcaaggaaggaaaaatcccattgcagcagcagtaagatgcattgaatttgtcttgcaggatcattgccttgttttccttggactctagtgtctttagcatgcttattaaatgcattaatataggggtaaatggatggttctgatagatgctgcaaaaggatgtgccactgaaccaccgaatttaactgtgtatcctgctgattttgttgtatgttccttctacaaggtaatccacatgcacctgttgtgttttgaaatgcttggtcctacagaagtcaccaattgatatcgatatctttggcaaacctgcagatatttggctatccaactggccttggtgctctaattgtaaaaaatggtatgcaactagcaattatcacttaacttagcatgatagttttttttttctttttacacatattataatctaagctacattggataggataagataaattaactaacaacagcaatctgtaaatcgttgccatcattattctttgcaagggaatgataacctttctaatgaccttttctatattttccattttatggcagaggctgctaatctgttgaacaagacatattttagtggaggtttgtggtcacagctcgttatacttggttttgagtaatctattttctatatcctggtttttaacttacctccggaattgttattaaattccaggaaccgtagctgcttcaattgctgacatcgactttgttcaaaaaagaaagaatatcgaacaggttctagaggatggaacaatctcgttcttgaacatagcttctctccgacatgggtttaagatcattgaaatgctcactacctctgcaattgaacggtacgtaagacagtttgggtcctagcaccctatccatgatgtatagtttacaccctgatgttcttttgtaggcatactacatcccttgctacttatgtgagaaacaaaatgctggacctgaagcacagtaatgagataaatgtttgcacaatatatggacaacagtattccaaggttccataactaagttatatctcattatatttctatcttcttattaagaattactgctgctttatttacttttcttccattggtttggattatttgtcatccatataagaacaagccattatgaataagatattctgaagtgcccacttgaattctgctagctctctgcacttatctattcttttctatgtattatgttttaggtggaaggtctgaaaatgggccctacaatcacattcaatttgaaaagagaagatggctcttggtttggataccgtgaggtggagaagcttgcttccttgtttggaatacatttgcgtgtaagagcacaaaaaatcatccttcccctttcctaagtctctgttttaacatctctattggggcatcttcatgtggtgaaattttacccacgcattacatgataaattagagctatgaaaatcaaggttctaaaatatgagaatccaattacgtttttatgaatgacaatatttctttatgagttccatccatagttaatgcaacagcagcacttgtagatttatgaacaagcagctacatgtgctgtgcaagtcctgtgacaggtgatggattatgcattgtggcgattagcttgtacagatcaatgtatatcttatctcaatcatatatctttccacacaagaaaactgatcataacttctgcccaatcaactccagagtattcaattgctcagtctaatttttttgcctctattgttttccagactggctgcttctgtaaccctggcgcttgtgctaagtatcttggactgtcccattcagatttagtttctaattttgaggtactacacaacacaacaataagcataccattataccttcagatgtttcacgtcttaataaagcgaatgcactgtatacatatcaggctgggcatgtttgctgggatgataatgacataataaatggaaagccaactggtgctgtcaggatatcatttgggtacatgtccacatttgaagatgcagaggtgcgaaattagtccattttatttgttaagggcatatataaatttccatgcaaacttaactttaagtagctatcagctatcgctaatctcacctttccccccgtagaaattcctgaagttcctgcagtcctcttttgtatccctaccagtacaattcaacaacgggtacatgttgaatctgaacagtcttaacttaataggtaattgccttataatatgaagccagtgatgtatttctttttttatgcatgtaccagtaacattaatatatttttgtaagttgcagataattcgagtcaaaaggctgtttcagatattcacttaaaatccataattatttatcctgtgaaatcatgccaaggatttagtgtaaagagttggccactaaccactggtggtatgcctaaattctgcacctttgacttgttctttcatttgtaacttattttggttaccttatatgcatagttcataagttattatgtgttttgttttaggcctaatgtatgatagagaatggcttctccaagggtcaggaggtgaaattttgacacagaaaaaggtaaattagcgattcctattttgtgtatctgttaagccttatgagttatgagggcgcgacatgtatgcatttatatggtgtttttatactgacactgcaaatctgcaacctttcttttatttattagatgtcttattcccttagtaaaacatttaatatatggtgaaggataatctgtttaaaattgtggagccaatgtgtcctcaggttttccctttaatgaattgactatattctacaggtgccagagttgggctcaatccgcacattgatagacctggaacttgggaaactcttcatagagtctcccacacgcagggataaattgcaactctctcttcttgagagtttggctgatctaagtgaagaagtagatgtatttggtcagaggtatgattggataattggatgcatgttgagcaaccttacgaatcacccatttgagtatttgattgatccaccatcttttgttcttcgcaaacttcctttggcactcattgtactttgatcacaaaaatgtaaaccatataaaagtggtgggtggattcctacaacattgggcattatatttggtttgcattttatttggtagtattactctagaatggtcattaatgatcgcttcctgcaaaatgctttaggtatgaggtgcaaagttacgatgatagggtaaacacatggttcagtgaagctattggacgtccttgtaccttggtgagatgctcaagctccaagtaccgttcctgcacatatactggcttgagagatcgtccatgtagagatactcaaagcaaacttaattttgttaatgaaggacaactactactaatatcagaagaaagcatctctgacctcaatagtcggctaaattcaggtatccaacctccttcattttccgctcttttcatttttaccgcaaaaggtcctctactcaatcatagaactaattgaactttatcattccttgttggctatgatccaacatagtcagtatgcaatgtatagctgcacattcttttcttgggataaccttgttatgggaacttattctgtagttacatattttgcaggcaaaggggactgtaagcaaaagttgcctgttgatgcaatgagattccgtcccaaccttgttatctctgggtcgagtccatacagtgaggataactggaaaaaacttcgtatcggagaggcctgttttacggtatacattttataacccttaagatcccattgctacaagaccataatttggcttttttgcaattgctgagttactcatttcattcattctggatggcttatgtgcagtccatgggaggatgcaatcgctgtcagatgatcaatctacaccaggactccgggcaggtgctcaaatcaaaggaaccattggccactttagcgtcatacagacgaaaaaaggtaagttggcatgcaaaattttcatcagtggccaacctgcagttgttcttcagtcatgtgatccacattttatacgtgaccagggcaagattttgttcggcatcctattaaactatgaagacattatggaaggggaaaatgagaccattgcagggagatggctccaagtggggcaacaagtgtacccttccacagaatgacttgatgatgaagtagctgtggacatatcacttgagtacatatatggaattgcaagttgcatcagcagcgaccttggtgatgatgaagtgatgattgttacgtatacaaaacacgtcggcatacaaagcattttcgtaattttccaatacgcataagatgaaacaagtttagttaggtgaaaacagaatataccttcacatgtatcacatatatactatagttctcaaaatgcttttatataacacacaaggggctctaagcctaagccctagctcaaacaaaacgaaatgattgtgaagaaaaatgtacagacggaaatggttcatatttcagagttctcatgattacggtttctgtgcacaggttatcagtcatattagcaatcttggtacactattgaatactatttgaaaaccaggtgtggtatcaggacttaagaattacgcaaatgattacatattaagtggatatgacagtatctattaacaaggagaggtgagggcatgttgcatacacgatgaaatgccttaactagaaggtcagattgctctatgctatacgacgccatttgaatttgatcccttgtacctgaaggggaaatggctctagaaactagaggacagctaagtaaaaacacttacattgtcaacctaaaggtctagaagtagaagcagttaagaaatcatagcaggtatagcccataccatatgtacagagcatcacgtctcgtaacaacagggagcaagcaaaagcacagtggcaggtatatgatgatgatgcaagagaaaacgcagtactgtaagttgtgtttcagtccactttgtgcaatgacatgctggtccacatttgagagtgcacaacttcagagttcgatgatacgatttcatccacgtttgaactcaaatatcgccacaacactctttcttcaggctcaaactctttcctcaagatagagaagccttccagggacaagtttcctgtgttgaaacatatgatttcacaattagtaccatgtatgacaggttctgtaaaagatgggtagacaaatttcctactccatccgtttcacaatgtaagactttctaacattgcccacatacatatagatgttaatgaatctaaacacatacatatgtctagattcattaacatctaaatgaatatggacaatgctagaaagtcttatattgtaaaacggaggaagtataagttaccttgtagggggcacctcctcgtcagacaaaacctttatcaacctttcctcaaagggtgtggaatgccagctgacatgttgatcctaacaacagtaaaccatcagaagttcagaacaagtggtgaatttacatataagcccagcttaagaaaatcactagatgagtcagtgataatacctctccatattttctacttgtgtttggaatacagtggcaatcccgagccttggacaacctcggagtatgattgtccacatccacattatcctcagaagtcataaaggcatgtccctcttcgataagattgttctcatcgtacatttggttcgtgtttcctgcgggtgaagatttaagccagcgtgatagactgcacacctcaatattttcatctgaattggactttgatctctctccagcatccaatagcctttggcggtcgagctgatacttagacacctcaagagggaaatgtgaagaattgagtgattctcctttaaccactgaatctgaagagatctgctgtgtcatcttggcagaatctgaaagttgcatcttctgaagcttgttctctgttggtctaaagatgggatatgcgaattgtttgcgggtccgcacacgctttccagacgatcctttatgtgaagtataaacagttctgggggtctgcatatcatctctcaatactagaggagtatgaaagggtgaatcactggaaccatcgttgatgcttttgatgttctggaagggggagttgcctcggatagctgattgataaactgatttaactagtggaagatgttcagtatcttcagtgttaagttgaggcgtcaagatatgatcctccccatattcaaagctgcatagtatgaaaatgaagcatcaattaaatatctcaccatgataatatattaaaaaacttcagacactaatggaaattagggcagttcttaccctccagatgatttagattcaaatgctggagttgcttccactgccagtacatttgtgggaattttatcatgctacatatcagaagtgaaggtatcagagaatgaatattgataaacaaaatattcagaaatgctcttctcacctcaatgtaactttccatattgatttgataggatatgttatggagttcagctggtgtttcaaatagtgtgccacataacttgaggaaatttgcctgtgtagagttaaaaagtgcaatgaaaaattcaacttcacagtaaagtactagtagactatatgtataaagagtatatctcaacagctcagtactcaacaatttaccatcttaaacaaggtctaaacaaaaagggtactggataagagcgtgacttcgagagcaaaaggaaaaactgcagaagataaaaaaatatgtagataacacatgtacaccaatataatcaaaacaggagtagcatcactgagctttccaatcctatatatgatggaaattctggacaaaatcttatgcccaaagcatataacataaacatattatctgcaaatgcaatgctcataagcccataaaaacatttactgaactacagtacaaaaaataaaactcttttttacaggacagatcttactacagttcatttaaaaactgattcaaccatacaccgtaactccaagaaattccacaaccatccgattattgttataacataattgtgaggtgatgtggcctagttatagaacataaggtggtggctgtcaagaccatgaatccaaatctccattctccttccaaaaacagtagtccttgtgatttctctctattttctcaccaatataaaagatatatccagccagcaatactgagtgtttaagaacatgtctactaggacatatacaaggaacgggttcccaggtcatataattgccggttaggacatatatagctcctaattcactgatcactactaggtgcacgaccaaacaaatatggataaacgttctgcagaatcttgcaacaaactctctaggtgctcactctagtactttacaatagaaattagcttagcacttttcatggaacttatgcaatagttgttactgccagtaaatcgagtgaaggcacggtataaagctaattctatcagccaaacagtagaaaaacacaacaagggatcaaaaacacttgagatctagtttctggtaagctgaaggttgcacatacacaatcagactgtcaacctcaaactagaacgcgacactgacaatagccatccgaagaagtacataatcagacaatagattacatcgcacttgattacggggaaaagaaaaatcattcgagcatacctcggatcgaagctcctcatcgctgccacaatcatcagccaaatcctcatgagatcctcccctccctcccaatcctaaacaatgccacaaacacacagatggggacaacgtacgcgcttacccccacacgaaaccacacaacgaaatcgatcgaatcagacctagctcatcgtcgtccgagagcagctccccgagccgatccttgtgcgcgagcgaatcctgcatcggaaacgccagagaacaatcaccacctcaatccaaatcccctcccaaaaccaaacgatccaacacgaggtcccgcaacgaagcgggagggatatgtgtacgggaggctagggtttaggggggttcccttacgcggcggccggagccggggctgtcgtcgcggtcgcggtcgcgggggtgggggccgaagaaggagaggaagaagccgacgaggacggcgtcgaggaactccaccaccgccctcgcgatcgccgccgcgcaccggcacatcgtcgtcgcgtcgcggcccttcccgccgacgaggagagaggcggaggggaggaggcgaggagaggggatatggtttgaaatgggaagcgaagctgcgaagaggagggaagcattattattattattttattatttttttattattttggggaagcgagaaggatagttgatgggccaggccttcgcgacttcagcccaactattaatagtttgggcctcttctgttttagtcagatttgtcaacgcaccgggccgtagaaaaaaatatgtttgggcttcagccttgctgctctctctgcttctttctcttttttttttctgggaacatatatgctgtttggactttccagcagattgtaaaaaacaaaaaaaaaaagatttctgggttccttttctgtaaatagaagatcaatatctaaggaaactatttaaaaaatattttctcgatttatgtctctgtacacgtacttacctcctgaatattcctactaaaacatacctcataccacatatatatattgacgaacccaaaacataaattaccgaggatcctatatatactaattattcaattatcgactgatattactaattaatatggtataatttagttagaactgaacaatctactcgtgaattcgtgatcctatgacctcgcggaaagttgcatgtcactatatatgtacccatgtgtatataataattgtagacaaagggattcgaccattaagctcgctccatcggcgcagttagtgtcgggccctccacagagtcgcgatctccaacagtagcagcttggattattggagatcgatcgatcgatcagatcaccgcgtctatggacacaacacctgcatccatctctccgcggtcgagaaagtttccaagaaatgacttttcgcctcaatgattcccaacaaaatcgtctcgatcgtctccgcgacaaaagcatggccgccggcgactaaacgcgaggctctatgcacagtgcacacacatgctttgttgttggcaccgccacattgacatttgtggcgatcgatttgatgctgattcctcccttccgctgcatttacatgtgtagcacgcggttttcacccatggataatatcgacacgctatgacgtttgtacgtacgctaactgcctgcactgtttgatttccaaagtgattttgccgctgtgtggtaattaattcgtgtacggctttgcgctgattcattgaatctctcacacactgatcaatcactcaaggtctctacaactcaaccaaaattaacccgtgtcaaaatcatcgagctgtactagagaaaaaaatatatatatttcacattcctagcgcgttgcaaataatatgaaattttcatcgatatattttgtgctattattaattaggagggacacatgatagagttcaccaaccgacggaaacggcatgtttttcatgaaatatcaggttttgagttggctcaggctgataattccgctcggtaatttttttaaaaaaaatcatagtaaatcttttctaaatttcacaaattgttttcaacctttttcatgaaaatcgagaatctactaataaggtgtgattctcgatctagtaacgactctctacacaaccctacaaaggaaatatatttagggttagacgtgcatttaggtacaccatacatatagagagtcgttttagcttactttttaattgaattgaaaattataccatatggtcagatctagtgaggccaagagaatgaagatcagttccaatcgctatcacaaattaaaggtagaaaagaattggagcttggatgaattctacgcagctaattaagcagctagagcgccatgaatgcgcacacagttgacggagcttgcagagaactttccaaaccggagaaagaatttttccaacttcgaaaaggtacatgcaaattagacaaccaacaaagcatgcaatagtagccgcgatccctttcacatgccatggaactgatgaaaattggaggaagaattcgacagcaaagttaattagcttcggctgtacgtctggttgacttgctcatagcttgtccactcaatcaaatgttcaaattgggtttgacatttctgtacttgattgatcagtcgttttgaccaaggaatagcaaatggtgtagctgtaggtttgaagaaataactggcccagaggtgaatagtctctgaaaggattaattggactgttgctgttgttcagggaaactgtcttaacaggccgttgaaaatgtagcaagctgcttagctgcaggtaattaatttgccgtacgccctggttagcactgtgtacacacatttcacacatggttaattagcaaataagtttacataatgatattaggagataaacccagaaaatgaatggtactaattaatttgaatgccaactttaatttctggaaaaacatttaaaaaaaaggcatctatcgagtcacttaaacacttctggtcattctctatagcaaaacgtactaaaaatatctctgaattccagacaaaaaaattacatctagatctatcagggttcacataaattgatctatatctatcaacacgtaatcctctatactacatgggaaatgaagcttgttgttgttgctgttgctactaccactataggatctaataggtaatcctgggaccaccaaaaaaaaatcctatcccaatgtatatttacatatgtgaaatatatttttgcaaaaagaaaaaaacactgtcttattaatatattatgatgcaatcaatttatatttctaaccttattatatttagggtattttaaaaaatatataagttggatcacccatataaaaattctagatacgccaactactattatgggagtgaacattatttgtttgctcacctaaaatagttgatttctctccatgtctagaataaatataagtcaaagttgaaaagttacattttggtttagaattggaaaaatcttacagatatgaaagaatatcgaaattgaatatatactagaaaaaaaactccaaagaaaattaatccaatcgatataccaataattaatttaatattacttctagtcaatgtagtgtgcatttctaaaataaaaaatagccgcgcctagtttttgtaacaaaccaagtaccaaaatattacacgagtgcaaaagcaccttattcacacgtacggcatatgtacacgtgtatcacacgatcgattgaaaaccgaatgtgattaatcaagcatcattttaagtttttaacgcatgcacgcacacggaaaatatgcacactgcatgcgtaatacggcgccgaataagcttaaacttaattggagtttagctaagcttaattggagtagtcatcgttcgtgcaagatgccggtacggcactacgacctttttggcttagctatagactatagtctctaggtagctagctgccacttttgccttttagaccctgcaattgcacgcttgcactattccctatagtttatccgtactcgtaaaataagtcgtttaaaataatatttaagttaaatcttaaaaatataaattataaataattctcaagttgttaagtttgaaaatgtaaaaattatatgaatagatttgtcttgaaaactattttttaaaagtatacatatatcactttttaataaatatttttataaaaataagaagttaaagttatgttttggagaccgtatcgctgtccaaaacgattttatttacgtgtacagagggaatacatttttcctttcgatttggcagctaggataaaagtcacacgggttggtgagatcaatttgacaaatatactgcaaatatattgccacacgtgcacgtgcaaatcgaaaagtttgtgagcaaaatataattaacccgatcaaatgcaagttacgtgtttgcacgagcaactagttaacttgatgattagatttagaatctagattagtctaatgagttcagtgcaagtgtgttactggtttctgttagtagattaatttaattagatggactagtaagggcattcacaatgtagatgaaaactagtctatagaaaataaaaaattccattcagctatcttaacacattgtgcaactagtctgtagcaaagaaataacaagcttcagctccggctgattttttttcctttagtgggacccaccttaattacacacattgtggtggtttctaaaactatggactcccatgtgtgggtaccacatctatggactagtttgccaaatacattggtgttgccctaattgaaagaggaaaaaggtagtacaagggcatatataaatatatgatgtctaatcatcggtggatcgatcgatcgcccgtcgaattgatcatgcagctcgagagaattgcggtacacgtttagactttggggacttgtagaaattaaagcgcatgacagccgaaaagctagcaaacagctagcggccattgtcacactaaaaccatgtgaggttaattaatttattagttatatgcactcctcgcatctcatcttataagtcgtttgatttttctattagtaaaattattttaaattcgatcaaaattttatagaaaatatagtattattttaaaaaacatattattaaaatataataatattagatttaataaaactaattaaatattttaggtgattctaaatttttctataaatttagataaacttaataaagttaacgaagggagtatagtacaagcatgacaagctaactagctagttagggcacgtatagtctacagactgccctgatactggttaagttatctgattaacatatttatataacattctacctactttctttgtcttaattggatagattaacttatctagtactattgttagtccattcacttacgtcttttgggcattgggtttatgatgtagctatatggattaattaatattagatctcttctgaaaggaattaatattaattctcatgtgaccatatggtcctgtttgaaaatatgacataatatatacatatatatagagatatatagagcagtggcggagctaggaaattttttaagcccgggcaaactcaaatatatctagtatttgttacaatatttttaactttaataatttcaaaataataaaaattcaatggtgtatttgccggcgagcccgggcggctgcccgtgtgcaacccgggcggtggctccgcccctgagagagagagagagatcaagagagcatttgctgagtattatctgtcacctattaattacccctggaagcacgctttagaatgtaatgctgaacttaatttataggatttttgtaataattagtattcagttcaattcccatatacccccccccaaaaaaaaatccactagacacgcacacgtttaaaaggggtgcacttagtaagtacttcatatggatatgggtaatgctagaaagccttaaaaaataaaacgggggagtatctttaatatgtggtgtgcatatatgtacgtggtttttaaaaaatgaaaataattaattacgatcaataattcttaaattaatggaccaacactcaagtggtacatattgaattgggagtgcaggtctttgaagcgattgtatatatcattttgatataataatcgtgtgaaatgtaaagctttcctttattaaaaaaaagggtacatatccgagtttagcctttttcagctcatgcatatatgcaactttgaaggggtatacgtcatacactacttatttggagaaactttaattttgcgacgtgtgatgagcgtgctaatttaagtttgcgtgcatttaggctcaggaaaggtggaacgttggaattgaagtctctccttttaattagctaggctaggggtgtgtatctatcaatcagaaaaatagatttgggtgaagtaaacgtaactcaactagttaggtttcttgtgacgtaaccaatccacttggatgctcgtatttacggctaactatttttttcagtggtaggcgatgtatcactcgataacgagacgtttgtagtgacttcgtcaatctctagatatgctgacccattattctttcagtactagacgacatacatgtcaacagcgagaccgagacgtccgtggtgacttcgttaatctcaagatatatcagcccagtctttcggaggtgctcataggggtagggtgcgagtgtatgtatttataggggtgagtgtgcgcgtgttatgggtgcctgcatttgtattgtgtttctaaataaaagaaatgaattaattaggatgcatgcattgtttttactctccgtcaactgcatgtaaataactcaaagaaaatattattttagagtggtctcaattagtagtaatctactatcagtataaacaattactcagtttttgatagttaaaaaattaagatacttagttctactactactactactatttgaggtacaaatattaatacatatgtactcctgttaatagagaccatatatactactactactatttgaggtacaaatattaatacatatatactcctgttaatagacaccatagtaaaatagctatgaaagagaatatggtacatatactggcagtgtcatgtcatatcatcactggcccgggcacacagtgatttaattgttttatttcagataatgaatgggacaaactattttctaattataatgtatatatgccatatctttttcgtggagggggatttaccacgtctcgagatatatgctttcatgtgtgtgactatgttcgtgtgtgtgtgtatatagaatgaagaatttgtcttagtgtagagaacacggcaggcatgcagtagcatatatagatgagccctaagtccatacgattttaagaggtcggcaccgtcttaaattagcatgagggcgacttaatagtataggcatctactagcttcaattcatctataaccaacctaatagctcattcatacaatagttacatactacactattaatatctggtccacttatcatacacatcgtgtgtcttgaaatccgtactacagctggctacaaatctgtagctcgctgctcttctctttccttatttatcttcttaaaatatatttgcagctagcttatagcctgctactgtacctgttctaatggagatatcaattaaaacatctagcttataattaagccttgacttacgattccctagctccttcatcctggctccctggaatatatattctcatggcattatttccgttgttccatatgcatgggctgccaagcctttgaatttttagtatagcaagatagctataacttaacctagctagcttaattttgattagctatagctaatctctatagggaaagaagaaaaacaaaaaggaggagaagaagagtactacacgtgcatatgtgtttctgcgtttttgccaaatgtacattttggtttagtcgcgcacgaatgcttttataagtaacgtaattactccctccatttcacaatgtaggtcattctatcatttctcacattcgtattgatatcaatgaatctagatatatatatatatctagattcattaacatcaatatgaatgtggaaaatgctagaatgatttacattgtgaaacggaggaagtactttttcaatagaaatgtattcaatagaaatgcatctgtcttctaacaaccaacgtctcggtcttgcttgcttttgagagtggtcctgctagctgatcatatagttttcttggaacagtttatagatttaaaagctgaataatctgatcttgcgtacgaatgctactacgtacatgcatgtgcatggaaattcaaactgtcattgctaacgcgacaagtgtacatgcaatatagtactacatgtcgaccatttcggcaacaaattcagtggcgaagcttctcacggcatgcgtggtttaatatattgtccatcgatcaacgtcgaatgtaaagggccaacaccaaacacgcatgatggctagcttccttttcgatcttttcctgattgttgtggggatagatgaattcttatataaattctctccgtctcaaaatataataagggattttggttgaatatgacacatctaggatcatgaatctattcacccaaaattttttatattttaggacgaagggagtatatgtgtatctaagtatgttatcatatatatatatatatatatatatatatatatatagtaaatttgtttggtgctccatggtgcccgggcaccattgttgaaattgagtatatacccaattcaaatgagcatgaaactttttcaattatttaggtattaatattaactactttactaactagttgaaagcaagtttgaactgattttgaacttgtttttgttagattttgattctaggtatatagcatccatacatataattagttaggtatgtaatcatggattgtgaaataaagttaaatttgagttgtttggttgataggtataggtatgaatcgaattcttataactaggtatatactcacaatttgaaaattttgaaaaatttaagtgattttgtgcatttgaaaccatagtgcccgggcaccatggtgccccatatgagtaaataaaataaaataaaatatactcattttcctttgcagttttagtgcaattctctggaaagccacataacatgaagagtttatagtcaaatcagtgtgctaatatttctttttttatcgtaacggaaatattgtgttttgcaatgcttcaagtcaaacttagaatgatctttaaacgtaaacatgttttaattatttatatttttaaggcatgaaaataacctttgggccccttataatgggaaaatttaagtatttaacgttgcagttatttgtgtatgaaagtttattagaaaataaattaatccgctggtgaaagtatttttcttaaaaaaaattatatacatactccctctgttccatattattagtcattttgattatttaataaatttatttaggttgatcaagtttatagaaaatattggtattttcaacgcaaaacacaaatatattatcaaatacatatatattcaatctaaatttaacgagattaaattaacagtgttgttatttttttataaacttagttaaacctataaaagtcgaaaaaagaatcaaaataacttataatataatatgtaacgtagggagtagtttacaaatcaagtactcctgcaaattcaaacatcaaagctggatttgtcgcctttcgtctgcatgcttggaccatctgatttaatcggtgagtgctttgctatgcctgttcttttttttatcattccttgaacaccaaaggggccacatttattaattagctaatttgcttcctgataagtttaattactttgtacgtacttaattatgaaccatgttttggggaatatatatcaaaaaaatggaaggaattaatagtataaggtctcattcttttctccaacaagagttggatgaatattaagattttcatggcatgcttttcaaactgctaaattgtgcatttcgtacgaaaactttctatatgaaagttgctctaaaatattatattaatctatttttcaagtttgtaataattaaaactcaatcaatcatacgttaataccacctcgttttgcgtaaaaagcttaatcttcatcttcaggagaaaagaacaccacctaaataaataattgatctgtagttaaatatatacctcctcttcttcatgtgtatctttggttttatgaaacctctgatatagttctgaaatattttccttgagatggtaaagtatggaaattatattaatgttaatacttccatatacacaaacttcaccccttttcaaccttgctggcattcatgtatgatgcacgtacgagtgggtttgatcttgaaaattttctgaatagatattttttactgtcgtctctatatatgcctatatctattgttcttctggctcatttctttggtaagtttctacgcaatttccagcacacaggtaattaaagagatggagttagatgtatagtacgtattagatattccacattcaaaaaaaaatgttgaaaagacaatttcaagattttgatgtgtagagaacttccattaatattttttcttatgcatatgatatgtacaacgaaaatttctagatgaaaaactttaatttctggaggaaactttcttgcaacttaactatatatacaatttgatacatgtctttcatctggattaaaaatgtccaagcttctagctagctgaaattaatggtacacgggagagaatttcaaaagaccgtgtctacgtccctatccatgaccaagttaaagtgaactactgaggatgcatccatgaaattggattggttgggataggatcgatatgttgatagagagatgcatctttttgtcacctttttttatatttttccctttaatttgcacatccgatccctggacacaagaatgtgatccaaaagtccacaattcatttcccatacgtaccgaatgcttggcttttgctcgtcctttcattttccccgtgatgtcactgttgtaatcttgataggtaattgcaaactactaccttgacttagaaagcattttatcacgcaaggtacctatgccagtgtcagagcgcaccaagcatctcatcatcaagctgttgaggaggaggaggacccagaagatgatcaaggaggcgacaaggcgaaggacgaagtacaggaggaaggtgggaagcaagaaggcgttgtcaagagaggcaggcgtatccggatggagaatagaaaatacaaaggggccgaatgggccgtgtaacaatcgttgtaaggcccaactgaggctggtggcaaaggagaggttggagaggaagaaacgcaactatataccagctggcacaagcttgtaagaactcgatgaggaactcggcaaggtggcgatggcggcggcggctccgctcggttgagcgtgagaagtaatctacctatctagttcgagttccacatttctcgtgttcttcctggagtgccaagtcgctagggttcctaacaaaatttggtatcagagctcaagcgatcctaacctcttggttcgaccgtagaattaccgatcaaggattgagactggttcttcggagctacgtctcgcgaaaaggcaactcgccttgccttgattgggttggttgaattcggagcgattgcgagttctgagccggattcatggcgcccgatgagaagttggacctactgttgaggaaaatggaagagaatgaaaagaagagagtagcagcagaggagagatcacgagcggatctggcacaattgaagtcggcgatggaggcaaggttacctcaagtggagaagagggtggatgacatagcttcggtggtgagtacattgagccaaaaggtcgaacagcttgagggcgcgctgcagaaatttggggatgatgaccagaagccggaggaggtgaaggaagagcatctagcaactcctaaagggaaatcatcgtttcagattcaaggtatgagagatccagcccttaactctgcaactactttccaatttgattctgttcaagccactgctgctggtagtttgggaagcagtttacccccaatgacatgtcctcagtttagtggagacaacccgcagatgtggagagcaaattgtgaggtttattttgatgtatatggggtcctgccgagcaattgggtgaaggtggcaactctgaattttgttggcaacgcagcattttggttgcaatctgtgaggaatcagctcattgggataacttggcatgacttgtgtgaaagagtttgtgctaggtttactagagatcggcaacagtccttaattagacagtggtttcatgtgaagcagttgaccacagttgcagattatgtggagaggtttgatagtataatgcatcagctcaatgcttatgaaagtgctgccccaccagattatttcgtcactaagttcatagatggattgaaagatgaagtgcgaacagttgtattagtacaacggcctcaagacctggatactgcttgttctgttgctctgttgcaggaagaagctatggaaggtcagaaatctggatcatatcgaaaaagtgagcatgtcagtaactacatcaaaccatcttacagaaatcaaactcaaattggggtgacaactcctattctacaaaaggtgaccagcaacagtgggggagatgatagaagaacagcagagttggctagatcccgagatgataagttggcagccctcaaagcttatagaaagtccaagggactctgttttatatgtggagaaaggtggggtagagaccataaatgcgccaatgctgttcagttacatgtggtacaggaactgatggaggctatgaattcagaaggtggagaagaacttgaagaagagcctcctgaagaagttgaggaagtacaattgctagccatttctaaacaggctatttcaggcacagaatctagcaagtctatcagactcaggggttggatacagggaacagaggtactcatgttgatagattcagggagcactcattccttcattgaagagcaagtgggaaatagactgtctggggtggagttacttaaacaaccacttaaggtgcagatagcagatggtggtcaacttacttgtaccaggttcatacctgactgtacttggtggatgcagggacacagcttcaagagtaattttacactaattcctttgggaagttatgatattattttgggaatggattggttggtacagcatagtccaatgcacattaattggtgccaaaagtggatagaatttcagtataacaacagtctggtcagattgctaggactttcttccaaaccaactcagttcatggaaatatctggggaacaattgttgggaatggctaagaatggtgctattatgtacatggttcagttgacaagagtaccaccagagcagcaacaagacattcctggatctgtacaatccttgctccaggaacatcaggatgtatttgctgaaccaaaagggctacctcctagaagaacttgtgatcacaagatacccctgattgaaggtgctcagccagttaacttgagaccatacagatacaaccctgagcttaaaaatgaaatagagaaacaagttgctgaaatgctacagtcaggagtgatccagcatagccaaagtgcttggtcatcaccagcactgcttgtgagaaagaaggatggcacttggaggatgtgtgtcgactataggcatctaaacaatctgaccatcaaaagtaaataccctgtaccaatcatagaggaattacttgatgaattgtctggctccaagtggtttactaagttggatttgagggctgggtatcatcagattagaatggtacctggagaagaacacaaaacagcttttcaaacacattctggtcactttgagtacaaggtgatgtcctttggattaacgggagctccagccacatttcaaggagctatgaatcagactctatcttctgttcttagaaaatgtgctttggtcttctttgatgacatattagtctatagcccagacctgccatctcatttatctcatcttaaacaagtgttgcaattattgaggcaagatcattggcaagttaaattcagtaaatgctcatttgcacagcagcaggtgtcctatttaggacatgtcattggagttaatggggttgctactgaaccaaagaaaatacaggatgtgttgaattgggctactcctgtttctgttaaaaagctcagagggttcttgggactggcagggtattatcgaaagtttgtcaaaaattttggaattatcagtaaacccttaactcagctgttaaggaagggagtaccttttaaatggagtgcagaggcaaaagatgcattccaacgtcttaaacatgccttgacatcggcaccagtgcttgggttacctgatttttccaagattttttatgtggagactgatgctagtgaagcaggcataggagcagtgttgtcacaagaaggccaccctattgcgtatctaagcaaggctttggggccaagatctcggggtctgtcaacatatgagaaagaatgcatggctatactgttggcagtggaccactggagggcatatttgcagcatcaagagtttgtcatcatcaccgatcaccacagtctggttcacctagctgatcagcgtcttcacactctttggcaacagagggcttttaccaagctattggggctgcaatataagattatttatagaaagggaagcagtaatgctgtggcagatgccttatccaggaaggattgccctaatgacgctcaagtgttagctatctctgtgtgtacaccaaagtggatgcaggaaataaccaagggatatgagctggatccccattcgtctcagctactcattgaattgttagtggactctgctgccagggaacatttcacattgcaaagtggtctcattcgttataaggggcgcatctgggtgggtaataatgaggatttgcaagcaaaactgatttcagaattacataacaaccctatagggggtcattcagggtttcctgttacatataggaggattaaaaggttatttgcatggatgggtatgaaaaaacaagttaagaaacagctgcagcaatgtcaggtgtgtatacaggctaagccagaaagggttaaataccctggtttactccaacccctaccagtgcctgcaggtgcctggcagacaatttctatggactttattgaaggtcttccaaaatctgaaaggtacaattgtatttttgtggtagtggacaagttttccaaatatgctcactttgttcctttgacacatcccttcactgctgaatcagttgctaccgctttcatgaaaaacatttacaaattacatggtatgccaaaagtgattgtttcagatagagataaaatttttacaagtcaattttgggagtacttattcactaaatctggtactgaattacatatgagttcttcttatcatccccaaactgatgggcaaacagagagagtcaatcagtgcctagaattgtttctgagatgttttgttcattccacaccacataagtgggcagcctggttgcacttagcagaattctggtacaacaatgcttttcactcagctgttcagaaaactccttttgaagtcatttatggttatcaacctgctcattttggaatttctatggaggattgtgctgttccagatctgcaggagtggctcagggatcgaaaatttatgcaccaattgattcaacagcatttgcacagagcccagcaacaaatgaagttttatgcagacaaaaacagaactttcagggagtttcagcctggtgattgggtgtacttgaaacttcaaccttatgttcagacttcggtggcccgtagagctaatcacaagctatcgtttaagtactatggtccatttgaagtgcttcacaaagttggccaagttgcttataagttgttgctgcccagtgattgttatatccatcctgttgtccatgtttcccaactgcgagctgccactgggttcaagcctccagtacaacacagtttaccatccagtgctggagctatgcaatttccacttcaaatcttggatcacagaattgccaagaaaggtaatacaattgtaactcaaatattaacacattggtcaggttcttcggtggaggatgcaacctgggaggacaaggaggagctgaggagccgcttcccacacgcaccggcttgggggcaagccggttcccaaggaagggaggatgtcagagcgcaccaagcatctcatcatcaagctgttgaggaggaggaggacccagaagatgatcaaggaggcgacaaggcgaaggacgaagtacaggaggaaggtgggaagcaagaaggcgttgtcaagagaggcaggcgtatccggatggagaatagaaaatacaaaggggccgaatgggccgtgtaacaatcgttgtaaggcccaactgaggctggtggcgaaggagaggttggagaggaagaaacgcaactatataccagctggcacaagcttgtaagaactcgatgaggaactcggcaaggtggcgatggcggcggcggctccgctcggttgagcgtgagaagtaatctacctatctagttcgagttccacatttctcgtgttcttcctggagtgccaagtcgctagggttcctaacagccagccacagaattcttcttctgtaccctgaccaaacacgcatttatcaatttatcaccagcgacatgtgcatatccaagaggagaaattttgagcatctctttgaagatttcaaataaataattcacgcaatgtgatttaatctgttgccaaagtcgtcatatatatcaagctaagaaggaacttaaattctctggctatattaataaacggtcgagaaaattctttacctagcttgctatatagatacttccctagccatatctctcttcctaatttctaatgcaaggtacatataatatatgaagctatcaatttgaactcaatcactagctaacaagtgactagctaggaatggaatttttaaggaatatatataaatatgctcaagccgatctttaagttcatgctttcacatatgcttttgatcacatgctgccggtgctagctagttatatatactgtcgtcagacataagtcatgatattgagatatatattcatatatatgcagctaattaataagtcgatcgctgcatatccctttcccattttattggggaaaatccagagaagagagagttgaattgacctcaaatatataatttacttttgcatgaagtctacctttgtgaattcaaaccaatatatatacaattaacccgtacatatcaagttgaaaacgtacgtagacacactagtacattagtactagtatagtatatcttgaataattttgtcaaacacatactagccagacaaataagatggctaattaatgttcccgttgaacaatgtaataattcaaagaaatatcaatatctcattttcagtttgtcaaagagagaactattcacactagcaatagtcattgtatgcagacccagacaaacctatcaatgaacagtacatgtcgatcccaatgggaaatgcatgagctacttgaactcatacttcgctgtctcgtgaacagggacagcccccaaactcttcacaaaactggggttcctatacttattttaaaactttttttttcttatctgtgttcagtaaagtagcaagtgagcatgaatgtttgaccggacttggtcagaaaattcagccttctctctcgatctctctcctctccacacattcgatttggtacgtttctgcacggtaggcaacaaacaagtacttgaatatatatatacttcttgggggtgttctccttcttcttcttcatatatcatcatcaccatctttatctccctctctctctctccctctctgcatatatatagctacttcgatctctttgtagcaaccatcagttagctagctagcttgaggtagctagcgcttgtatttatcagaagcttagagataattttcagaagcttagagagctatcttagctacaaggaattaccggccaatcgacggcgagatcgatcgattgatcatgggagggtttgagaggagaggagttcggcagtacaaccggtccgaggtgccacggatgcggtggacggaggagatgcaccggcagttcgtcgaggccgtcgagtgcctcggcggccaggacggtgagtttgaaacaccaaccatggatatgcatgtttggtattgatcaattcaagctatatgagcagattgatcatgcaattgcttaattattgcatggacatggagttcgctttgatgatcaaattaattgggattttaatttgctaggtatagatcgagctatcatgtttttcaagggaactgattaaacgaagtgctttcttgttctttttgttttttggtttagaaagtttggtctccttaattattagttggtgtcggttaggcaggagtttgaaaacgaacacagcgtagcaggagtatagttaaagaaaaataaagacacgtgatattatatgtgcatatgcacgatgaacacccacggcccgttctcttttggattttctacggataattaagactgaattaagcatacaatttaataagagttaattagttagatggaatatcattagcacaataatttatcaattggagccactttcatcctcgactagctagatatatatctttttccaaaattaaattaatatatgttcttcttgacgattttttatttttagttttcatctgaaagtaatttagatcaagtactttagatatttttacactctttttctacctttaatcgtgcatatatttgtaccttgagtactaacagccattttcgtatgtactcagcctgaagtactgatcagttattatcatttgcaaactaaaatatttcaaaagtttcaagtactatctcatttgaacattaccgtaattaattattgtgtgctttatccagcacggtccggccatacgaagctgaacgtactatcgattttctctatccttgagggagacataatataatttttggtctcatgatacatgcatggaccatggaataacagtactgcatcatgatgatatttgtttgtagatcattcttcagaagtgctgataatttatctcctctcgcttttgtctgacagaagcaacaccgaagcgaattcttcagttgatgggcgtgaagggagttagcatctctcatatcaagagccatcttcaggtaattttgtagacccaggacttaccttttcagatttgtatgctaataatatacatgcatatgtatatatgcagcatatgctctttagatttgtatgctaatattagctagagatttgatccgtggctcaacctcttttttctctctcttaaataatggtcagatgtacagatcaggctctagcaacagcaatcatcctgtcagcctccagaagttgacatcagctactgttaacaacattagcaaacgtgagtttgtgaatagtgaagatcgctgcatttacgcgtcaggggatagaaacactgcatcttcagacaagaatacttacaccatactccgctgcggccgctcatcaatgtgagtgtgagagagagttaattagtcatttttcaattaatgttaattccaagtacatatgtgtgttatgaatttttcattttattcaatatattgatttttatacccacttgcaggccatcaatagaagaaatattcagaaactgggaacaaaccagagggcgtcttcttccatggaactccaacgtgattacaacagaacaggtgcctttcccctcactggaagctacgcctcaaataatatcacttaattgcatatatataatttgcattttcgttggacatctgtctgaatttttagcatgtatacatcttggtgtatatcctgtattccattcatgtagagagataggaaaaagctatggacaaatgcagacgtattttacttaaagaatccatcttccatatatgtagtattccctagaagtttttgttttggaaacatgcattaggtggcaggctgccaaactagcaaaccatactgccgtgtattgactgttcattcctgcttctgcatgcatggtcgaaaccatgaactatctagactatctctgaaacacttaattacaaatttaaaatccatatatacatttttcagcaagcttattaacactgaaacgtagattaattaacatatgtatatatctttgcaggcaacgactagagcaagtcgtcagactactaactacagtaagcctctgaagcagctgacagactgcgacctgacgctgtcgatcgggcagctgtgggacgacgccgccggcagcgacgccgacggctccagcacgatcagcgaggaggtcgccgcgccgtcgagggacgaagcgttcgtctcttcggccgatgaccacttcgccgccgccgccgcgaagaaggagagcaatatgctgaccactgatctgaacctggacctgaccatttcatcttcttggctgtcctgatcatatgatcattcagttgatgggcctgtgtatagctgcattatatttgtgcatatatgtagtagtatgtgtacaaaaataacgcggagagagagagcgtcaggctagtagtatttgcaggttacctgatgagatgatcttagagagtgtagtaatattctggagatttctttaggattattttcttatggtcagacacagcattttattaggtttttcagtagcgcatgcacgcgtttatctgtatagttttctttctattattaattgttcgttcgattagagaccggggacttcagacgaagacgggtgagaaattttgacagtttttgcttctcttgggtagacttctctgttgaatttctcacctttcatcatctgggcagttcccctatttctgatcgaattgtttgcgcaccactatctatactgattgagaactactccctcaattccaaaatataagggattttgatcggatatgacacatccgattcgtagtactaggatattttacatccagcaaaagtctcttatatttgggaacggagggagtaatggcgttacttgctagccattttacccttggctttcatagtgtcaatctggatttgtagctagctgctcttcgtcccaaaataaatcaacctcgtacggaatgtgacacatcctagtacgatgaatctggacatgtctcgtacgaagttggtttattttggtagagatagctatgtatcttggtattcgcaattttttttcctatagaacatgtcatcagttctcttctccagagtacttcctccgtttcacaatgtaagtcattctagcattttccacatttatattgatgttaataaatctaaacagatagatacatatgtctagattcattaacatcaatatgtatctatctgtctagattcattaacatcaatatgaatgtgggaaatgctagaatgacttatattgtgaaacgaagggagtactatatattgttctgcatgcagtatacttcaaacttcaccatatatctcaacgggacatttagtgcaaattatggatacagcaatcatcagttcagatccaaattttgaattcaaaagccggtcattatcgatgtttagggcaaaatggtcggaaacgatatcatttctctattaattttagattatggaatagtctcgatcgatacggtaatttttttccgtatttataaatttaactatttagtgatgacgacttcaatatgatgctgataaaaatataaaaaagaaaattttatatatagttagaaatgaaagtgatcggaaacaatattatttttaccgttcgatcgggaatttctataccattttcagcccaaactcccactgcgtacatcatatcatagtactactatgtttgtcatgggacatatagaactaaacactttgtctcttaattatatatatcatattacttcctctatttttttaatatatgacgctgttaatatttttatatatgtttgattattcgtattatttgaaaattttatgtaaatttaaaaacatgttagtcttttttaacatgttgaatgataaaacaatgcataaaaaaactaaaaacaaatgataattacatacttttgtaattaaataacagaaagttgaataaatggttttaaacagtttataggaaatgtttatgaaggacatttttttaaaataaatatagtatttggatgcttgggaagtgtactcgtgataatgggtcatctattagctaaaaaatatgtccttaaaaaaaatcttcgaggtggcttataataataataaaggccttttctactacggaatttgagaatttgccactcctaatttcaatcttgattttgcccttttcgatcagttgggagatttgaggatttaccacttctattgcaatctagagttttctatctatatgtgtctatgttatatagcatcaggaccatgcttaaggtgataagttgtgaagcgagtgtagctcttaacgcaagtacaaatctcaaattaacttcgtacgggtgctcatatttataacttttttttcaataataaataataaatccatcaacaacgagatgtatatgatggcttcatcaatctgaagatgtactgacccgatacggaagatgattatatagtactatgatatagtacgtgtatatgttgatagaaatgagtatgcacctaacatgcggatctgatcaacgcttgtgtctaaagtgtgtttggaaaaaaaaagaaagtattaaattttccattttttctgttgtgtcgacaaaatgcttatgcctccctattcgctggcaccatccatatgcttgacaattgacgcacgtcagcatacatcaatgggcagatgaaacggactgtaccagggtcagcccagaaaggccccccaaagcactatcaaacgggcctgatcgacactactgggctggcccgctacacggcccatttagccacctccagattccagttcgttcccgatccgtccacgcaacgcaaattcccacaaaagaaagcccagaagcagaaacaaatcgaacgctcatcttttttcgaagaaaaaagagaaaaaaaggaaaaaaaacctcgtcggcgatccgccgtgcgcctgccgccggcgggaggggaactccgccggagatgtcggttctcatagtgaccagcgtgggggacatcgaggtggacctccacaccgacatgtgccccctcaccaccaagaacttcctcaagctctgcaagtaagcttttagtttacccgcacctagggcttgttctatgtgtgaattttcgcgggatcatctggctactagaggtaacgagggtctcgtggcgggtgggttagccttcaggaagcagttgagcgggcaattttggcgttgtagagcgggtgctactgggtctggattcgatgtgaagggtgcgtgtagtgtagtgtgttggattgattgattacagttgaagctgctgccataccagtgtgtcgtgaatcattgtgaatgctcttgttcccatgttacttcgagtttcgattgcgtttaacttgttagtgtagtgctgttaagttgatagcatcttacaagtgctgttggtagcacttgtctgtggcgctcctcatatgacaatctgtattaaccatctctgtacatgtctcttggatattttcaacgttattcacccagtgtttgcatgatttttctttttgttgcaacatggcgacatgcttcatcagattttgctgtaggactttttttttcttgcaacggttttgatgcttctgcctgtcatgtatttgttgcggccgtagcccatagtaggaaattgtggcatttgtagtggaaaattgtttcagcggagtggacaaataaactggagcagacaattgtttcagctagaacatgccattgttgcgattgtagcgagaaatcgtttcagctgcaacaaggaaattgcttcaattcttcttttggaattgttgctacgtgagtagaatatcattgctagctaagccaccaatatttatatctaatcgttgatttgatttgtgagggatgttgatattgtggtagacattttattttctttatgattagtgataaatgaaagcagctgtggtacaatttagaagagccagaagttgacttccgaagcaaaagattacggcctccgtggagtccatgaattggttgatttaatggttgcttatatagtagcgaggatcacttatttcagaaacgtctgacaatagctctcggattgaacatccgagcactagttgttatcattagtatttggttctagggatgaggtgggatgaaacaggatggttctacatttttgggatgaggtggaatagaattgtttcgtttagttgtttggttgagaatgggatgattcaatattttgtttggtttaagcgagatgggatggaatggtccaatccagagtttggtttggagaatagaattagattttctttttagaaaatgggataaacccggcctctacatccaactggatttacgcagccaagaataagataggattgactcaggtaacctgcaccttagactggtgagaataaacctttttttttaaatttcccttatttccttttccccttcttaatttttctctctcccttatcatctgtaggaatgagctttcctggctacagcttcttccttgtcttcctctctcttcattattttgttcacatccaaaactatttgttctccagattcctgagtggtgctatggctagtgagtggaggaagcggagtggatgacgccactttgctgcacaagccggcgactctcatgagcgcgtcaaggcagtgatccactagcggcatcaatggtcgagtgcaagaaaccttttaacctcatggaggtggtagcccactgcttctcagcttgaggagagtggtggctgctcgcagtctcgcagatgggcggtgaacaaatccagcgagaagctctcccccgcactgctgaacattcttgcatgagttcatctgggcaaaagagtggtatcatctcatcctgaatcttgttggaatattcgtcaaaatgaaactacctcgtcctgaaatgtttcgtcccatcccaagaacagaacacatgggctcatcccaggaccataaccattcgttctatcccacttgatctcaggaaccaaacacatagaggattgttctttgattcttagtgtcgttgtctgaactaaaattatgtaaatatgtttgtctacttatcttgcaaaagttaaatactgcaaaatagcaggctatgaaatatgactgagttgactacttatggcaattggagtaatcattctctcgctgttcctatgattttacttaccaggatgaagtattataacgggtgcctgttccacaagatagagaaggatttcttggcacaaactggggactcaactggaacaggagctggaggcgactctgtatacaagtaatcaattaatatagcgcaataggagcctctccttctgtttcctgtaaaaaaataatcaattgctcagatgtctcactgccaccgattgtcaaatacatgcctgaaaacggattcattttttttcctgtagattcctttatggtgaccaagcacgattttttgatgatgagatccatccggagcttaggcattctaaaatgggaactattgctatggcaagtgctggtgaaaattgcaacgcctcgcaggtgtgatacttagtccctaaacttcctaccgaacccaaatgttttgattaccagtaattagtccattttgatgtcctcactgctgtttttagcctttcgtttatgtttgtgtgacttattagttctacatcaccttgcgggatggcgtggactacctcgatgataaacacactgtgagtagcaccttactattattacattgacttagagattttttttcttgaaaaaccctactttatctgcagtgactcacaagtatatcttcatcaattgtaggtgtttggcatggttgctgaaggctttgacacgattacaaagattaatgaaacatatgttgatgataaagggagaccatttaaggatatcaggtaaaatacctttgaaaagtactaaactgcatagttagaacatgcttgccaatatttacttactttctggtctttctgttgtttctgctttatttccattgctgaccttctgcaaaatacttaatgaacaggattagacatacatatgtcttggatgacccttttgatgatcctcctcagctcagtaaacttattcctgagaattctcctgtagggaaaccacaggatgaggtaatatgagttctgctattgtgctcatgttggaaagacaataatcaaaattgactaatcagaatcacaggctgtcttacatttgtttaattcgttttaccttccacattgttgaaaactttataacaatttatttgggcacatacctgtttaagagtatgtatggattttagttgaggcagccactgggtgtacatgtaatttattttccctgttctgtctgtaccaaattatgctaaaagttcctatgcaatgtcctgctaatgtactatgttatatattttcttttcaccgtcaatgtacagattgcagaagagcgcttagaggataactgggtccctccagatgaaacagtggctcctgaagaactcgaggatactatccgctccaaagaagcacatacaaatgctgttattcttcagagcgtaagtcctggtgccaaattaaaatccaaaactacgcttattaattattaatcatgttataacttgtgactcataaaacttgtcttattcagttaggagatattccagacgctgagatcaaaccacaagacaatgttttatttgttcgtgaactcaacaaagtaacacaagttagtatcggctcttaattgattaactctgttcgccagttccactaatttttttgcttatccatcctgctttggtagtagcactacgtacagattcttatgtatagacatttcattcatttaatgctcctgtgattatatcacagattattttggacatcataaatatcggattgatatcccatagcttatgaaatattttttggtaagagaagctaaagggctaatattcattgttttgtaggatgaagatttatatacaattttttctcattttggctctgtgacgtcgtaagtgccttttcctaagctcaaataatttgcttatcttcctgttgcttctcttgttaatttttttaattgttccttgcagagctgaaataattcgtgactataagactggtgatagcttatgctttgcttttattggtaagtttcattcctcaaaagctggggtgcattgacatacttcgatcaagcattggatttagacagagtcctgctatttttctggagtaccctgagcccagtttgttcatcgaatacttgcctgagctatatcactagatttcgtaggcattcatcatccagttattcagttgtgttgtacatcagcctcttagagctgttatcctaacagggctccaactgaattacctatgcaataactgttggtgtttattgaaaggcatatactttagttgcagcatgtaaacacaccttttattttgttactatatacccgtgcattgcaaatggtcccatactactgaaaatgggctaggggctaatatatggatctaacataaagtgagaatatatttttatccaacaactattccctttttttcccgtctttcttagcgatttctttttgtgtgtaacaatttttctctagtgattttttttatggttccaaaaaaagaaggtttctgctactgttgctagattttctaaaatagtttttttttgtgcggaacctttttctccagcaattttttttccatgagcgagggggagggggtgggaaggaggacaactgtgcttttatagtagtagagatagctagtaatatacccatgcattggaacgggtccgtactactgaaaatgggctagggactattaatatggatttaacataaagtgagaattttttttatctaacaacttttcctttattttttctttatttcttagcgatttattttctttttgtgcagaacaattttgctctagcgattttttttctggttcaaaaaattaaacgatttctactactgttgctagatttcctaattttttttgtgtggaacctttttttctagcgatttttttccatgagcaagggggagggggtgggaaggaggatgagtgtgcttttatagtagtagagataaactcgcaaatggataaaatacatgaattgtcaaagaagattaatggtgttttctcctaaaaaacaaacctaatgatttaagaaaacaaactgagtgactccattgtacacttctgaggtattaaaccatagaagttaactgatagctcaactgttctcagggttacaatgtcagtgcaacatatttggtgcagactcaagtagccagtagatggcctaagaaagaatctctcttgttccacctggattaattggcaagatcagaatgttgttacaaaatactaaaaattatcttggtcttttgtagaatttgagaaaaaggaggcatgtgagcgcgcattcttcatggttagttgcctaaattcctgtttccagtggcagataaaatttcttctcttatataattatactctataattccttctgccacctactccctccgttttatattataagactttctagcattacccacattcatatatagattcattaacatctatatgaatatgggtaatgctagaaagtcttataatatgaaacggaggaagtagcattctagcatattttttatatatttatttatgcttgactagtgaatgttacctagtttctgcattgacaattcagcagtctatgtttttgtaactatattagagtgttttcatgggagcatttgcttactcaatgatatgcttatagatggacaattgtttgattgatgatcgaagaatacgtgttgacttcagccaaagtgtttcaaaacagtggcgtcagttcagacaaagcaaaagtaatgcaaataaaggtaagataagtcatgtattcttatttccatggcttatcgttgcaattccagcttcttttttatttaagctaactgcaaaatcagtaggggaggtgctctactgttggttttttcctttaaggaaaagaactaaacaaatctattcctcatcaatattcttttcatctagacttactttggtggcactcaaatatgcatattctcatttcaaaccatagttgtagcattctgtgttcattagaaattcttgaatcctataaggaattttaccattttgtaccatggtgaagatgtcgagtcagtagctagtacctttaaatattttcaagtgaaaagatggcaacaatgttcccaataagttgggggcaaagaagaaagaacacgtcgatctgagtaagacttcaacatgtattttgtccttagcatttcttacttaaatctcttgcttgaacatgcatttgttctttggagttcatctgtaaataggagaagtgtgatatgaatacctcgtcttagtatatcagtgagtgtgaagatccccaaacagaatctaattgttacatgagtctttattttttcagtttttggcaaaactctgaagcacttgctgcatacagttcgtattttcatcatttgctaggcattctgatactcggattgttggtttctttgtatatgtaatatatgcgatccatgtagatagccctgcactgaacttaaccataaattcttccagaatcaacgggaccgtgttttgttctttacaacacgagctgggcaacggacttgaatgataattagatgctttaagaacattcctctactagagtaacttgtataactggtgactggtgagagttctcgtaacatctctgccagacaatattaagccatgaaatttctatttctctgtagaaaaagttgttttcaggaatacgcgagacgcacatttttatattaagaaggaataaatgaaattacaggggggccaaacaatttaaaaaagaaggggacagggtacaggtgtgggggggaaacagaaatcctaatctcctaaggagtttggcgacccgtgaacaaatgaaggaactaccatggccggtatggctgccctagccatccgccaaactgtagaaaaagttgtgatttatgaaatgatttttgacaagcaacatctcagtctaggttaaccacatcgaacccattgatctctaggtactaggaattacctcagtatgttcattgccgagtttaacattctcaactaggaccctgaattctggtattaagtcgagttagttgtgagaccttatgcttattttatcatgtgggagtttttaattcctgcatagttgattgcttctaatgtatttttttgaattgctgtgcaacaaaatgtccttttaatctcttccacaaacatactttaaagtgaaaaatacatgatgcatttctttctctttgcagatgggtgcttcaagtgtggcgcacttgatctcatagccagagactgtgaccagagggctgagcagaaaaacaaagggccaaattatatcctgaaagacgaaaacactcagcgcagtgggaacaagcgtcgaaggtgattttcccatccgccatcactcatattttctgattgtttcgccttttgataatatgttattattattttgtagctacgatcttgtctttgaagatggtgcaacctataatggtcagcaagatctccgaagcgctgaccgaagaaagatccataagatagatgatcgaagatcagggttg

SEQ ID NO: 5708 - DNA, 2843 bp, Oryza sativa
agaagattaattgaagaccgattattgcaaggcaagtcacacagatactaaacacaaatcctttgagcatgttgatcctatatttaaattctctatttatttcaactgtgcatttattttcgaatgtcaccgggtggtgtgaacctattcctttgttatggccaatttgcattgattatttctttgttatggccaatttgcattgattactttattccttgataccttgggtaacaaattgattagcttgaaccttatatattggtttggttcagctaaaagctatatatatatatatataattgcttagccatgcttagaaacattagctcattaatgggatgaatcatactacattattatttatgattatatttaatggtagctcacgatggttaatcgtgttatgataattaattgataattaaaacttgtcaatggtgggttgtgagcacatggttttgaaggtcgtgctcatgacaattaaggaccggttcgcgagctactgttgtgagacattaaccgtaccaaccacaagccagcgtgggcaacggttttaccttttgtatagcatgattcattgcggggtgccagactgagaagcggcgagaagtccgtgggggtcgctggggagtccatgcctctggtttttgagggggtgattatgatccaggtatggtgcactgtggtgagttgtgttgtgctgagggtattgtcatagcctctattcgggtactttccagtatcgcgacgcatggtagacatgatgttgaggctgtgtcttgtgggtacagtggtacacctctggccagagtaaaactattcgaatagccgtgcctgtggttatgggcgagttgagcaatgtttttcgtgattagtctcacacctctcacaataattattgatgctataactggtaataatttgtgtagctcctggtttggaggtttgatctgtacgaccagggttggttgttcaggtttggttgggcctgtgcagtattggggtgctgttcagtgttgattaaaattgatgattaattactctactgttttactactcttaaatctttgctaaatgctgcttttgcaaatgagcctatattatgccatcctttggtatccatgtgcacttgcatatttgctgtgtggcttgttgagtatgtcatatgctcatccttgcaataatcaatcaacctcagttgaaaaaaaaggatccagaaggagaagacgtttggcttatacccctgaagccatcactagaccgttaattccgctgctgtttacttttcttttgtaagtatgtaacgttattattataatgaatttgtatattaaattgtcagtttgtgtacctcgactgattcctggacgaggattttatgcacaaataagttcggaaattactagtgaatttccgggcgtgacagagtcctgggaaggcaattgtatctattaactaggatattttatgtgaattccttatagataagtgtgggcaaaagtctgccacaaagacttgtggtatcttagagtttgttagagataatggttgtgtccggtatgggcatatcttgtaatcctcgggtataaatagaccccgagccctatgtaataaaacacacacgttcaatacaatctcggcacatcgccaccctttttactttcgttttatttcgacgagttcttgctttcgggttgagctgcatcagtttcgatcttcaataagaggtaaacttgttatggcagcttgcgttctcgggattagtgcttctatctttatgacactctaatcttgtttatgtaattcatcgagttatcatgtcttacataatctctaacaatatcatcatctaacctgccgtcggttaatatctgtcaatagagggtagccgattaggttaaatattgatattggtctagattatacgagagggtagccgattaggttaaatattgatattggtctagattatacgagacatctaccgttctatgagacttctagcggcttgattgtctagatattgttcttcttttcatacttaatgttgcatcagttatgtttgatctattaagtcgtgcttagaatatcaatccctagcctgccttctagttgccgattagaatagcatcggagtttcagccgattgtatctaatttaactactctttatcctatatgcttgattgacatgttaaatctgccctttgtattaagatcttgccgcatttaagtatattaggcttttatttagtatattctacttgctttaacatcttaacatagagtggtatcggagtattagccgatacatgctagatctatctgatcggctatgctatgaacgtatatagtctaattattaatatatatttcgatctaagtgatttatactgtctcggcatggcgaccgatctatcccaatcactttatttaagtatatatcgatataaggattatatattgttaatatctatagccgatcgagtagatttagttcttctttacctattcatgactgtccatcgatacatggatgacattagcccaaagataaatgatatgtcatcagcatctagccgatcggctatcatttatagatttaactacagtttctttgcttctatttcttgttaattacaggatcaaatcaactagcatgctaatacatccgaaggcgagctttggacctgcactagagttaagcagactcccaggccacgtgttttctgtcaacacaaagttaggtggcactactacagaacaggtctttccatacgggcgaaaaggattttcgcatgcgggcgctcaaaccgactgcacgaaatgagatgtaatgat

SEQ ID NO: 5709 - DNA, 11962 bp, Oryza sativa
ccaatttcacagcaaacacacaaagctaccagcgcaagcactacaaaccatccctctcacttggccattctcgtgctaggggctcgacatactcggtccattctcacgaggacagggcggctacagattcctgttcgtggcgatcgacaaattcaccaaatggatcgaggcaacacccacaggagaaatcaaggccgacaacgccatcaagttcattaaggggatattttgccgatatggattgcctcaccgtatcataacggataacggctcccaattcatcagcgccgattttcaagattattgcatcggactaggagtcaagaaatgcttcgcctcggtttctcaccctcagagtaacggacaggtcgaatgggcaaacagcatagtactacaagggatcaagacccgtgtctatgacaggctcatgtcacatgataagaagtgggtcgaagaactcccctcggtactatgggtcgtgcgcaccacaccgacatcgtccaacaaggagacacccttcttcctcgtgtacggctcagaggccatgctccctaccgagttacgacatcagagtatatgattacagaagtactccgacgagaatcaggaggaacagcgaaacgacgacgtgaacctactcgaggaatatcgagaacgggtcaccgtcagagcagttagctaccaataggccctccgccgatatcacgagaagctcatccgagcacgcatactttcgatcggcgactacatcctccgacgagttcaaagctaggcagggcgaaacaaactctcgcccaaatgggaaggaccgtacacgatcacacaagtcttgcggccaggcgcattcaagattgcagatggcgatggtcgcgagttagcaaattcttggaacattgaccagttgcgtaaattctatgtataagtcaatagtttccgtacttgtaagaagtcttacaacttcaataaagtctgttttaaggaacagatttcaatcacagtgccccttcccgatgatcccttacccggacgacacatagcgttgaaacctatcctcatgtccctttacgccgtcttgacaaggcctccaaggaacctaagggaacttcggctggggacacccagagctgataaggccttgtcggatccttcagagacgaaagaccatgtaagatatggtcgtgtaagagttctcgccgtgcatattaaccaagccgtgtaatcggaaatggatttttccaacttcacgactaggggctaggattagtgcttattcaactaaggcaagtcgagagtccaagagccttatctcccgagaagaattctccgatgacaaggctgggggctagggagagtgtataactcaagtgactgatcgaagtcgcgaagtgagaagacactcgtgcacaccgcatccagcgtaagaaagcttagttagatagatttcctttctgtttcacaagcatttcttatagatcgtaaagaatcctaaaatatattacaattttcttaagatgtgtgtcacagatatacaagcaataccaggaaggccaacgccaatccattgactagaagattttctccgccagcggagccatcgactttgctaggttgtctatctccgcaggattcctccgagaacaggaaaaacccttgtgaaggaactcgagatgcaactgcggacgatgatctcgtacacacgccagcacgtgccctccggcgtatcggctcgattgacgacattcctacttcagggcctcgtcgatacgcccaccgatgccatcaagctgagcacaagccccgttcaaccatgagatgaagccagccgctgactcctcgggatccccgcgaggtactcagagctctctgcagacaacgaccatggttggcaacaactcctgaggtacgagttgaaccatacctcgcgacctcggagcgcctccacggcccggtccctcttctcttccaatatagtcctctcaagttcggcgacctcgaacttcgtcctccagtactagatgcgacggtcgcgatcagcaagcatgctctcaaggtctgctcagcatgcaaacacctaagtcaagctaatcaagacagacgaggtaaaggaaagggaaacgacaagaaccaacctaaaggagtcgacgccacatccatctcctcgggcagatcctggtccatgccgtcccgcggcacatacggctcgagctcaagtgccggaacgactacaggcaattcgggatacccgtgctgttggacatcctcgacatcggcatctctacaaacaacaggcaaagtacccggaatcaaaacgccaaagaaaactaaggtaacgattgcacacacaaaagaagttggaaccaacgaaaagtattacaaagcgcgattggttaaggggtacagacaagcggtggccctactcttcaaaaagcgggaggacggattcccccaaatcaccgacttcttccatcacatccttgcgcgcgtcgctagccgccccctgatccaagatcttctgaagatcgagttcagggtgcgccagcttcacacacgcaaggacatggcatgccccggtataaatcccgttagacgtctcctctccgatcctggccgcgtgcttggagaggatcgcctccatcactgtcgcaagttccgcaagtgaagtcgtcagccataactcatcgggattcgccgggatggtggtcttgacaccgtactccccggcaagctggtgcagactagtgtaggtgacccgcagcgagccacggatttccgacaagttgttctcgagctccgacatacggtgctcgagcccctgccgttgtcgctcgttgccggccaccagttccctcatcttctgtaggttctcgcgaacctccgccagatcatgcatcagccggtcggcgcgctcattcgccgatgacgccgccgccgccctcgcctccgtgatcttgcggctaatgccgcgagcaccaacctcaaggaggcgccccatctcgacctagagctcctcccatgtgaggacggcagccggcgcaccccgaccagccgcgagattgctggctgggccgctgggcctcacatcgcggctcctgggcacgaccacaacatctgtcgaggccacggtaggagacgcgctagaagtccctccagatccgtcttgcgccgctttcgcccgcgccgccctgtgaaaggctacaattgagacgtgctgcatgagttcgacgaagtgacaaaacctcaaattcatccacttctcgcccagcgtcacaagccgctgctgtcgcggaggcgggggagacgcatccgaggcctggagtataacgggcgtgatgtgaggtgcaagttttccgactacgtgatgatggaccaggagagcttaccgagggggtgggcgtcttccgacgatttccgatcatggaggagaatttcctcccccttttcagaacgttgccgccacttgttgtggcagcagcggcagcaacatcaaatgcctccttggcgacgccctccttcagctacgccaccgcctgatggtccacgagcggtccgatgatatcagtcagagggagagcctacacttcgtgaagtcacaatgcgatcccggaagaaaaatgcaaaagggtcgccgagtacactcacattgatggcagcttcgcgttcggctgcccccttctcgcaaagagcaacagggacgttgctcaccgtggtggggccgctgatcatcacttgaccgatgcgatgctctacggtttcactgttcaaacctgtagatcaagaaccaaaatcgataagtcaggaggaaaccccgaggagaaacccgggtcgcgtcctccgaccctgagtagtcaaaggctggatgggctcaagcctggagcggctggatccgtctaccgatgaagtcggcagcgacttaatactccgacaaccctcgcactcggaggtcatcgatgacatcgatgaaagactgaagggaggggtcaaggcgggcttggcaggccaagacgaaatcttgtctggttgctcctcgggaacaacaaagaccggatccgagttttctatctgaagatagaaccacctcgcccgccatttactacgagaagaggggcactggaaggggatatagcgcgacttcaggccatcccgaagtcggaaaccaacgcatcctgataccctattggattccatccaacgcaactcatagtagaagcgaaagaggtcacgaaatagttctaccccaatgtaggcctcacaaagatgagaaaagatactgaggaaggtgatagagttggggttcaaatggagcagagaaagaccgtagaaattcaagaccaaaagaagaaactcagagggaggaggaaggaaaccacagagaatatagtcctcaaccgcaaccatgcggcccaggacaggttcaggttcaatacctcctggttccctctccatggtcccgcgatcggggagagcgccttcctcctacagcttcttcagcgacgcgcttgtagaagtggacttgtcgaggtccattcccgtcgaagatcgtcggagaaggggctgagatgaacaagctagggtttgtgtggaagcggagaagacgaagagttcttgaaggcttgaaagtttctcgcaacagccggactccaaaatggactcccaaaactcccttaaataggtgcactaccgacgatgcgaattccaaggaaaggagagagatgaccgccagaaatttctgggaccgttgcgcaaggcggtttcttggacttcaatttaaattcactcataaccgttggacttcgcatggtattgtcgatcactctttgtctctacggtccccacactgagatcgaccagtcgagaacgacaacaactccgacatcagaagtcatgattggttacacgagttcatttaagtagaagtcgggggctactgtcagggttacggataaggtataccctctacccttggatgtatgctatacggaaatacggtatagcagtacataatcagacgttctttgaacacactaaggaaatcaatcacgaagtctgccaatggaaaagttcctacccgtataggaatggatcgttactatatcgtacagggtccgatgtctccgagtcctacttcgagaccacctgacctgcgatataaaagggacccctcggggggacctaaggcatcgaatctcagagcctatacaacggccacagcttacgaagtcagagactacaggagcaagtcgccaggtgatctagtcgaataaccttgactacgatctcgtcggtaccgccgagttctattgctccctttgtaatatgtggttcttttcatataatcccatatcaactgattagggctattacctgctaaggagcttgaaccagtataatcgtcgtctcttgtttcattgatatcgtattacgtagatcctcgtaccagcgtaccccaataccctctatatccggtctacgggtacccaccttcgacagaggggcgctagtgagaagagatgccgagggagagagggagtgtgtgcagcgagggagagatgggtgtggggtgccgggagggaaggagggaggcaggagaggacatacgccagggaaaagagaggctgcgggggagggggagaaatgggggtgctaggagggagggaggtagaagcagaggtacgcgggagggagaggggccggacggacgaaaggaaggcaaaagccttacgtatttttttaattattaggtatatagatatagacttgtgctataatctatctatctattatatattccatccgtttcacaatgtatgtcattctagtattttccacattcatattgatactaatgaatctagacatatatacctatctagattcattagcatcaatatgaatgtgggaaatgctagaatgacttacattgtgaaatggaggaagtactaaaagtccattaaacttcctacaaacgctcctatgtctccacgtggcactctacaaacgctccgaagctgccacgtgccaaagaaacatccaacccttgatttttatttaaattagtgggccgatccttttcgaccattagagtagatgtcaaaaaaaaataagtaatccacccatactaatctacctccaaattgagcaccactctattcgtgcaaatgcatgtatacgtacgtactctgtacgctcctattcccattcttctcttttcattctattatctatatttaactctcctattttccttctcctaatagaaagcataaatttatgtaaaaacatttaggcaactatagcatttaaatcataaaggtattctaatatgcttatgttgttagattatttataaagtaactaaatcatatatatatgttttgatcacactactaaaaaaaggcacatagagatcggtgttataggtgctagaagtgataaaaccgacacctatataccatttctcacctctacgggttgaaaatacaaaaaactagcaactttaataaactataggtgccggttttctgtaatataggttttctgtaatataggtgctggtttttttaataaaaactgacaccttcaatttataagtgtcagttaattaaaaaacgacacttggtttttaaaaaactgacactaaaaatatgagctgagccgaccggtggtctcgagcggacaaggctgagagggctcagtgccactctctcgcgcgcgtataagaccgagagtttctcgctcgttctctctcgcgctcctctctatctttctctatctctcgctctctctcgtgcacgctgttgacggtcgttagcgatcagcttcgaccgtcaattttaccaaaatagaggagaacgagttatgcttgcaatgcatattcatgttagaataataatattccactagtatttggttcactaaccttttgtaaagaataaccctaaagtggtggagaatcgacatcaactcagacgataaatcaatcggacgatgtcgagaatcagacttatgcatgactgggccaagaactcagaattggcatgatgaactgggccaaaattcacaagtctgcgtatgagagcaacggaggaggccaccggccgattttgggccaggacggcccgacccatggttcggccgaaccccccgcagcgccattcgatccaggtttctcctggacggctgagatggctccccaatgacggttggtgagtattaccgacctttccaaccgtcacaaccgtcattctcaagatataaaaggagctctcatcctcacttcactcacacacctcaagcaagagttctctcatattctctcaagttagtttagtgttctcaagctagtggaataggaatagagtataaatcggagtctggaagccttcggaagagttcgggtatggctctagtagctcttctcttattttttgtatttagaatactcttctatatacatttatggtattgaaatactttccgagtatatgaataccaactttactttatgttcatgttatactgattatgttgctagcttatctgggagatgctttggtacgggtataatgtttgcttatgcaattactctatgtcatgacgatgatattagagtagtatctggtagtttaggcgttgtgtcaagattactggatatcattatttgggtttatatgctgtggatgagaagtgggccgctgatggtgacagctcagtacgggtattcctccgcgcgtgtatattgtcctaagttaattccctggggagggtactgtcgcgtcccaaaacgaccctaaaatacatcctctaaattatgcctagaataattaaaatccgtgtgaaagcctccaacaattaaaatgtgcaaagttaaaagtcaaataaggcttgcaggatttttgtatatttcctaaaagcctaaaatgcgtaaataaattttagtggaattttcagagcacaaataataattaagaagaaataaacaaagttaaaaaggttttataaaaagaaaaaccctaaaaagtctttttccccccctccacctcttgggccggctcggcccacctccctccctctctctcctctcccccgcggcccatccggcctcctccccgcgcgcgtgctgctgacgggcgggctcgcccgccaccctcgctgacgggtggggcccacccgtcatcccctacctcccgccgctcccgccgcctcgcccgtgccctagcgccgccgccgccgcaaatcccgccgctcccgtccgccccgcgtgcaatcaagaggggggaaatattccccgtgattccctccctctttccccccacttttccctctctctctccatcggattcgttcgggatcttttcccctaaacctcgccggcgcatcaatggcggccggatcttccgcggccgtttccccctcatccggccgctctctccccctcccaaccctatataaacactccccgtgcctccctccgccgtttccgaccctcgccgctctctctctccgccggaatcgagctcgcgccgtcgctctctctctccgccattgccgccgagctccggtccgccgccgtcgtcgccccggaccttctcccgcttcggcgtcgccttcttcgggttcgccgcaacctcgccgacctcgtccacctctccgtttcgttcgccgaccgccggaaccccgccgtccccatcgacccgtgccgcgccgccgccttcctccgctccggtcgccgttcccgtcgtcgccgtcgacccggggtgagccgtggactgccgattcgcttcccccttccctcccctctttcgggcgccgctccgccgcgccggtggtcgccggcggcgaccataggggcgcgggtgcaccgcctcccgtcggctgtgccggcgtggccgccttcgggcgcgcccctcggctgccatgtggggcccggccgtcagccgcccgcgccctcgggtgcggctgacgcatgggacccacggcgccggccggtgtgagccgggtgcgcccggtccaccgtggaccgtgaggctgccgcgtgggccccactcccgtggacccggtccgcccgccctctcccctcggctgacggaataaatccattttaaattaaaatttaaatgaagaaattcgcaaatattcatttaaagagcatataaccttcaaatggccataacttggccatttgaactcggaattggaccgttcaagtctctaatttttccttaagaagtcaagaacccatttttgtgctttgtttctgcttgttatatggagtttattagagtaaaagccttttcttttccgttggtcgtgtagacgctgcagcttcggaagatccgctcttcgtggaagttgaagccgacgtttgggaaagcgagcaaggcaagtcacatcatctttgaacatattgaatcccagtttataaaattatgttgatttaaattattgcattatcgctttatttaaattcccgcgttatcattgttttatttagccatgcctatttacctttgttatgaccttaatattgttattgttattatttccttgttcaccctagaataaacaaaaccccaactagtggacactctactcatggtaccactagtatgattttaggtagatgcttcgctgtttaattcttaggtttggcaggatactaccggaggtttatcgagaacttctccaaaatcgctcgacccatgacacagttgttgaagaaagaagagaaatttgtgtggagcccgcaatgcaagaaggcgttccaaactctcaaagaaaagctggtttcctcgccagtgttaatcttgccggatactcgcaaggacttcatggtgtattgtgatgcttcgcgccaaggattggggtgcgtgctcatgcaggacggtcatgtggtggcctatgcctcacgccagctacggcctcatgaaggcaactaccctacccatgatttggagttagccgcggtggttcatgctctaaaaatctggcggcactatctcattgggaatcgctgtgaaatatatactgatcataagagtttgaaatacatcttcactcagtcggacctgaatcttcggcagaggagatggttagaactcatcaaggattacgatgtgggaattcactatcatcctggtaaggccaacgtggtcgctgacgctctaagtcgaaagagccattgcaacactcttaacgtccgtggctttccacccgaacttaaccaacagatggaagccctgaatctgagcatagtgggtcgtggattcttggctgcgttggaagccaagcccaccttgctcgatcaaatccgcgaggctcagaagaatgacccggacatgcgtggactcctcaagaatatgaaacagggtaaagccgctggtttcacagaggatgaacacggaaccctatggaacggaaatcgggtatgcgttccagataacagagaacttaaacagctgatacttcaggaagctcacgaaagtccttattccatccaccctggcagtacgaagatgtacttagacttgaaggagaaatactggtgggttagtatgaagcgggaaattgcagagttcgtggccctttgtgatgtgtgccagcgtgtcaaggcagagcaccaacgaccggccggacttctccaacctctccaagtaccagaatggaaatgggatgaaattgggatggatttcatcaccggacttccaaaaacccaaggtggatatgattctatatgggtagttgtggatcgattaaccaaggtagctcgatttattcctgtgaagaccacctatggagggaacaaactagccgagctctacttcgctaggatcgtgagtctccatggcgttcccaagaaaatcgtatctgataggggaagccaattcacctctcacttttggaagaagctccaagaagagctgggtaccagattaaatttcagcaccgcgtatcacccgcagatagatggacagaccaagcgtctaaatcagatcctagaagatatgcttcgcgcatgtgtcctagatttcgggaagacctgggataagagtctcccctatgctgagttctcctacaataacagctaccaagccagtatacaaatggctccttatgaagcgttgtatgggcgcaaatgccggacaccgctattgtgggaccaagttggggaaagtcaagtgttcgggactgatatcctgagagaagctgaagcgaaggtcagaaccattcgggataatctaaaggtggcacagtcccggcagaaaagttatgcagataaccgtcgccgtaacctggaattcgcagtggacgattttgtgtaccttcgggtcacgccattgcgaggtgtgcacaggtttcagacaaaagggaagctcgcacctcggttcgtgggtcctttccgtatcattgctcgacgcggagaagtcgcttaccagttggagctgcccgcctccttgggcaacgtgcatgatgtgttccatgtgtcgcaactcaagaaatgtcttcgggtaccgtccgagcagactgacccagagcaaattgaagttcgcgaagacttgacctacgtggagaggccagtgaaaatcctggacaccatggagcgcaggaccaggaaccgggtaatccgtttttgcaaggtctaatggagcaaccatgccgaggaagaagctacttgggagcgtgaagacgagctgaaggcagcccatcccgatctcttcgccagttcttccgaatctcggggtcgagattccgtttaaggggggtaggtttgtcgcgtcccaaaacgaccctaaaatacatcctctaaattatgcctagaataattaaaatccgtgtgaaagcctccaacaattaaaatgtgcaaagttaaaagtcaaataaggcttggaggatttttgtatatttcctaaaagcctaaaatgcgtaaataaattttagtggaattttcagagcacaaataataatt

SEQ ID NO: 5710 - DNA, 20778 bp, Oryza sativa
tgttgcatcgcggcatctagatagcagtacaaatggtatctacacgcataacaatttataaattgcaccgaccatcattgttccagcctcccagatcgctcgtcgatttctttcagtttttcgtctactccgatgtcgttcgacggggtctcccggctggagacgtcgccgccgccggcgttggaggaggagatggcgactgtgactcaggcgccggggctgtcgacgccgtccatgctcggcaatccagatggtggagctccggcggcaaccatgatccagagcgcgccgtgcgccaccggcggcgaggcgttggtgggcgagggccggctgcgaaaggggaagatggtcgccgaggaccagagcccgccgagcgtcagcggcggcgcaccggctgacctgcctcccggcggcgacaagctcactgagaacggcggtgacactgacaccctcctcctgggtgcccgttgttcgtggatagagaggatggtaggacccattgacatgtgggtcccactattttgtccttttgtatgactgacatgtgggccccatgtttttgtttttattttttatttttatattttgcttccagtgccacatcgtcgccacgtaggacgaggaccaagtcaaactggccacgtaggcgccacatcggctaaaaccaccatcgaaaccgctaagggacctgctttgcaccggttttgatagttgagggacccgttgtatctggttttctggttgaaggacgaaaatcggatacctcaacaagttaagggacctcaagtgaacttattcctttcctccccttttccctcctctctcgtgccttccctcccctcggcccgactccctcctcccgtccttctccttgggccggcccactcccacctctcctcctcccgcctgggcctgccccggcccaagccgagccgcagccctcccgcggacgtgcgctgcacacgctgccacgcgctggcaggcggggcccacgcgccggtcgtcgtctccttcctcctcccatccggtctcctctctccctcccgtgaaaaccctagcttcttgctccctcgaatctgccccattcaaaccttggattccaaaattcattaggggaattaattcccttcccttcctcttcaattccccctaatttcccccttgattcgtgctctcaactgcccggaacggccgcgctaatcttggccaccttctatggccaccggccgagttttctgccgccgttccccgctcctcccgtggccggctcgttcccttccgctataaaatggaatcccctcgctccattctctcgttttagccttctcccatgtctccccgtggccgcaccacctctccccgtcgccctcgtctctcccgtgccgccggccacctccagccgcctctgccgcctcgcccgtgcgccgtccggctgttccgtcgccatcgtcgacgtcacagctgcctccccttcatcggcatcgcctccgtttcacgggaaaatcaccggagccgcatcctagccggcaaacagtggtgttgccgccactgcaccacctccagccgcctgtgccgcctcgcctgtgcaccggccgacgtctccaccacctccctcagctctgcgacgccaccaccttccccgaccttaccgtcccctcgcccgaagctcgccggaacggtgtcctcgtcgacgtccagtggcgttgccgccactgtaccaccccagccgcctgtgccgcctcgccggtgcgtcggctctcgtcgtcgccgcctctcccggcacagcaacgccatcctccacctcgggcactcctcggttttgcccggaagccaccacccgtcattgccacgccggcttctccatcctcctcgccggagtccctccggcagccccttccaccgtgcccgtgcgccggccgtcgtcgccatcaccttcggcatcgcagcggcaagatcgccctcggcctcgcctcccttccacccgaaccccgcaggtgttgttcgtcgtcgtccctgtccgtcctcgccaacgactccttcagttggccgttcatcctcaccggctcgtcgtcccgtagcgccacctccgtcatcgtcattgcagcgccgtcctcgcatccgtgcagctgctgccggctgccctcgtcgcctcctcgccggccccggtcgtcgtcgtcctctcgtcgttcccgcttgtcgtcagccctcccttcatcaagccgtgctcgttcgtcgcccgcgtttcatcaagagtgcgtcgcagccccgtcgtcgtcttcgtcctcagctccgtgtcatcaagcgttgcgccggccgcgtctcgccttcgtccaaggatcgcagctgaagtcgtcctcgagccgccttcgccgtgcccgttcgtcatcgtcgttccgcgcctcgtcgcgtggtggtaaggaccctctccctcttctcgctgcctctgtcctcgtcctttcggtgttgcccgtgcccattgtgcggttgtcgaccccggtacccgtgtaccggtttcggtagttgttcgtgtgtgcatgtggtgaccatgtttgtgtgcccgctcggtagccgcgtggtttccatgtgtgcagcccgcgcggtgtctagtagggtccgtttgtcggccacttgcctcgattgacacaaggggtccgcttctgtcgacccgtggatcgtctctatgtacctggtctatcgtggtcccttaggttgacatgtggggtccgtatgtcaacagcgcagccttcctatcttttccaggctagcactttcacacgttttatagttgcaaaacctaattataataatccgtaaatctacatgtaacaacattaaacttcggatgaccatgccttggacatacgaactctgaatcgacccgttcaagtctcttaatgtttgttataacctaaagaatcctatcctttctttttatctattgttattgcttctttataggcttgtagcttcgcttgtatgcttcacgtagctttcgtcgttccgaaggttcccgaagcatggtttgcggtcgtcgccgaaggttcggaaagccattctctctgagcaaggcaagtcgcatcatccttgagcatattgaatcccagtttataaaattattttgatttaaattattgcattaccgctttttttaaattcccgcattatcactgttttatttagcacttcctattaatccttgttatagccttaccattgctattgtttattatcaccttgcttaccctaggaaaagaaaaccccaactagtgggtaatctactcatggttccactagtatgaatttaggtagatacttcgctgattaattaggcaacactaggtggttttataactttagactttgagagttctcatatcatttggacactgtggaatggttggcttgtgatggaattgaacacacatctccccccccccctctattcaaaactccaaaaatggttttaggctgggctcgaggtgcatggttttgctaggagcacctcggccaccataaggaccagtcttcgggactctgttgcaaagcactaccgtactaaccacatgtctaattggtaaggcttaactcggtgctcaatctagtcctggcaagaggacacggatagagatggacgaagtcagggctcgatggacatctctaggataaatgaaggctacacgggctgcggctcggtagtcgagatgtcatggcacaggaacggtgttctgctgctaggggctcaatcctggcctacctgtcccgggattacggccgtaggcgaggttgggtcggtgcttttgtcacggctgggatgggtaaaggggttatgtcacattctttatgacgggttccacggccgtggtatgcggcgtaaagatgtgttttgtaggtaaagatgtacacctctgatcagagtataatctattcgaatagccacgccctcggttatgggcaagcctagcaatgtacccaagttagtggtttaattcttaaaacttgcttatcaactaaaatgtggaatggttggcctgggttggcttgggacgagctgggacccaggtcaggttgccagttcggtctgaatcatcgtaggccttgggttaagtcaggttcatgtggattcacggccttgattaataatattgtgtagctcaaggatagtgcttgtaaaatagctttgagcaactaagtgacttttaaatgttgtttactgcaaaacctaaccctatattattaccccttgtacccccttgcattaatcctgcatctcccggtgtgacttgctgagtactgtggttgtactcattcttgctctatcttttccccccttcagtcagagaagctttggagaagaagtcctaggtggagtcctggcttataccccagttgagctcctgtgaagatggagccgtaggcccgctagtccgctactgtttatttttgattgtcaggcctgaagtgcctttgtaataatgtaaatattatcaatataataaagatgtaccttttgtatcatgtttgtgtggtgtaccccggcttttcctaggacggggattaatacactagcgttcgggaaaaggtatttttccaggtgtgacactgggcaagtgccagtgaggactggtggcgtgcacctcatgacatacagtggggggacaaccaacccccacagatcaagtggtatgcctccatctccaagtgaatggcgttcaaattcctctcgttgggacttgggtgaaatcaccaggaaaatggacacccttgatgtgcatacgggagagatccaatataacctcatggaacacatagcccagacgcaagaatggcaacaaactgctgatactcagttcgccaacatcaacaatatgatgcagtcacagcacgatgaccttcaagcgtacttctgctttcaggggttcaatccttaccaaggaccctaagcgaaagctaagcttggggggagacatctctccccccactgaggtaacttctatcacattgcatatttcccttgccaattgcatatttgctttccaattgcatcttataaacttgaaaacaacataaaaatttgtaaaatagaaaataccaaaaagatagtttaggtttgagtcatgctaggtaagacgaactagttttatttgttgaaatgatgaatagttgctctgttttatatctcttatatatgggttcataggtaagtgctctctcaaaggttaaatataagtagccaataattatctgggaacctgaggtaaatgtgatgcacttgcttatctgagtctaagccattgcaagatatgagatagtaaataagagttgctatgatcctagtcctagtttgacttgaatttcggacttgaagttcctcatttgatataaattcctaccagagctaaaaatgtgccatcataattgaactatatacattttggttacttgccattccattgaactttgttatattcttgtgacttgtgtagttacttctcatgctttatgatcaacatcatacaccgacatatatgcacatgctaaactcctacattgcgagctaagcaattatccattccatttccatactaccaccaaaataaattctccatgctttcatgtgttttcttctcctaaaaaaagaggagggaaaggcatggttatgaaaaaaaaagagagaaaatataataaagttatgctctcaccagcatgagcatgatattgaaaatgtagccatgccctctcctaattaataaaagaaggatttttgggagaagaaagtaagcacaaaggagaagcatttcctttattttcctcatataccatttccaccatatatcacacacactttgcacgatcttgatcttgagtatgtttagtcatcagctttagtctaagtttttgacttagtaataaatgtgaatgcaagtatgccatgtttgatccctaccgagctccacacattaaaccttagagtaggaatcaaaaaggcaatttggcgaggatttcatattgatacacttggagagactgagtgaatcattcgaggaacttggatttcttttgcaaaatcatttgaaaaactttcggaatgaaagttgaataaaagattgggtgattagtgctctaattactgttatgtctttcaaccgcccaaggcaaggagaagcagtgtctcgtgggaatcaggggtaagggtaagccaccgtgccaaagattatttaatctgagagagagtacatataccttgcacttgtacctttgagatatacagcatagtagcaactcctgatcaacaaccaagtttttgtttcctttcatccttcactcgggacgagcaaaggttcaagcttgggaggttttgttgacggtcattagctatcagtttcgaccgtcaatattaccaaaatagaggagaactagttatgcttgcaatgcatatacatgttagaataataatattccactagtattaggttcactaaccttttgcagagaataatcattaaatggaggagaatcgacatcaaatcaaatgatcgatcaatcggactatgtcgagaatcagacttatgtatgaatgggccaagaactcaaaattgacacgatgaactgggccaaaattcacaagtctgcgcatgggagtaatagaggaggccacctgccgaatttaggccaggttgggccggcccctggttcggccgaacccacctggccgccgctggatccaggttttggctggacggctgagatgaagcccctatatggttggagggtaattccgaccattccaaccgtcataaccgtcatagttcagctataaaagggcttcacctcctcacttcctccacacacctcaagcaaagctctctcatattctctcaagtttagtttagtgttatctagctagtggaataggaatagagtagaaatcggagtctggaagccttcggaagagttcaggtatggctctagtagctcttctcttctcttttgtaagttttgtactattattagaatactcttctttatacatttatggtattggaatattttccgagtatatgaatgccccggttgtatggtcatggcgggctgtcgtaaggaactcagcaatcaggggtagcttctcgaagtaccaggagagcatcggatagagggtattagctagtatatcaggtaactaggatgtttgtatactatgtatactagaagtataggaatatattctctttctcttttctttccacttagcttagatattttatatgaaaatgagtagctccctgcttgtgtgtcactctacccttggattatattaacccctgtttagactatgattattacaagtaatatataaattattagtcaggttctctctaccatgatcttcccacgggaataaataaatacgatatccttggaatactctcgagtgaaatgctacaatggtatatccgtgcgcttgcggatgaactctgtaaccataatataccaggagtatttctgcaccattgctgggaattatatgtctagtaatgtcgttaagaaataccaacaacggcggtggcggccgtcccacgcccgaccccgcccggatctagcgggtcggcagcaggtggcttggtagcggtcgacggcagtagcgcgcagctcagcggggctcctcccggccggatccgacggcagaggccatctctcgcccgaccccgagctatccggcgaaaggcgacagcggctcggcggtgggcggcgggcagctcggcagcggtcgacgacagcagcgggtagctcagcggggctcctctcgcccgaatctggcggcggcagctgtcccgaccttgcccagccctgcacgaatccagcgagtagcggcaggagtccggccctgcgcggactcggtaggactggtggtgggcggcggaggacggatccaccttccccgacggtgggagcggcgagggcagcgggagcggacaacgcgacgcaaatgagcggccggcgacagggatggcggcaatgttgatggttgttatagaccaatttcgaccgtcaatatgagaactagctacacttataatgcatatttgttttagaataatatagttctacttgtacttagagaataatgtgttgcaggaatttagcaaataaaataaagagaaagtgaagaaacctaactcctaaacaagctagaggataaggagggcccacatgtcaagtgaaatcgtcccggaaaccgccttaactgccataaccgtcatagggacccacctgtcagtgtcgtgcccgaagctagaggcctactgggccggcccagagttcagctgaaccctgatggcgctagctccggctggccctccacgtggacgctccagattactcctcaatggcggttaaggggcagaatggtcttcacttttctacaaccgtcataactaccctataaaaggaggagctcattcactctctcaacacactcaagcaatctcaagattcctttttatactttagtttagtattttagtgctaagtggagtagaatagaatagttctcggattcctcggagctctcgaaagaatttcagtatggctctagcaacttttctattttcttctataagactcctggaattaatgaaatattcttcttcatatatttttgatattttgcttagtatgagtactactcttgctttatatttgtatcattaaattgtatgggtagcctaccaaagaggtgactacgacgaaaccatacgctggattgtcataattagcgacctcaatctcatatccagttactattagtacatccaaaagtgcatgcattatttcccttcttatagaattttctcttaaattactctttcgatttacgatctgattataccattgggttcgtaataattaaatctttaaaaaagatctcacataattatattttataaaaaaatacaaattacttttataatatatctaaattacttttatattttattaaattacttcttagttataaaagtaaattcaataaagtctgaaagttagaagtaacttgaaacaaaagtaaagtaacttgttacagcattaaaagtaaatatattgtgggagtaaaaacataagtctatctagaaagatttagtcaacaatcatagttacccccacaactgatttacttctgatgtcgtgacaagttattttctttttgttttaagttacttctataatatatgcaaattacttttaggctttattgaatttacttttatatgtctaagatgtaatttaataaatctgaaagtaatttagatataatttaaaagtaatttgtattttttatcaaaatataatcatgtgagatcttgttataaagatttgattatagttcggatcgtagatcggatgactaagttaagagaaaaatttatttgaaccataggtggtaggaacatattttatacttacttgatagacaagtattatagattaacaatattcggacaacatctgatggcatcgctggttagtactaaaacgagatgcctctccatttagattttgcgctcacatatatagtacggaactttgagctaacgggagtcatagtaaggcttctctcgccttttgataatcccaccgtgcgtcaacaaagcccagaggtgcgtgatgagctcgccgccggtggccagcttcttgacgtggcccgtcacgttctccgacggcgcaaccgccagcagcagctccacccacatctcggccagtaagttccacagcgccgcctcgtcagccatggccgagagcagctggtaccccagctgtgcgccgtcggctaggacggcttctccggtaaagttggcctcgtcggccggcatgaactctcgcaagctggcgaacatggcgtctttggagcggcggcaacctatgtttcggaggtagttctggatcgcctcctgcacggcctccatcagcagccgctcgtcgtggacctcatccgtcaccagctccggcgcctggagcagcaggtaggcgcaatagttggagagcacggtggccacctcgcggctgtcggcggcgacggcgttgtgggcggcgcgtggccgtgccttgccaccggcggcgccaaacagcttggagagctcgtcgtcgcagatggcggtggcgatgtgccagatgaggatgctgcccatggtgccgaacttgtacctggaggtggaccagtcgaacacctgcagcatgtcgttcctctgcagcgtccggtcgccgtacttgacgttggacagccactccgaccggagcagccggtggatctggcgcttcaccgccaccggcaggctccgccgcgtcactgccctcgtcgtggccagctgatccttgacccacctgtggagcggcacgcgcgtgaggaggcaggagctctggttctcgaggcaggagtggagcagcgagtactgcccaaccgagttgctccagtagcttcgtgtcagcgtggcgcggcacgtcagccataggaacttctccaggatcgggtggccttgccaccatggccggtggcgcacgtagcggcacagcatcttcaccctgtgccagtccgacaagacgagggacaggtactgggagagctcgaggaccaggaagagggagatcaccagcctagccagccagatgtcgacgctggtcgtggtgtagtcgacggcgccgccgcccgggggcggagagtggtggtggtggtgatgcagcaacgccggggagaagagggtggagaggctcagcgcggcggccgccatgaacgtggccgtctccgggacgagagtctgcttcggcgaggggtacctcgcgtagtagaagtcgaagaggaaacccagctccacctcgatgacacggtacatcctgtcgtggtcttcgcaggagtcgccgccggcgagccccctccggacgaacacgagcgtcctgatgtccttgggctcgtggaacggcttcccgttgaggttgaggcgttgccggaggagcttgaacagcgagaaggagaggcacagatccttgagcttgtcgtcgtcgctcagtaggctcccgtcgtgctgctcccacgctttctcgacggtgacgagctcgtcgttcaccttgtactcggcggcgccatactggtactgcacgttcttcttgtcgtcgccggtgaccacgtacctgtagcccctcatggtggccgggtcgaaatcccagatgctgctgaccttctcgtgagccatgtacttggagatgagccagttgtcggcggtgaggacgcggtcacggccggcggcgaggaggccccgtaggcgcaacacgagcttggcgacgttgagcaaccagagcagcgacaggagcaccttcagctgcagctgcagagaaccgaggtaggagatgaggaggagcatgacgtagaacacctgcgtggcctggctgatcatggtgcgggcctgctggtcggcgccgtcgaggctgcaggcggcgatgccgtcggcgcagccgagcaggaagcatgcccacaccaccaccatgtcgttgcggaaggagcccgactgcatcagcccgatcgtgtaggacaccgccgggtagctcagcatcagcgccagccagaccacgaaacggaaggcggcgctgcggctggtgcggcggccagagccgaggaagacgagcgtggcgaggagcgcgcagctggccgtcaccagcgcctccacgcggaccaggagacccaccgggctggccgcccacgccgtggcggcgcgggtcacgttctgtgctacggacaggtgctgctgctccatctttcgctgatttcgagctagcttcttcctctctctccggttccaatccaaggttcgagtttggactttggacgaagagagcagcacatgtctcgtactttcatgtctagacaacaaggtttaatttctttattacttgaccaagaccatatgccaatatcacatgtctatgttcccggtagtggattctaaactgtcgatgggatatcccctcattatttgtacgtcatcctaatggttatgtaatttttttaaaaattcaacaagatagattaatatgtgataaatcatttaacaaacatactccctccgtactcaaaagaaagtcgtttaggacaatgtttaagtcaaaccttggaaatataaatcattaataactctcaagttgttgagtttgaaaatataaaaaatatataaatagatttgtcttgaaaattactttcataaaagtatacatatatcacttttcaataaatatttttatagaaaccagaagtcaaagttgtgttttggagaccgtgtcgctgtccagagcgacttcctttacgattacgagtacggagggagtacaagttaaaatgtagagcaattttacagtccttaagaatgtctcaaaaatttaatgcgaaatttgatatctcctaccaagaggtgctaaatttacaatagagaaagtggtacctcacggtacctcctaaagaactataaaattgttctagaatttaacttctagaagttgcaaaaaaaaacaaattaaactacgggtagttaacgtatattcgcactcaaatttgttttttcgttgcaacttataaaagttaaatttcaccttgcatgtttttgaagtgatttatcacatattaatatatctttttgattttttttatttttttcatgatcatttggatgacatgcaaacaatgagggatgtccccttgagagtttagaatacattccactttgttcccttcaaaatatgtcacatgttagtggaaacaatcaagagattataaagtccaaccaatgagactgtcatggttatggataccacatacctaatagtagttgactaaacactacagggcccaccacataccatgacttatacggaaacaaacctcgtatatagaaggagttccggataaggaaggataagaagagttctacatagaaacgatagggactactcagatcgtatccatatttatctccctagatttacttggacaagggggcacctatgggtataaatacgatcccccctaggaggagaggggagagacccaccacaatctacgaagccacaagacacaacatacacacaagccaatacgccactagatctcgacaacaaagattagcctaggtataccccatccggtgcttgtgaaggccggcaagagggatctagcgccatctctgatctcgacaagttcatatttgaggaggaagaatgccctgtcgttgactacgagttggttatatagccgctaagtcgacgacagctagataggttatcccaaatattgtatctgtatgatccagatgaataaagagcaacactggcttcggccaacaggatgtagggctattacctgtcagataaggggcccgaacctgtataaaaatccctgtctccatctcctttacctcaatctcgcatataccctggtaccaacgatccccataccatacaaataccctagtcgcgatctcaaacgtcgacagagacgatcacctaacttagccggtaataattaggggaggcatctgtcaaattttggaccgttagatttgctctaagattaatgccggcctctttttctcctctggctccggcgacacagcgatgaccctaaccagttagggtttggcgatggacggtcaacacaaacaagcggcaaggcggtgacaatagtgccaaaaccatggggatggaggacggtggtttggtgtcggaggcggggctaggcaagtgaggcgggggaggacgatggtcgggtggtcctagctgacgccattcgcgcctttaggcacttgcgaggtggggacaacgccggcgagctcgctcctcttgttctatcaagcgatgcgggagagaagatgaaaatgggagaggataggttactattcatgtacaaatgttgatgcaatcctagccatccaaaagtgactgaaatctaatggggtttctagtttcacatcaatgttccttatttttttgaaaagtaattcgcatgttacaatttggatcaatgacgacccacatgtcggcgatgctagggtataaaggggaaactacctcggtggggtggacacggatgacctcctcttctgccatgtcgatgagttctcctctctttatctcaagacaacatggtgaaggtcaaggtctagcctcaaggtagcacggcagggggagatggtgaagcgaacaatgacttcatcgaggcatggcaaggtcctagcagccaacaagaagcaaagcagcggtggtggcgcatggaacgaacgcgacgtgacgatgatagaagagcaaggcattaagtgcagggtgacatggtgaggggaggatgattgggtcttccgccataccgacggtaatggtcataagaggtttgtcgttcagcgttaatagcaccggtaggttaaagcttatgttcaaagtgaattagtgtgaaatcaagcaaggttttaaaggaaaaatgaagagggtttagtgcagtttatttgccctatcaattttgcattgagatggaagaatgaggcgatagaagaggagaaactactagggtttcgagcgacgcgggtggagctcgtgatgagaggcctaggccggttaggctatacggctatgtgcaggaaaaggagccgatcgtaagcctctatgccgatgtagacctagttctcgcgccattgctcccacttatgcttcaacaatgtgggaggaagtccatgacgtggcggccgtggaagtagacgcatcccgcgcgtgccacacggtgaagtaccagtagaatagttccattgatgacgagatgctgacgaacatgtcgtagaaatgcacaaagtcgaggtgcatcatctgtagctggtacacctctagaatctgcataaagaattccaaaaaggggggaccagtccatccgctgcatagtcggtgaagtgcaccacttccatcggctcattcggatggggtctaaaccctccgcacatcaccgagaccgccagccttcaccgatttgaggtcggcatataaggagatacgtcttctctatccacccgttgtcgtttaggcgggatggtggaagggcactcccatataggggcctcgcaagtcgattggtgcaaggcatcactgctggctaaggagaggcagaggcggcagggttgtcaaaggagggatcggaggtggtgcgctgcatgagaagaagcaataaggcggcgaactgaagaagagtggggcagcagcattacaaatgagatgaagtacgtgctgaagtttggcggggggttttatgccttgaaaaccctccgtgacgcttcgcccactccaccatggcgatacgattatcggagactgggagaaaaattagggtcgtgggtaattatgacctgaagcctcggaaactgaagacggccaataatgggaaaggttaaccagtgccccgtcacatcctcctgcaaccacatggggcccatgttatcctgtgcttcggtaacttcgagtagaagccccatccccaacctcaatggctctcagcccagcaatggggctactgtaggagaaacaggaataggaattccctttccccctaggagatcgaggcgttgtaggacccattgagccttccttcctgagggctcgggcactatgggccccgccaagctttcaaggtttcaagaaaagtccgggggtgacccgaggacacagagtgacccgaacatgatggccggccattgaaaagcacttattacaccctggggccccgagggtgccccgagcagtccttaagggggatttcactccattaaggaggggtactcaggactggtcatcacccttaaaacgaccactttgcattaattgtgatgtggttcaagcatggcgtacaactcatgccttacgtgggagacgtggtagtgcatgcaaccccttgcatgcttacgttgcccaaagagcacgagccacacggcgtggcgtgtcctcatcaaccatcactagggccaacctctattggcttcggccactaactgatgggcccggggacaattcgaacgaggacttttgactttccattccacttgttggtcggtaggtgtgcttgtcttatctagtcgattggctaggagggacagcgataatactaagcatatgaagtttagaggagttggccccactcttgcatgcatgcgatggcaatgtggactctccttcacatataaaaggaggatccataccaccgaaaaaagggttcgcactctcgttgaagctacgttagccaaacactaagtgagcaaggaacttctctcctccacacttagtctttcttcccacaaaaccttgtaatccttccacccatccaaagtccaccacacaggagtagggtattacgccgcatccatatgatctgaacctgtatacttgatcatgtttgttgtttcttcttgcacgtgaagcgggacccacacttaaaacttgcacccaggccaaactcacaaaaggggagtacttagcttccctgctagaggagtaccggactctgacataacatattcatgcaaattggaaagaaaaaaaaacatatattttgaaagaaaaaaaacctatgtctagctgcctaactggcgcacattatacaaggacattcagatcgagaaggtcaaattaaatatccatgacagataacgcctaagggcacccacaatggttatctataggctctctacaagagatccatgtcagcatattttcctacttggaagatattaaatgaagagagagagcaaagctatctactaacttagagatagtctatagagaaaaacgaggcaaggcatgagagagctatagatacccatgtagacatactattaatctagtctattgctgaaatgtacatgttttatagaaagcacattactttaccattgcgggtgctctaatagtcacacattatacgaggacgttcggagagagtcaagttaaatatccgtgataatgtttggtcagataggcatcccatgtaccaatgggagatcggagtactaacaacagtacagcgcaataaagaactcaagcaatcagggccatctgtattaattaattttgatccgatggtccagattcactgctccaagacatataaaccacagggtagcgcaaggcagcagcagagggactaaaaaccatggaagggggacagccaataaggatatactgcaagggagatacaaccttgaatgtggccgtccgtgggaacgagctgcgtctcgtccgggacgaccccaacgacgaatcccaggtaccaaaagctagcaatcccagctaggatcctatttaatttgcatattctaatttggtctttggttgcttgattttgcctcaaatcatcagtatttacgacctgtagtgtagaagaaagtatgtcgaagctgttaatttttgcaattacatgtataaaccgttgtgtgatattatactaccgtttttaatttgcgtggattcggcaatgtacgtacgtctggtctgcacacgatcgaacatagcactggttccaggtgtgcgacggcgtggggaaactgacggacgacgaggagcggccagcgttcgcgctggtgaacaggacgacggggcacgccctggtgaacggcggcgacctcgagctgggtctggctccctacagcggccatgtcgccgtggagctctcggtactgtggtcactggggcacccgcgcgccgacgggttcatggagatcaggacgctgagggacgtcaggtacaccctcgacggcgtccacgggttcgtcgacggggggtacaggctcaacggcatccacgggatccccgagcatgggacgctcgtcgccatctatcactcgcagcccacggctgattatgccgtctggaagattgctcccgtcggccaccaagagccgcacagccacagcgagtctgatgatgctctggagtcttaggttggacacggccatttccaatgcaataatggttactgttggagtcgtacgtacaaatgaattaaattattactagtactatattgcatatctagctagtgtgcgctacgcgattgggtatcagtacttggagatctcgagttgtagtccttgcttgcttaattaaataaaagtagcagctggtggccggagcattcttgtcaggagtctctctctagcatttatttgttttttagataatggattaaaccggcctctacacccaaaggatgtacacagcctaaaagtctcttacacgagcacttaggctcacacccttacaaaaggtttaacacaaattcgagtgaccacaaacggacacttagacaatgacagagattaaccaaaatagtacttaagacaacaaaaccccatggtgcaaagaagagagagcattaaacttctaatcttgttcttaagttccaccctttcattgcaaagaaactagaaactctcttctccaatatcatgcaaccatcttttactctttggccatcttcctccttaagcagcgaagactattgtcttgcccaaaaaagttcccctgaaaatcacctgcaacaagaaattagtgttggagccattaaagactacatcatttctgcacaaccataccgcccaacacaacgctgcgacccctccaaagactttagtttttagcttaggttgaacccccccttagccaattacccaataagctagcaacattcctagttttgagccttagaaaagtagaagaagatagaatttctaagagtttacccttgtcgaattgtttgtgtaatgaggttaacaataagggatttagttcagaaggagaagaagagttagataaccttgttcttggtcacttatgtggtgatttagtagaagaggttatggatgaggagaaagaccacctaagttgtggtgctcaaaaattctccaataattctaacaggaaaaatgctgagataaggaggggaaagaggaaggttagagtcgctattcgcaaaaagagggcatcatggggggaattttctggaatagcagaggtctgggagacttggctaaattcagatttctttcggatacctcaaaagagaaaaagctagactttattgcccttttagagacaggtaaaaatgatttctccaacgctagtcttaagagtttttgtggaggccaagatttcttttggcattggacaagaccaaggggaagatcaggaggtattttgttaggaattaatgaggcggtctttgacatttctagcgttgatgaaggcaagttttatattaagttccacattaaaaataaggatgatggctttcaatggatcctcgtggcaatctatggggcggcccaagaggaatacaaagaagctttccttgttgagttggttaatgcttgcagtaaggagtcactacctattttgcttggtggagatttcaacattattagaaatccttctgaaaagaacaatgataatttcaatgagaagtgtcctttcctctttaacgcagagagttggaactttctaggcgcaaattcacttgggctaactccttgtcaaaaccaatgtttgagaagctagatagaattttgatgagtaccaaatgggaacataagtatcctctagcttcgaatcgagctttgagtagggaactttctgaccatacaccactattgttggacacgggtgttaatactcctaaacaaccaatattcaggtttgagcttggatggttgttaagagatagcttctatgacatggtagcggatgtatggaaaaaggaagttaaggggggactaagttggaaagatggcaaaataggatacgtcgggtgcgtcaatttttgaggggatgggcgaaaaatacaagtggagcatacaagaaagagaaggctaacttgttagcaaaagcggatgagttagacaagaaggctaagatgcaatgtctatcagaacaagagttaaacctcaagaactatctaaaaaatagattagcacttttgctaagggaagaggagataaaatggtaccaacgggcgaaaacaaaaagaattgtggatggtgatagaaatacaaaatactatcatttgatagctaacggaaagcaccggaagactcgaatttttcagttggaacaagaggagggtgtaattaagggtgacgtacagctgagaaagtacattacaaaatattacaaaaacctctttggacccccagaggaaaataatttttctatgagggagtctagaatagaggacattcctcaagtctcaaatgaagaaaatgacatcctaacaaagtaattctcagaggaggaagtaaagcaggctatcttccaaatggaacacaacaaggctccaggtcccgatggatttcctgcagagttctttcaggtgttttgggaagtcattaaaaaggacctaatggccatgttcaatgactttcataaagaagaattgccactacacagcctgaattttggtatcataactcttccacccaaacataaggaggccaaacaaattcaacaataccggcctatctgcttattgaatgtaagcttcaaaattttcacgaaggtactagcaaatagagtagctctagtagctcaaaagatcattagaccttcacagacggcctttttacccgggagaaacataatggaaggtgttgttattttgcacgaaacaattcatgagatgcacaggaagaagaagaatggggtgggtattaagcttgatttgaaaaa

SEQ ID NO: 5711 - DNA, 45614 bp, Oryza sativa
gcatcggcaccctttttgctttagttttgtttcgacgagttcttgcttttgggttgagctgcatcgatttcgatcttcaacaagaggtaaaattcgttatgacggattgcgttcttaggattagtgcttccatctttatgatactctaatcccgtttatgtaattcgtcgagttatcatatgtcttacataatgtctagcaatatcatcatctaacctgccatcggttaacatctgttaatagagggtagcagattgggttaaatattgatgttgatctagattatatgagatatctaccattctatgaaacttctagcggcttgattgtctagatatcgttcttcttttcatacttaatgctgcatcagttgagtttgatctattaagtcgtgcttagaatatcgatctctagcctgccttctagttgccgattagaatagcatcggagtttcagccgatcgtatctgatttaactatatttattctatatgcctcattgttatgttaaatctgccctttatatcaagatattgctgtatctaaatatgttaggcctttgtttgatacattattcttgctttaatatcctagtatagtgtagtatcggagtattagccgatacatgctagatttatctgatcggctatgctataaacatatatagccctattattaatatatatttcgatataagtgatttatactgtctcggcatgatgaccgatctatcccaatcacttgatttaagtatacatcgatataaggagtatatatcgttaatatcaacagccgatcgagtagatttagttcttttttacttattcatgaccgtcgatcgatacacagatgacatcagctcaaagataaatgatatgtcatcggcatctagccgattggctattatttatagatttaaccacggcttctttgcttctatttcttgttgattacaggatcgaatcaactggcacgctaacacatccgaaggcgagctttggacctgcactggagttaagcagatctcccaggccacgtgttttctgtcaacaatgtcaccacaaagcaaatcaaggaaccagtccctttcctcatcgttttcctttgcaacaactacccaagctagaggatacatctgattgttggcatctcggcctatagcacacagtagctctccattggttgcccccttgaaaaaacatccatccagccccaccactctcctacacccagctgtgaaacctttcttgcatgcatccaaacagatgtacatcctcttaactactggtggatccatgccaatctccctattcacaactacagtgttgccagggttgcttctgagaagttcaagttggtaattaaacaacttttggtattgccccttagctgagtcaaacttcttcttcatcacaagccactttgctctcttcagcttagagatagatgcatctacaaacattttttcttgtacagttgatttcatatgagctattggcttggaaggattagcagctatgaaattgccaaacttttctgctatcctaacagatgtaaccagcctactatccctcctaggtggacaagcatgcaggttgtcaaaggttactatttgccagctgtctgacctagaattcttagaaagcagacatacccagggacaactttcccaatcacagtttgccctaaccctttgcccatcatccttaccaaagttgatcactttcctctctgcaatagcatatgttgtaataaccttcttgaattgcttcttacaactgaacttcatccccaattcaaatttagggacaccttgactcttcttataccttgcttgatggctacctttagtcctcatctccctatcactgccaagttcatcaaatgattcctcctcatcactatctgcataaggggttttattccttgcctcatcaccacctgtttgcattcttggtttagccctctggaaaaaaatgtcatctaggttctctagttgtcctgccttaaccttcctcttgacctccttgtaatgtttctctatctcaacagcctcttcatcatcatctgattgagcatcatcccctggagtataatcactgtcagaaggtgggtggctagctatgggtgtactgtcatatgttggatagtcaggaatgggtgcattggcagaaggttgatggctaccacagggtgcactttgacaatgttgatgcctagcaataggtgctgaatcagagtggtaaataactatcctcctatcagtttcttcctctgccagttctttacccttacatccactaccaccaacctcatcaacccctttccctttggatacatctatatcaacctccattttcccaccctcctcttcactttcaacttctaactccatttctacctcccaatcactgtcatcatcagacccattacacaaatcaacaatctctggctctttaacatatacatctgctacatccaattctccagtacagtcacacatcagtttgcaagccttatcattagaaagagcacgaagacctgtttgcaaatctttaccaggaaacaaccagtggagcaaagtcccagacatcacattgcaatggtcctttaggtgtccaaatagctcgggcaaagaaaccttgtctctttctacatatgatagagcctcagatccaccacaatatttcttctcactcccatctaaaacaaatacgcccttcagatgaaacctaaccacaagagtgtccaacacgtccatccccttcatgcagaacaagatataaaattgacttagagcattttaaatttgtcctacactcggtccaaaaaaaaatggtcctacacatgcatacctagtaccaaatcctaacttctgcaataaactaagcctaaacataccctaatcaagtacaaacctaaataaataactcgcagcttacaccaaatcccaacatcgaaaaacattaaaaattattccttcccacatcccactgataccatgcaacaacacaaactcagagaggaaatggaatacctgccggattcggatgtcggattgcggggggaatactcgccgatgaaacccccgccggccgccgcacctagctccgactccctaccgaggtcgccccaaggtggttgccggcagccacgcctaggccaccaccagatccaggtcgagctcgatgttgtcggcggccgcgccaaaccagtcaccacctcggcgcgacactctgccatcccttccgccgccccttccgccgccgcctgctgcaaatcgacctcgtcaccagcagcgtcgccctggccgtcctgatctagggttttcacacaagtgaggagtgacaaatccgctgtgcgccacgagcctaactgcgagcctaactaccgccctgctgactcagcgttgaaccccgtcgcccctgttgactcagcgctgaagaccgtggtcaatgtgccacatatgacaaaccaggcacaatactgccctgggaccaacaatgacccggttttgaaagttaggggacccccgatgtctggttttgcggtttgaggacgttttggtaactcgatgacaagttcagggagcttcggtgtacttttcccaacaagaaacgacaaaaaccatcgtgcacttccgtaaaagtctagcagcccagtttaaaataaaaagcctaattgacttcctgttttctttgttgatgtaggccagcccacgatgatttcccctattcatgttacttgcaagtccaagccacgtgaagtttttcctttttttgcttcgaaggcccaatgtaacgatttttagcctaaagagttatgcatttctattttccctttaaatttctgaaatgtggtaggtaggggtgggaaaaaattatacctagaaactttatacgaatacaactttatacatagaaagtctacgcatagaaaactttatacgtagaaacattcaaagtatatacacatggactttatacacataaaagttatatgtagatattttatacacataaactttatacatagatactttatacacataaactttatatagataaaatctatgcatagaaactaaaattcattagggaatagaaagttttgcaaatgagtttaaaacaaatttgtatcctacataagcacaaaatatccggatgggccatgagcccgtgaggcccatgtagttggatcagtgcgccccaacaaatttccgagtcacgcgtccgaaactcccgcgacccagccacgtgttttcccacattcgcgcaatgagcaacgcgcgaacgtttgcgtattaacgttctcgcatctgaggtccccctaacctgacaacgaatccaatttttcgtcctaactgtcaaaaccagtgcaatataggtcccatggcggtttggatagtgattttcgctgatatggcgtctacgtggctaatttgactcggtcttcatatgacattgtagtgacgtggcgcttacgtgacaatttgatttgaaaaataataaaaatttttggcccacatattagttacacaaaaaaataaaataaaaatggtgaggctcacgtgggccccacatgtcattctcacccctcctcttcttccttctctctctcctcaactcccctctattcatctctctcccccctctctgtcctctctcccacgacaagctcgacgcccggggcgagcagatagtgtcctggatgtcaccctcggagttgtagctccggctgcggagcgcgtcggcgcggttcatactctcgctccggtggatgggctcattgatgcagtcgttgtcgttgacggacgacacgtatgaccctcgccggggtgaaccggtgcgaggggacctcctcgtcggcgacgacctctgtgccatattgttggaattaatagatgggccttagcccattcgaagattaattctttggaaaatcataaaagcccacctcatgggatggcatacatggggagtttaataccaccttacttattctagaagagggggatcacattaaaagggaggatgccctcctacccacttgaagcatgtgaggtggagagaagtgggggaccacgcgctcgctcgcctcgcctcgcaggcggcgcgtaggcgcgcgtgcacgacttacgtcacccttgcgcagatgcaaactccttttgcagttttgttttgctgcgggaaatttttgcagttttgttttgctgcgggaaattcggatttgttttgttttggaaacattccgaaaaatccggtgcatgaaaacggtgtggagtccagataagttacgcgcgacttattcggttcggttacgtggagtggagatcgtacgggcgccctgatcaagcaacctatctctatataaatcgagccgcctccttcacgcaacacacgcaaaatcaatctagggtttgcctcctactctgtgctgcgctatcgctcgtagactactccatcccgttcgctggcgtgcaccggcgatcatgagagtaggtctccggaacctctgccttcgacgtcctgcacaagggaaaggcggcaataaagtttttgggaagcgctttgcacgactgcaccctgttcgcctgcgacggctcgtcttcctctccgttcgcgtgctacgcaccttcgtcgacgcccgcaaccgcgagtagttcctgccgagcaaccggtctttccgcaatctcggtacatgttcaatatattgcgcatatttaatctgttcatgttatactatgtaatttacatgtgtagatctaatgatgcgttgatgctagtttacatctgcaatgtcatgatttatttatagaataaattaaatcattatgtaattataatttcaactcatgcgcgacgccgccctcgagctggtcacgctcggcggagaggtacctccagaagtagaggatgcacgtgttggcgaggatgccgacgatcatcaccgggaagacgccgaggaggaactcgccgaacgtgatgccgctctcgacggcgatgatgaggttctacgggttgccgatgggcgtggcagccgagccgatgttggagctggaggcgagcgcgaggaggaaaggctgcgacgggaggttgttctggcgcgccaccttgaggatgaactcggtgaggacgacgcagctggtgtcgttggtgaagagcgcgctggcgacggcggagacgacgcagacgcggaagaagaggtccttgctgccgcggctcttccaggagagcatgttgccgaggtacttgaacatgtcggcgcgctccaggaagatggagacgaccatggtgccgaagaggaggccgaggatggggaggtcgatcgatcgatagatgttttctccgatcaaattggttccccaagaaccctagtactgatcctgcaaaactggagcagcgtgtgttagtgcagaaaccaaccaagaactggacaaaaaaaaagcacagaactgatcaatgcgcagaatcttcggtgagatcagacgaattaactgaagaaataatcatacaagaatcggtcacaagagattggccgccgtcgaaggcatgcgaagtacgttgcacatcatgcagcgtttgagggtcagtcacacactcacacatggctaagaatagctagctaggcagcatcgatcacccacaaattttgacaatttgaccctttgaaaaaattaattttacaaataaactgtcgccaaaacttatttcaaaatgatcctttttttcaacgccaaatcatttggcgttgaacttagacacctcagcgccacgtcaactggcgctgaatgctgagccaccgcggatgggaggctaagtcagcgtgccaacgtacattcagtgccacgctatttggcgctgaggtgtgtaagttcagcgctacatgatttggcgctgaacaaatggatcatttttgaaataagttttgacagcggttcatttgtaaaaatagtttttacaaagagttaaattgtcaaaatttgtgatcgatcacctgtcgatttttatccatggagtcgctcacctcaatcacggctcgatcgagcagcacgtccggccgctgaggacgaaggggtgatagctaaagccaacacaaatacacaacacaacgacgacgatgacgatgatagcatacacaagtccaagatcgccggagtgggagttgcgtttgctcgctgtcgtcttcgtcgacgtcggcggcggtgcgtggttgtgatctcctcctcgcggttgtgatctgaggccttggcgatgctggaggcgaggtcgagcagtagcgcgatgccgaccgtgggtggggcagggggatctctctctctcgacgacgcggggtagcggcggcggtgtggagtctggactcactggcgtggagcaaaagccggaaggcgaggcagaaggtggaagaggtggcgggggctgggatgacgacgacaacggcgaaagcgacggctgtgaggtggcgccacggcgcgaggagaagcacctgaagtaggcgcgacgaggaagaagagggagagccgagaagggatagggaatgatatgtggggcccacgtggagcccaccatatttacttttttctagctggcatttgggtccacgtgggccccactgcttttatattttttgtgtgtagctaacctgtgggcccatggtttttattatttttccgagatattattgccacgtaaatgcatgcgtgggacagagacctagtcaaaccagccacattagccagaaccgtcttccaaaccgcaagagatctcatttgcatctggttttgacagttcagggactaaaatcggatttggtgtaaaataagggacctcaaatgaacttattccctgtagctttaatggactgtttccacaaatctagctaacggcccaatagaggtctatttcatttcgaaataagttcacatgtcctttaatttgtctctacggttgaaataagtccctaaccaaaatgatataacaatttacaaaaccgaatcatctgagaatttcctagacagtatgaaacctgattttagctgatgtgacaagctgagtcatcgtgacactactggggaaagggacattagctagaaattgaaaaaacttcttttagcccacatataaaaaattgattcattaattctgaacgggtgtcggtttcattgatataaattagagttttccatgttctactcatactcctatggtcttagtattatgtgagtggtccaggagtatgattgggctagaccaagaacgaataatgcccaacagacactgtttattgtctttcctagctcaaggcgagaaacaaaagagaaggaagatgggcgtcggtgctccgacgaccaaacgacggtgatgaaagtggtaagacgtgtcccacgatataactcgtccatagatggtggagcttagcaataaagaaaaccagaacaagagggacgctgggggcaacaatgaggtcctgatacatagataaatgacaaagacgagatctagtggtgacacaaccggatgagtgcatcaaaacacgttcccgaacgagaggattccattttccttgtaagcgcgggaaaaaccgattaatactattcattgtcttccctagccaacacaagaaacacaagaggagggaagatgggcgacagtgctccagtaaccaaacaacggtgagtaaggtggccggatgtgtcccacaatgtgacatccatatatggtggcggttggcaacgaagaaaaccagaacaatgggaacgtagcaggcaacaacatggtcccaatagagagaaatgacaattgtgagctcttgtggtgaacatggccgagtgagtacgtcaaagcgtgttcccgaacgaggaggttctatttttcttaaatgtgcgagagggagggaacacaggagagaagagggtgtcagggttacagataaggtataccttctacccttggatatatgctatacggaaatacgttatagcagtgcataatcggacgttatttgaacacgctaaggaaatcaatcacgaagtctgccaatggaaaggttcctacccgtataggactggatcgttactatatcgtgcagggtccgatgtctccgagtcctacttggagaccacccgacctgcgatataaaaggggcccccccggggggacctaaggcattttatctcagagcctacacatcggccacagcttacgaagtcgaagactacaggagccaagtcgccaggtgatctagtcgaatcaacttgactacgatctcgtcggtaccgctgagttctattgctccctttgtaatctgtggttcttttcatataatctcatatcaactggattagggctattacctgctaaggggcctgaaccagtataatcttcgtctcttgtttccttgatgtcgtattacgtagatcctcgtaccagcgcacctcaataccctctatatccggtctacgggtacccaccgtctacagtggcgcaccaggtagggggccttggtgctcaaggttctagtgctatgacatcgagcttcgtcgacaacagagtcaacatcggccccatccaaggaatccctgcttcaacaatgctggtgtggactcaagtcggcgaaatcgtcttcccggtctacaccacggtgccaatctcggctggtccatcaataactagagacgagaatgccgtgattataaactcggacgatccaaagtcgaagaatcctcccgccgtggcagagaacggaacatcgacgtcgtacaagctcgagaagattcctagtgcggccgagccttgtccttctgacaaggactgcgagccgacgaggacaacttccgagctaaccaagtcctggtgtcctatccacaagtccaggaagcacaacttgcaagcttactgggtttttctcaacgtacaagctaaaatccgtgcttgtaaagagcgtggaatccagcgtacttctccaactcgtgatgtctattgtcctattcacaagacgaagaatcatgatttctcaagctgcaaggtctttctctgcgccatgaagacgacacttcccaaggtccagcagtcaggaacctgtctcgaggatacagacaaggaacaaggagcgacgttgacttcggatcgtttcgttggagtaatcgacatcgatccccgcaaaccatcagtccttcacttgctagaagactatggcttgtcatcttctagtacaccacgcgacgtgtttgccatcggtgggactagcacgtctgcacaggctaacgcagaggcagagaaccagacggccacaccagcccaacatctcggcaccgtcaacacaatattgagagaagctccctatgaccccgtgcttaacgatgatctcgcacgatggacggaacgactatgggaatcagtagccaatctcagtaacacattcgaggaagctgctaccagagcacaactggaacgatcgacagctgacggtgccgacggtgaaccaccggaggagcggacgtcgcctgcacgagctacccctccacctcgcggcaccagcgatctccgtgaccatctgaatggccgccaagaagcatgacgtgcacgagacaacgagaatcgttcccgacatcgtgtttcttcacgacaacgcgggaacgagtagcgaggaggccactcgaacgagggccaacagcaccgtgatcgtcacaaccgccacggtcgcgataaccgtgaacagcggacaccagacgatgatggtcgggggcgttagcatgaaggtgatgataacggtgaccggcgccaggacaacaatggtggacggcgacataattctcgagaacccgaacatcgccctcggaatcgcacgccagagccaagtgagccatcgtcgtcatcgtcatcatcatcttggtcttcgtcatccaataaacgtccacggaggacacacgatcgccgacaacccactgcccctagcgctgtgtgtagagctttcaaccgttctctacatgatgttcgatggcccgagagattccgacccggagcaatagagaaatacgatggaagtactgaccctgaagaattcctccaggtctactccacggtactatacgctgctagggcagacgacaatgtgttagcatacaatttaccaacgacgttgaaaggttctgcgcattcgtggctgatgcacctcccaccttactcgatctcttcatgggcagatttgtggcaacaattcgtcacgaacttccagggaacttacaagcgccacgcgatcgaagacgatttacacgcattaacacagaatcagggtgaatctttgagggactatgttcggcgctttaatgagtgcagaaatacgatccccgatatcaccgatgcttctgtgatccgcgctttcaaaacagatgtcagagatcgctatactatctaggagttggcaacaaggcgaatcactaccactcaaaggttgttcgaggttgtcgatcgatgtgcccacgcagacgacgcgctaagacgcaaaaacgacaaaccaaaggcgggaggagagaagaagccagccaaggacgcacccaaatcaagcaagaagaaaagcagcaagagtaggaagaggaaagctcaagcagaagtccttgcatctgaatacgagcgcctgcccaaacacccagacccacaaggcagtgatacaaagagaatatggtaccctatacacaagtcagacagacattctctggaggagtgcctcatcttcaaaaaatcgttggaaaggtagttggctttggagaagggcaagcaagtacgtgtagtcgagaaggcaactgaggcaaccactcaggactcggactccgcgtacccagattccgatcttcatgtctcgcacatcttcggaggttccatagcgtactcttcaaagtgagaatacaaaaaagtggagcgtgaggtttattcgacatggcagggggctgcacccaagatgaagtggtctgaacagaagatcgagttctcagatgaagaccaccccaaggctactgttataccaggacgatatccgatcatggtcgaactcactattcggaatatcaaagtagcgcgattcctcgttgatggcggcagctccatcaatcttctcttcgccagcactttggacgcaatgggaattccacgaagcgagttgacacctaccgatcaacccttctatggaatcacccctcaatcttcgtccaagccattgggcaagatcacgctcccggtgactttcggccaagcgagtaacttccgaacggagcagataacatttgatgttgctgagttcgacacagcatacaacgccatcatcagaagaacgacactcgcgaagttcatggccacatctcactacgcgtattaggtactcaagatgcccgggccgaagggaacaatcactatccaagggaacgcaaagctggcggtccaatgcgacaagcggagcctcgacatggtcgagcacactcctagccaacccgccacagccgagccacccaagaaagtgatcaaaacgactaagacgccgaaaccagacggcgcaatcaaaatcgtcccactctccagtgccaaccccgacaagacgatcaagatcggggcatcaatgaacgagaaataggaactcgcgctcatcaccttcctccgcgacaatgcggacctattcgcttggcagccgtccaacatgccgggggtcccagggaggtgattgtgcacaaacttatggtgcgacccgatgccaagccagtaaagcaaaaactgcagagatttgcaccaaatcaaaaacaggccatacgagaagagctcgataaactacttaaggctggttttattagagaggtactccatccagagtggctagccaacccagtcatggtgcggaaggccaacgggaagtggaggatgtgcgtcgatttcaccgacctcaacaaggcgtgtcccaaggatcacttccatcttccttgaatagaccaactggtggactcaacagctggttgtgagctgttaaacttccttgatgcttactccggctaccaccaaatcagcatggcagaagaggacgaggagaagacagcattcatcacaccgttcggtgtattctgctacgtcaaaatgccgtttggactcataaccgcagggaacactttccagcgcacggtccaaggggcacttagcgatcagctgggtaacaatgttgaggcctatgtcgatgacatcgttgtcaaaaccaagacatgcgactcattgattgacgatctacgggaaaccttcgacaaccttagacgatattgcctcatgctcaatcctgagaagtgcatgttcggggtaccgtcaggcaaactgctcggattcctcgtctctggcagaggaatagaagcaaatcccgagaagatcaaggaaatcgagaacatgaagtcgcccactagactcaaggaagtacagaagctaaccggatgcatggtggcgctaagtaggttcgtcgttaggatgggagaacgaggataacccttctttgcactgctaaaaaagcaagacaaatttgtatggacacaggaagccgaagaggcgttcatcgcactcaaccgctacttgtcaaatccgcatgtacttgttgctccccaacctaatgaagagttgtttctctatattgccgccacgccctactctgtgagtaccgtcattattgtcgaaagagaaaaggtgtagagactagtctattacgtcagcaaagctctacacgacgcaaagacaaggtacccacagatccaaaaactgctctacgcagtaatcatgacgtcgagaaagctacgccactacttccaagcccacagggtcatagttgtctccgccttccctcttggtgaagtcgtgagaaacaaagacgttgtcggccgcattgcaaaatgggtagtcgagctaagtcagtttgacgtccactttgtaccacgaacagccatcaagtcccaggttctcgccgatttcgtagccgattggactatgcctgaaaacaggttagacagccagactgacaacgaaacatggacaatggcgttcgatggtgcacttaacagccaaggagcaggtgcggggttcatcttgacatcaccttcaggagatcagttcaagcatgcaattcaccttaacttcagggcgaccaacaacatagctgaatatgaaggactactcgcggggataagagctgcagctgcacttggagtcaagcgacaaatcgtgaaaggggattccgaactagtcgcaaaccaggtgcacaaagattacaaatgctctagctctgagctgtccaagtatctcgcagaggtcaggaagctggaaaaaaatttgatgggatcgaggtccgacacgtatatcgcaaggacaacatcgagccagacgatctagcacggcgtgcgtcgagacaagaaccacttgaacccggcacctttctggacatcctaacaaaaccatcagtgaaagaggcaaacgacgaagatagcccagtaaccccccgacatcagcccgggggctacagaggcagaacgcgccgttgccgacatcgagaccacggacgactggcggaccccactcattaaattcataaatagcgacgagttgcctgaggacgacgcagaagccaagaaaataacccgtcaaggaaaaatctattgtatgatcggcaacgatttatacaagaaggcaccaaacggggtacttctaaaatgcgtcttgtccggcgacggtaagcacctcctcctcgacatacatgaaggggtctgcgggtcacatgccgccggtcgtacattggtcggaaaagcctttcgacaaggatttttctggccaaccgccctcaaagacgcttgcgacatggtacaacggtgtgaagcttgccaatttcacagcaaacacacaaagctaccagcgcaagcactacaaaccatccctctcacttggccattctcgtgctaggggctcgacatactcggtccattctcacgaggacagggcggctacagattcctgttcgtggcgatcgacaaattcaccaaatggatcgaggcaacacccacaggagaaatcaaggccgacaacgccatcaagttcattaaggggatattttgccgatatggattgcctcaccgtatcataacggataacggctcccaattcatcagcgccgattttcaagattattgcatcggactaggagtcaagaaatgcttcgcctcggtttctcaccctcagagtaacggacaggtcgaatgggcaaacagcatagtactacaagggatcaagacccgtgtctatgacaggctcatgtcacatgataagaagtgggtcgaagaactcccctcggtactatgggtcgtgcgcaccacaccgacatcgtccaacaaggagacacccttcttcctcgtgtacggctcagaggccatgctccctaccgagttacgacatcagagtatatgattacagaagtactccgacgagaatcaggaggaacagcgaaacgacgacgtgaacctactcgaggaatatcgagaacgggtcaccgtcagagcagttagctaccaataggccctccgccgatatcacgagaagctcatccgagcacgcatactttcgatcggcgactacatcctccgacgagttcaaagctaggcagggcgaaacaaactctcgcccaaatgggaaggaccgtacacgatcacacaagtcttgcggccaggcgcattcaagattgcagatggcgatggtcgcgagttagcaaattcttggaacattgaccagttgcgtaaattctatgtataagtcaatagtttccgtacttgtaagaagtcttacaacttcaataaagtctgttttaaggaacagatttcaatcacagtgccccttcccgatgatcccttacccggacgacacatagcgttgaaacctatcctcatgtccctttacgccgtcttgacaaggcctccaaggaacctaagggaacttcggctggggacacccagagctgataaggccttgtcggatccttcagagacgaaagaccatgtaagatatggtcgtgtaagagttctcgccgtgcatattaaccaagccgtgtaatcggaaatggatttttccaacttcacgactaggggctaggattagtgcttattcaactaaggcaagtcgagagtccaagagccttatctcccgagaagaattctccgatgacaaggctgggggctagggagagtgtataactcaagtgactgatcgaagtcgcgaagtgagaagacactcgtgcacaccgcatccagcgtaagaaagcttagttagatagatttcctttctgtttcacaagcatttcttatagatcgtaaagaatcctaaaatatattacaattttcttaagatgtgtgtcacagatatacaagcaataccaggaaggccaacgccaatccattgactagaagattttctccgccagcggagccatcgactttgctaggttgtctatctccgcaggattcctccgagaacaggaaaaacccttgtgaaggaactcgagatgcaactgcggacgatgatctcgtacacacgccagcacgtgccctccggcgtatcggctcgattgacgacattcctacttcagggcctcgtcgatacgcccaccgatgccatcaagctgagcacaagccccgttcaaccatgagatgaagccagccgctgactcctcgggatccccgcgaggtactcagagctctctgcagacaacgaccatggttgtgcaacaactcctgaggtacgagttgaaccatacctcgcgacctcggagcgcctccacggcccggtccctcttctcttccaatatagtcctctcaagttcggcgacctcgaacttcgtcctccagtactagatgcgacggtcgcgatcagcaagcatgctctcaaggtctgctcagcatgcaaacacctaagtcaagctaatcaagacagacgaggtaaaggaaagggaaacgacaagaaccaacctaaaggagtcgacgccacatccatctcctcgggcagatcctggtccatgccgtcccgcggcacatacggctcgagctcaagtgccggaacgactacaggcaattcgggatacccgtgctgttggacatcctcgacatcggcatctctacaaacaacaggcaaagtacccggaatcaaaacgccaaagaaaactaaggtaacgattgcacacacaaaagaagttggaaccaacgaaaagtattacaaagcgcgattggttaaggggtacagacaagcggtggccctactcttcaaaaagcgggaggacggattcccccaaatcaccgacttcttccatcacatccttgcgcgcgtcgctagccgccccctgatccaagatcttctgaagatcgagttcagggtgcgccagcttcacacacgcaaggacatggcatgccccggtataaatcccgttagacgtctcctctccgatcctggccgcgtgcttggagaggatcgcctccatcactgtcgcaagttccgcaagtgaagtcgtcagccataactcatcgggattcgccgggatggtggtcttgacaccgtactccccggcaagctggtgcagactagtgtaggtgacccgcagcgagccacggatttccgacaagttgttctcgagctccgacatacggtgctcgagcccctgccgttgtcgctcgttgccggccaccagttccctcatcttctgtaggttctcgcgaacctccgccagatcatgcatcagccggtcggcgcgctcattcgccgatgacgccgccgccgccctcgcctccgtgatcttgcggctaatgccgcgagcaccaacctcaaggaggcgccccatctcgacctagagctcctcccatgtgaggacggcagccggcgcaccccgaccagccgcgagattgctggctgggccgctgggcctcacatcgcggctcctgggcacgaccacaacatctgtcgaggccacggtaggagacgcgctagaagtccctccagatccgtcttgcgccgctttcgcccgcgccgccctgtgaaaggctacaattgagacgtgctgcatgagttcgacgaagtgacaaaacctcaaattcatccacttctcgcccagcgtcacaagccgctgctgtcgcggaggcgggggagacgcatccgaggcctggagtataacgggcgtgatgtgaggtgcaagttttccgactacgtgatgatggaccaggagagcttaccgagggggtgggcgtcttccgacgatttccgatcatggaggagaatttcctcccccttttcagaacgttgccgccacttgttgtggcagcagcggcagcaacatcaaatgcctccttggcgacgccctccttcagctacgccaccgcctgatggtccacgagcggtccgatgatatcagtcagagggagagcctacacttcgtgaagtcacaatgcgatcccggaagaaaaatgcaaaagggtcgccgagtacactcacattgatggcagcttcgcgttcggctgcccccttctcgcaaagagcaacagggacgttgctcaccgtggtggggccgctgatcatcacttgaccgatgcgatgctctacggtttcactgttcaaacctgtagatcaagaaccaaaatcgataagtcaggaggaaaccccgaggagaaacccgggtcgcgtcctccgaccctgagtagtcaaaggctggatgggctcaagcctggagcggctggatccgtctaccgatgaagtcggcagcgacttaatactccgacaaccctcgcactcggaggtcatcgatgacatcgatgaaagactgaagggaggggtcaaggcgggcttggcaggccaagacgaaatcttgtctggttgctcctcgggaacaacaaagaccggatccgagttttctatctgaagatagaaccacctcgcccgccatttactacgagaagaggggcactggaaggggatatagcgcgacttcaggccatcccgaagtcggaaaccaacgcatcctgataccctattggattccatccaacgcaactcatagtagaagcgaaagaggtcacgaaatagttctaccccaatgtaggcctcacaaagatgagaaaagatactgaggaaggtgatagagttggggttcaaatggagcagagaaagaccgtagaaattcaagaccaaaagaagaaactcagagggaggaggaaggaaaccacagagaatatagtcctcaaccgcaaccatgcggcccaggacaggttcaggttcaatacctcctggttccctctccatggtcccgcgatcggggagagcgccttcctcctacagcttcttcagcgacgcgcttgtagaagtggacttgtcgaggtccattcccgtcgaagatcgtcggagaaggggctgagatgaacaagctagggtttgtgtggaagcggagaagacgaagagttcttgaaggcttgaaagtttctcgcaacagccggactccaaaatggactcccaaaactcccttaaataggtgcactaccgacgatgcgaattccaaggaaaggagagagatgaccgccagaaatttctgggaccgttgcgcaaggcggtttcttggacttcaatttaaattcactcataaccgttggacttcgcatggtattgtcgatcactctttgtctctacggtccccacactgagatcgaccagtcgagaacgacaacaactccgacatcagaagtcatgattggttacacgagttcatttaagtagaagtcgggggctactgtcagggttacggataaggtataccctctacccttggatgtatgctatacggaaatacggtatagcagtacataatcagacgttctttgaacacactaaggaaatcaatcacgaagtctgccaatggaaaagttcctacccgtataggaatggatcgttactatatcgtacagggtccgatgtctccgagtcctacttcgagaccacctgacctgcgatataaaagggacccctcggggggacctaaggcatcgaatctcagagcctatacaacggccacagcttacgaagtcagagactacaggagcaagtcgccaggtgatctagtcgaataaccttgactacgatctcgtcggtaccgccgagttctattgctccctttgtaatatgtggttcttttcatataatcccatatcaactgattagggctattacctgctaaggagcttgaaccagtataatcgtcgtctcttgtttcattgatatcgtattacgtagatcctcgtaccagcgtaccccaataccctctatatccggtctacgggtacccaccttcgacagaggggcgctagtgagaagagatgccgagggagagagggagtgtgtgcagcgagggagagatgggtgtggggtgccgggagggaaggagggaggcaggagaggacatacgccagggaaaagagaggctgcgggggagggggagaaatgggggtgctaggagggagggaggtagaagcagaggtacgcgggagggagaggggccggacggacgaaaggaaggcaaaagccttacgtatttttttaattattaggtatatagatatagacttgtgctataatctatctatctattatatattccatccgtttcacaatgtatgtcattctagtattttccacattcatattgatactaatgaatctagacatatatacctatctagattcattagcatcaatatgaatgtgggaaatgctagaatgacttacattgtgaaatggaggaagtactaaaagtccattaaacttcctacaaacgctcctatgtctccacgtggcactctacaaacgctccgaagctgccacgtgccaaagaaacatccaacccttgatttttatttaaattagtgggccgatccttttcgaccattagagtagatgtcaaaaaaaaataagtaatccacccatactaatctacctccaaattgagcaccactctattcgtgcaaatgcatgtatacgtacgtactctgtacgctcctattcccattcttctcttttcattctattatctatatttaactctcctattttccttctcctaatagaaagcataaatttatgtaaaaacatttaggcaactatagcatttaaatcataaaggtattctaatatgcttatgttgttagattatttataaagtaactaaatcatatatatatgttttgatcacactactaaaaaaaggcacatagagatcggtgttataggtgctagaagtgataaaaccgacacctatataccatttctcacctctacgggttgaaaatacaaaaaactagcaactttaataaactataggtgccggttttctgtaatataggttttctgtaatataggtgctggtttttttaataaaaactgacaccttcaatttataagtgtcagttaattaaaaaacgacacttggtttttaaaaaactgacactaaaaatatgagctgagccgaccggtggtctcgagcggacaaggctgagagggctcagtgccactctctcgcgcgcgtataagaccgagagtttctcgctcgttctctctcgcgctcctctctatctttctctatctctcgctctctctcgtgcacgctgttgacggtcgttagcgatcagcttcgaccgtcaattttaccaaaatagaggagaacgagttatgcttgcaatgcatattcatgttagaataataatattccactagtatttggttcactaaccttttgtaaagaataaccctaaagtggtggagaatcgacatcaactcagacgataaatcaatcggacgatgtcgagaatcagacttatgcatgactgggccaagaactcagaattggcatgatgaactgggccaaaattcacaagtctgcgtatgagagcaacggaggaggccaccggccgattttgggccaggacggcccgacccatggttcggccgaaccccccgcagcgccattcgatccaggtttctcctggacggctgagatggctccccaatgacggttggtgagtattaccgacctttccaaccgtcacaaccgtcattctcaagatataaaaggagctctcatcctcacttcactcacacacctcaagcaagagttctctcatattctctcaagttagtttagtgttctcaagctagtggaataggaatagagtataaatcggagtctggaagccttcggaagagttcgggtatggctctagtagctcttctcttattttttgtatttagaatactcttctatatacatttatggtattgaaatactttccgagtatatgaataccaactttactttatgttcatgttatactgattatgttgctagcttatctgggagatgctttggtacgggtataatgtttgcttatgcaattactctatgtcatgacgatgatattagagtagtatctggtagtttaggcgttgtgtcaagattactggatatcattatttgggtttatatgctgtggatgagaagtgggccgctgatggtgacagctcagtacgggtattcctccgcgcgtgtatattgtcctaagttaattccctggggagggtactgtcgcgtcccaaaacgaccctaaaatacatcctctaaattatgcctagaataattaaaatccgtgtgaaagcctccaacaattaaaatgtgcaaagttaaaagtcaaataaggcttgcaggatttttgtatatttcctaaaagcctaaaatgcgtaaataaattttagtggaattttcagagcacaaataataattaagaagaaataaacaaagttaaaaaggttttataaaaagaaaaaccctaaaaagtctttttccccccctccacctcttgggccggctcggcccacctccctccctctctctcctctcccccgcggcccatccggcctcctccccgcgcgcgtgctgctgacgggcgggctcgcccgccaccctcgctgacgggtggggcccacccgtcatcccctacctcccgccgctcccgccgcctcgcccgtgccctagcgccgccgccgccgcaaatcccgccgctcccgtccgccccgcgtgcaatcaagaggggggaaatattccccgtgattccctccctctttccccccacttttccctctctctctccatcggattcgttcgggatcttttcccctaaacctcgccggcgcatcaatggcggccggatcttccgcggccgtttccccctcatccggccgctctctccccctcccaaccctatataaacactccccgtgcctccctccgccgtttccgccactcgccgctctctatccccgccggaatcgagctcgcgccgtcgccctctctctccgtcgtcgccgccgagctccggtccgccgccgttgtcgtcccagaccacctctcccctcggcgccgcctccttcggcttcgccgcatccccggcgacctcgtccacccctccgtttcgctcgccgaccgccggagcaccgtcgaccccgtccacccgagccgcgccgccgccttcctccgctccggtcgccgtttccgtcgtcgccgtcgacccggggtgagccgtggaccgccgcttcgtttcccccttccctcccctctctcggccgccgctccgccgtacctatggccgccgccggcgaccatagggacgcgggcgcgccgcctcccgtcggctgtgccggcgtggccgccttcgggcgcgccgtgcggctgccgcgtggggcccggctgtcagccgctcgcgccctcgggtgcggctgacgcgtgggacccacggcgccggccggtgtgagcccgggtgcgcccggtccaccgtggaccgtggggctgccgcgtgggccccacccccgtggacccggtccgcgcgctcctcccctcggctgacgcaataaatccattttaaattaaaatttaaatgaacaaattcgcaaatattcatttaaagagcatataaacttcaaatggccataacttggccatttgaactcggaattggaccgttcaagtctctaatttttccctaagaagtcaagaacccatttttgtgctttgttcctgcttgttatatggagtttattagagtaaaagccttttcttttccgttggtcgtgtagacgctgcagcttcggaggatccgctcttcgtggaagttgaagccggcgtttgggaaagcgagcaaggcaagtcacatcatctttgaacatattgaatcccagtttataaaattatgctgatttaaattattgcattatcgctttatttaaattcccgcgttatcattgttttatttagccatgcctatttacctttgttatgaccttaatattgttattgttattatttccttgttcaccctagaataaacaaaaccccaactagtggacactctactcatggtaccactagtatgattttaggtagatgcttcgctgtttaattcttaggtttggcaggatactaccggaggtttatcgagaacttctccaaaatcgctcgacccatgacacagttgttgaagaaagaagagaaatttgtgtggagcccgcaatgcaagaaggcgttccaaactctcaaagaaaagctggtttcctcgccagtgttaatcttgccggatactcgcaaggacttcatggtgtattgtgatgcttcgcgccaaggattggggtgcgtgctcatgcaggacggtcatgtggtggcctatgcctcacgccagctacggcctcatgaaggcaactaccctacccatgatttggagttagccgcggtggttcatgctctaaaaatctggcggcactatctcattgggaatcgctgtgaaatatatactgatcataagagtttgaaatacatcttcactcagtcggacctgaatcttcggcagaggagatggttagaactcatcaaggattacgatgtgggaattcactatcatcctggtaaggccaacgtggtcgctgacgctctaagtcgaaagagccattgcaacactcttaacgtccgtggctttccacccgaacttaaccaacagatggaagccctgaatctgagcatagtgggtcgtggattcttggctgcgttggaagccaagcccaccttgctcgatcaaatccgcgaggctcagaagaatgacccggacatgcgtggactcctcaagaatatgaaacagggtaaagccgctggtttcacagaggatgaacacggaaccctatggaacggaaatcgggtatgcgttccagataacagagaacttaaacagctgatacttcaggaagctcacgaaagtccttattccatccaccctggcagtacgaagatgtacttagacttgaaggagaaatactggtgggttagtatgaagcgggaaattgcagagttcgtggccctttgtgatgtgtgccagcgtgtcaaggcagagcaccaacgaccggccggacttctccaacctctccaagtaccagaatggaaatgggatgaaattgggatggatttcatcaccggacttccaaaaacccaaggtggatatgattctatatgggtagttgtggatcgattaaccaaggtagctcgatttattcctgtgaagaccacctatggagggaacaaactagccgagctctacttcgctaggatcgtgagtctccatggcgttcccaagaaaatcgtatctgataggggaagccaattcacctctcacttttggaagaagctccaagaagagctgggtaccagattaaatttcagcaccgcgtatcacccgcagatagatggacagaccaagcgtctaaatcagatcctagaagatatgcttcgcgcatgtgtcctagatttcgggaagacctgggataagagtctcccctatgctgagttctcctacaataacagctaccaagccagtatacaaatggctccttatgaagcgttgtatgggcgcaaatgccggacaccgctattgtgggaccaagttggggaaagtcaagtgttcgggactgatatcctgagagaagctgaagcgaaggtcagaaccattcgggataatctaaaggtggcacagtcccggcagaaaagttatgcagataaccgtcgccgtaacctggaattcgcagtggacgattttgtgtaccttcgggtcacgccattgcgaggtgtgcacaggtttcagacaaaagggaagctcgcacctcggttcgtgggtcctttccgtatcattgctcgacgcggagaagtcgcttaccagttggagctgcccgcctccttgggcaacgtgcatgatgtgttccatgtgtcgcaactcaagaaatgtcttcgggtaccgtccgagcagactgacccagagcaaattgaagttcgcgaagacttgacctacgtggagaggccagtgaaaatcctggacaccatggagcgcaggaccaggaaccgggtaatccgtttttgcaaggtctaatggagcaaccatgccgaggaagaagctacttgggagcgtgaagacgagctgaaggcagcccatcccgatctcttcgccagttcttccgaatctcggggtcgagattccgtttaaggggggtaggtttgtcgcgtcccaaaacgaccctaaaatacatcctctaaattatgcctagaataattaaaatccgtgtgaaagcctccaacaattaaaatgtgcaaagttaaaagtcaaataaggcttggaggatttttgtatatttcctaaaagcctaaaatgcgtaaataaattttagtggaattttcagagcacaaataataattaagaagaaataaacaaagttaaaaaggttttataaaaagaaaaaccctaaaaagtcttttccccccctccccctcttgggccggctcggcccacctccctccctctctctcctctcccccgcggcccatccggcctcctccccgcgcgcgtgccgctgacaggcgggcccgcccgccaccctcgctcacgggtggggcccacccgtcatcccctacctcccgccgctcccgccgcctcgcccgtgccctagcgccgccgccgccgcaaatcccgccgctcccgtccgccccgcgtgcaatcaagattccctccctctttccccccacttttccctctctctctccatcggattcattcgggatcttttcccctaaacctcgctggcgcatcaatggcggccggatcttccacggccgtttccccctcatccggccgctctctccccctcccaaccctatataaacactccccgtgcctccctccgccgtttccgaccctcgccgctctctctctctgccggaatcgagctcgcgccgtcgctctctctctccgccatcgccgccgagctccagtccgccgccgtcgtcgctccggaccttctcccgcttcggcgtcgccttcttcgggttcgccgcaacctcgccgacctcgtccacctctccgtttcgttcgccgaccgccggaacgccgccgtccccgtcgacccgtgccgcgccgccgccttcctccgctccggtcgccgttcccgtcgtcgccgtcgacccggggtgagccgtggaccgccgattcgcttcccccttccctcccctctttcgggcgccgctccgccgcgccggtggtcgccggcggcgaccataggggcgcgggtgcaccgcctcccgtcggctgtgccggcgtggccgccttcgggcgcgcccctcggctgccatgtggggcccggccgtcagccgcccgcgccctcgggtgcggctgacgcatgggacccacggcgccggccggtgtgagccgggtgcgcccggtccaccgtggaccgtgaggctgccgcgtgggccccactcccgtggacccggtccgcccgcccgctcccctcggctgacggaataaatccattttaaattaaaatttaaatgaagaaattcgcaaatattcatttaaagagcatataaccttcaaatggccataacttggccatttgaactcggaattggaccgttcaagtctctaatttttccttaagaagtcaagaacccatttttgtgctttgtttctgcttgttatatggagtttattagagtaaaagccttttcttttccgttggtcgtgtagacgctgcagcttcggaagatccgctcttcgtggaagttgaagccgacgtttgggaaagcgagcaaggcaagtcacatcatctttgaacatattgaatcccagtttataaaattatgttgatttaaattattgcattatcgctttatttaaattcccgcgttatcactgttttatttagccatgcctatttacctttgttatgaccttaatattgttattgttattatttccttgttcaccctagaataaacaaaacctcaactagtggacactctactcatggtaccactagtatgattttaggtagatgcttccctgtttaattaggtaacattaggtgattttacaactctagactttgggatgttcatatcacctggacactatggaatggtttggttattgtggaattggcttcacaccgctccttctattcaaaatccccaaaatggttttaggctgggctcggggtgcatggttttgatagtagcacctcggccatataaggaccggtcttcgggcctatgttgcaaagcactaccgtacttccacatgtctagtgggtaaggcttagtttgtggctcagtctggttataaacaaaagtacacggatggagatggaagaagtcgggggtcgatggacatctctaggacaaatgaaggctacacgagctgcggcccggtagtcgagatgtcatggcacagggccggtgtcctgctgctaggggctcagtcctgcctgcctgtcccgggggttccggccgtaggtgggattgggtcggtactcttgtctatggctaggatgggttggaaactatgtcacgtcttccgtctgtataccgtggtggtatgtggcacatggttacacgtgaggaagatgtgtcttgtgggtaaagatgtacacctctgatcagagtaaaatctattcgaatagccgtgccctcggttatgggcaagccgagcaatgtacccaagttagtgttttaattcttaaaacctgcttaacaactaaaaggtggaatggttggcctgggttggcttgggacgagctgggacccagggtcgggttgccagttcggtctgaatcatcgtaggccttgggttaaggcaggttcgtgtgggttcacggccttgataaataatattgtatagttctagaatcgtgtttactaaatagttttgagcaactaaatatctttaaatgctgtttactgcaaccctaaccctttatagtataactcctttgtactcccttgcatttattctgcacttgtgggtgtgtcttgttgagtacggtggttgtactcagtcttgctcaatttttcccaaacccagaagaggagcccctggaagatgaaggctttggtgtctagctcgtgcctgccgtcaagcgcctgtggtcgtcgccctagtcttccgctgtttctcgtttgtctttgtgtgtgctgggccttcgctgcccatgtaataaattaactatttacgcttccgcttgttaaactctgaattgtatcaacttttggtgtaccttgcctcctgggacaaggaataatacacgcacgtaaggaacgcccgttgggttatttccggtcgtgacaggtacacctccatatttagccccggttgtatggtcatgacgggctgtcgtaaggaactcgacagtcatgggtggcttctcgaagtaccaggagggcatcggatagaggtttttatctagtatatcagatacctaggatgtatgtatactatgtatactagaagtattggaatagattctatctcttttctttccttttaacttagatattttagtacacatgatttatcttaacccctgcttagactatggttattacaagtaacatataaataattagtcagttctctctactatgatctacccacgggattaaataaatacgatacccttggaatactctcgagtgaaatgctacaatgatatatccgtgtgcttacggattgattctgtaaccataatataccagagtaatgtcgttaagaaataccaacaagcatttcaggcgccgttgccggggaagatttataatagagattaccagaactaatactttttatttacctctgtataatcactttcctttgcaggctaaccttggttgttttcacttttgttttggaaacagggtagtgcatgactggtttcaacttaccggaaaactttaaggaaaatccagaagctttcttccggagcatcaaaccgcgagtcgttgctccgcagaaaactctcccgacaaagaaaccagccatactagcgccaccgaccttcaagactatggctgacaagactctccgtgaattcgctgctccctctgttggcaatgtagccattgggccgcagctcaacctgggagatgtggattttgatttgaagtccagcctcatcacgatggcgtaggctagcctgttctgcggcaagcctaacgaggatgccaacgcttacttacaacagttcctggagatctgtagcacgtacaccatgaagggtgtctatcacatcctgattttcgtttcaggatttataaattatttaataaattaataatataatttatattaaatgatctttaatttacaagtgaagttaaatgtgggaaataaaatttcctaaatataaagcatggatgggtttaatttttattaaattctccatggttaattacactctcttaaattttctcggatttttcggagctcaattcctaaatgatacaaagaacagttcagtaattatttgattattaatgatctaattataattgttaagagcttttcttgtttaaaaatccttaaattataaattgttgtttaaaaggaattattagaaatgattttaaaagcctagaagagaagatctaattttaatttgttaaatctcaatataaaattgggccagataagatttcattaaatactttgcttaattctataattcctagatttttctgggatttatttgagctaaggaagtatttttaataaatggaattgcatttcatgaataatttaaattgaaaaaggtttttaaaagtcttcttttggctttgggccgaaagccggcccaaaaccctctctctctctttccctcggcccagtccggcccaatccgccgagccgccgctctcctctctctcagccgctgacaggtagggcccgcttgtcggatccatcgtcttcgtcaagccgccgccgcccgaaaccctagcgcaagccgccgccgtctccttccaaattcggccgatcctttccttctccggccgaatcttttgaggggaaataatcttctcgatctcctcttccttttctcttttggaatcaacggctaactcggtttggaaatccgtggattcgagttcgattcggatcgatctctctcctccgaaccctagctttccttcgccgttccttcgccgtctccgtcgccgtgggccttcgccgccgcctccttgcccctttaaaagcacccccggtgtctccgctacccgtcgccaccttcgccttcgcctctcgtcgtccgtagcgccctagcgccgtgccgcttcgtgccgccgtcgccgccgtcgctccagtcgtccttcgccgttgctccagtcgtcgccgtcgctcgggaagaccgccgtcgtggtcgccaagtcgccgccgtcctcgtccaccgcttcgccgtcgccgaagaccgccggagcaccgttgtcaccgttgacccgatctccgccgccgcttcttcctcgtcgccggcgccgtccgttgcccttccgccgttgttttggtcaccggtgagttcgccgcgtcgccctctacccgttggtgccttccgttcgcgccgccgtgccgtcgttcgccggcgagcatgcaagcccgagccgccgagccgccgccgccggtggtgacgtcatcgccgacgtcatcggggccgttcgctgtgagccggtcgtggaccgttcgatctcggccgtccgttttggatcaagtcgatctcggccgtccgttcgcatgagccgtcgcccgtgcgcccggtccaccgcgaaaccctagccgctgacgcaataatcctccttttccttttcaaaaataattcattattgcgtcataattcaattaaaatccatataagtgttttaatccgatttaatctttaaaaattcataactaattcatttgaactcagtttaatgtggttcaagttgcaaaaattatataaaataaagatctacatattaaaattgtccataaattgaattaaatttatttaattctttttaaatgggctttaaatagatttaatcctgtaaaattcataataaattcatttgaagtcagaatgaggccgttcaagtctcataattcatctaaaattatgatctacatgtttgtttactttttatgtattgtttatttggtttttattagtctttttttcgttttgcgtgttagcttgtcgtttccgtcgttgcgaaagttcgcgagtgcgccggaagtattcagaagattatttgaagaccgattattgcaaggcaagtcacacagatcctaaacacaatcctttgagcatgttgatcctatatttaaattctctatttatttcaactgtgcatttattttcgaatgtcactgggtgttgttaacctattctttgttatggcccttttgttcttgattactttattccttgataccttgggtgattataattggactagttgagctttaaatatattggttcaactagatattagatataattgcttagccatgcttagaaacattagcacactattgggataacttatgattcactattatttaataatggcttaatgatagttcacgatggtcaatcgtgattggttaattaattacttgccaactaaaacttgataatggtgggttgtgagcacatggttttgagagtcgtgctcatgacaattaaggaccggttcgcgagctactgttgtgaaacattaaccgtgccaaccacaagccagcgtgggcaacggctttaccttttgtataacatgattcattacggagcaccagactgagaagtggcggagataagcccacgggggtcgctggggagtccatgccttgttttataagggggtgattatgatccaggaatggtgcactgtggtgagttgtgttgtgcaaaggatattgtcacagcctctattcgggtactttccagtatcgcgacgcatggtagacatgatgttgaggctgtgtcttgtgggtacagtggtacacctctggccagagtaaaactattcgaatagccgtgcccgcggttatgggcgagttgagcaatgtttttcgtgattagtctcacacctctcacaatatttatagatgttatacctggtaataatttgcttagctcctggtttggagattagatctgtacagccgggtatggttgcttcagaatggttgggcctgagcagcatgggcgtgttgttcagtgttgattaaaatttctgattaattactcctctgttttacttctcttaaatgttttgctaaatgctgcttacgcaaatgagcctatattatgccatcctttggtatccttgtgcacttgcatatttgctgtgtggcttgctgagtatgtcatatgctcaccttgcaataatcaatcaacctcacttgaagaaaaagaatccagaaggagaagacgtttggcttataccccagttgagctgcctgtgggagtggagccggagcttcgctagattttatttttccgctgcagttttcttcatggtgaggactaagtgcctcataagtaagtatttatcgttttagtcaatttgatgaatctgtatattaaattgtcagtttgtgtacctcggctgatttctggacgaggattttatgcacaaataagttcgaaaattactagtgaatttccgggcgtgacagtgtcagtccggacgttgtcaggctccggttgttcccgttttccctcctcgggaaagcaaagtagtggttttatgccaaccgtgctacaatcaatacctgggacaaatgctctatagcatttctctcgaagttctttccgatcggcaaaaccaatccccttcatgggagaatttcaagtttccagcagacaagggacaagtctattcctgagacgtgggaacgacttcagaaatatgtggctgccagtcctcatgatgggatggacgactggttgatcctgtagaacttctataatggactcactcccatgtcctgtgaccacctggacacgctagctggagtagccttcttctctaagacggttctattgacgcttttttagtcaacacaagatcacctaacgatttgcggtgtaaacaatagaatcgtcgaaatcgataggtcaaaatcggctagtgaaaccgatttcgagattgattcactttcgcggaaacacacgactaacttacaagcaaattagcaaagaggataaatatcgtacttacgtgacgacgaacgactagtttccgagcaaactagcaaaggataacctcctcgctttcgtggagaagcacgaccatttttcagcgcaaaacgacaaagattaaccaaattctaggttactaaaactcagccatgaaaacgaaatagaaaagaacagaaaagtaaataacaagaaaatagtagattgataatttgttcggggtttttccagcgaagatggaaagagtaatttataggaggcacggcctcatctagcgggagtttgtttcctttgtgggccttctcttccagcgttccgggtcgatcatggaaattccatgtacagcatatcaatgccttcggtgatctgcactactccctgaaaaatactccgtacctgacatgcatgcatcaaatcgatgatcttctataaaggcaaccattatgtgcatgaaaactaaccttaaggaataaagtagtaatttttgttgtacctttgtacattgggagatgagctagggagagaatatagggagagaatagtgctatgtgcaaccttaagcttaaggctagccataagaattaaaaatatatatcatggctttgcaacatgcatgcacactttcaatcttgagtaaatatgtgtctttttactcaatgggtcccaccttaaggtcaagaagctaccatatacattgtagcatgtactatagataaacaatataagaatgtgggtctcaccttatggctcaattgatctaaaacattgaggatgctcttaatccatgacaccttgtggcctcctgaagccttttccttcacaaaggatccggatgcctccctgcacatgtacgctgcacacactgaccctatatactacttgcgacacacatctgcaagcactaattataaatccctaatgattaaccaaacaatgggtaaaatgaccccataaacctaactaattaggagtaacagctaacatccgaacttaacccactcaactaattaaccacctgattacaagtcaacgaaccaggttaattgctgcagccacccaacagcttgcacacatgatctctcagtgtatcacaaattcctacacacaataaacttaatctatgtttcaagctaaccactcaacacttaggatctatatattctaaataatttggcctgctcaaatgaaactaattaactcttagccaaactatggtacaaacaggttcaaggagccgttgatttaatagagaagatggcttctaatatgagttggagcaaggaacgactccaaacccgtcagcgaggcattcacaccatcaaggagatagaaatgcttgctgccaagctggacctcctcatgaagcgattggacgatcacgacaaaaggccacaaggcaccatcaaagccttggactcacacgttacgtgtgagatatgcggcagcaccggtcattctaggaatgactgcccggaaacccgtgaagaggcgatgtacatgggcaacaacaacaatgggtatcgtccacaaggaggtcaggggtggaaccagccacgcctatattatcaaggaggcaacaacaacggtaatttctctaaccagcactccttgaaggatcttgtctttgcgcaagctaagaccactgatgctttaagcaaaaagctaactgccaatgacaagatcctagagaacattaatgtcaagctagatgtcctcgtttctgctttccaaaaccagttgagctttaataagatgatagaaacccagctagctcaattggctttattagtccctgcaaatgaatatgggaggattccgaggcagcccgactcctccattgaaaatgtcaaggcaatcacaacgaagggaggtaagtccactcatgaaccgccgtatcctaaccctgcaggaactaacgggatcgccaaggaagcaccatctagtgattcagttgacaaaaaggttcagccagagaaggttgtgccgcaggagtactgcgccacacaattgctgccgtttcctcaacgaagtaggaaaccgtcagtggacgagcagttcgctcgttttgttgaagtaatccagaacattcacatcaacgtgctattgttggatgctatgcaagtgccaacatatgcccgttatctcaaggatatcctcaacaacaagagatcgctcccaacaacggaggtggtcaagctgacgaagcaatgcagcaatgtcatactccacaagctcccggaaaagaagaaggatctggggtgtcccacgatcacttgctcgattgcggcacagcaattcgaccaagctctatgtgatcttggagcaagtgtcagcgtcatgcccaaagacatcttcgacaagctcaacttcacggtgctggcaccaataccgatgcacctacaattggctgactcttcaatccgttacccggcaggaatagtggaagatgtgctagtcaagatacgggatttcttcatcccggttgacttcgtggtgctggtggaagtggagccacccaagacagacagcctggtgaaattcatgcagaatttcctggaaaaggaaacaacgatgcccaggaaccgttattggaagacaccggtaaaatcaagcataccggccaagaagctagagcagccggctcagaggaagccgtcttccacaccgaaatcaaaaagggcgtggaaggaaaagccaaagacacctgctccatcacctccggagacgagtgagaaatctggaaactaaactggaaggaggtacggtcttgcacgtcgaacccaaaatgacgcgaccttcgccaaccgaaaaattggtatgtatccatatatttgttttcaacgatttaaatttttgcatcaatcgcttgtttgaatttcaaaattgcatttagaatttttgaatttcgaggaaattcttcaaatgaatttttcagagcaatccaaaataaaattttcaacaaaaatttattgtgccacgaccacactgaccgttgaaacccaaccggccaggcaacggttacctgccacttttggcagggttacggctagtgggtcccacatgtcatttctgaccgttgtgggtaccctataaaagccagccggccgagagagagaactccaccccatttcaacacattttttattctctctccaaagtttgctctcaagttcatccaagctttgatagtttccctcaaattcaaacacttagttgcatatatacaagttgctttggtgaaactcttgctattctaacccccgtcgagttagtccattcttactccattgtgtagaatgaggaggcgattgtctcgcctgttcaaggggtctggctcttcatcaagtcatcatgacgagtctagtgctcattcatcagctgatgtctcgatggaggatgccgacgctccgcgacatctcctgaacgacgccgacctcgaccttgtcgatgatcgggaaatgcaagcctactatctgctgagtgaccggaaatatgctcacacgcgagaatactctccggagctgctgaaaaagataggtatggatgttgacttccgtgctatttggaaagctgttggttggcaaagatttgctgtaatagattagcctggttctcatttgctcactttgcaatttctgtgcactttgaaagaaatagaagatggaatttcttttcgctttttccataaggaatacacacctacatggaaaggattaagtacacttcttggttttcacgattcctgtaaaatcgatctcctgaaaggaatatctgggttcgagaaaaataggttttgggaagatatttctggtgctccaatttgcaagaaacctaggacgaatgatatccataatcctacacttatgctcatgcacaaatggattgctatgactttgtttactagaggtgatcttagacccattagggggatgaattaattatcatgtttgccatggttaggaaaatcaaaattgctcctgtgaaatgtatgataaggcaatggttagagagtataagattttctgctcctgttgagtgcacttttttgattactcggatagcaaatgggctgggggtcgtgagtgaccaaattgttttcatctcagccgctcgtccctatattgatgagaattatctagtgtaagggcacattcttaaacagatggatctttgatatacttcttccccagttgtacaaatgaaatccctttgccaaatgcggggtatcatttgtacaactaccatgaactaaccattcccctatagaccatagtagaatctcgtgcaggtggagcatacagggaaacacacaacatgacaaggaatgaatgagaaggttcatcatcctcaacacccgtacagatgtatgaggcaggttgggaaccaactggggatgtacccggatggaccccaagctccatgccacagcatcggagtctcaagctgggtgtcatgtcctgataaattcatcccgaattaaaaatcattctctaaaaggaataatagaattaattaaaattcaaaaagaaattggcaaacactaaaatacgtacaagaaaaattcgaatgaggctcggagaatttttgttaaattctccatggcctaataggagccctcaaattttacttgaattttcagagcaccggaaatatttattaagcaacaacaacaattatcaaagtttattaaaaagaaaaactaaaaataatcctccttcctcctttgggcccagtctagcccaaagtcttccgctctctcttcctcggcccgcagccgaagtctctcctccgtccctctcttttccggggattgctatctggcgcgcgcgcgccagcaacggaagtttcgcgcgtgtgtcacgcccagaaattcccgaataggattccaagcagaatatgcattaaaacccccgtccaggaccgcccggggtacacaaacaataaagttgacatacagatccacgtcttacaaatatcataaagtcttacataaatgcagtggaaaattaaaacataactggagctaagccttgacttggaccacagcgggatcaccactccacaggcatcctcgacggcacggatgaagcctactcctcggagaagccaccatctgacgcatactcaaactctggggtttggggaaaaatagagcaagactaagtattacccactgtactcagcaagtcaaactggaataggggtatgatgcagggaattatcaagggatagctatagaggttcgtttgcataaagcgagcatttataaacagtagatggaagcagtaaaaaaattataataattaatcaatattaatcatccactgtccaacgctacaccacgttgcaacaggcccaaccatccacctagactactcaaattcaatagactagactagggtgaaactaatcatggtgaatctggttgaccgcccatatccgcgggtacggctattcgaatagttttactctgatcagagatgtacaactgtacccacaagacacagcccaacgacacgtttccgtgcgccgacatgccaccatgacataccggatagaggccgtgacaagactcttcgcataaccccctctaaccaaacacaccacacctcaggtttcacccccactcctcgcaaggcagcgggtagtcccctctcgtgcctaggttaatccggaagccgcataggccgtcgcagggcccatccaaactccatcacgcccacccttgcctggatgcgtcagctagaggaaggctacactacaagcccagccgttgcccacgctggcttgtggtaagtacgagaaattcttccaaggtttcccgcgaatcggtccttaagtgccatgggcgcgactagcaaaaccatgtacccacagcccaccatttaacatgttttaatgaagcgacaccaggacggtggctctaatccaacatcaacactagaacctgaagtctatacattaatatgatttcccccattgtgtgctagttgaactaagcatggctaagcaatccctagtccaatatctagtcatgttatatcccaagctaacaaaggaacatggtacaaaatagcatggctataacagtaggtaaacatcccatggtaacagtataaaacaatacagtatttgaaggaaaacaatggagcatttgtaatataggatcaacatgttcaagtgacaagcatgacttgccttgctctgctgctggaggaacctcggcgactatttcaaagtacaccggagcatcgggagagccagaatctaagcgacagacaaagcaaacaatacaaacaagctataagactactaaaacagagaacaaaacaatttttaatggattctatgtatttttcttgatttactgagacttgaatggcattaaacggagctcggatgaattagatatgaattttagaagattcactgtgtttttactgtaatagaaaaaatccttaattgatttattgcgtaataaataaatcccgggagaaagaggggcggcgtcgacatgcgggccccacatggcagtggctgcagccgctggtccatggtggatcgggtccatggaccggggaaaaagggcagcgcaccacgtggtgcaaacgtggcgccgacgtggcacgcacgtgacggcctcgtggcagccacgcgggcggcgggatcggatggccccgatctaccgcccggtagatcggacggcggatgcggctcgcggccggcgcgcacgggcacggctcaagccggcccagcggccatggcgcgcggcggcgcgaggcggcgatcggccggctaagcggctaggcggcggcgcgtcggctaagcagcgtgggagagagggagaaaggggaggaggggccgcaccgacgacgatcgacgacgatgagagacgaatggtgatggcgacggcgagacgagctccgggaccacctaagggatcgaaagggatgagttagagagggagagggaagccatggatggctagagcggcgaccgaaggcgctggccatggcgaagctcaccggcgcgtggcacgggcggggttccggcgcgcggcacgggcggtgttccggcggcggattactacggaggaggggtggacgggacggcccgcacgatggcgaatgcgacaaagtcaacggcgcggctcggcacggcggctagcggtgaccggagcagcggcggcggcggcggaagggaggacgacggcgctagggtggtggagtgcacgggagcgggcgattgcaaaacgaaaaagagagaggagggaacgaggatgcattatatagacccacgaggttcgatcgtggccgggagaccgcgatttcgccggcggagtggggagaggtggggaggagagagaggcgggattcaaaaattgaatcccggccatctcgagcgcgggcgcgggcgagagataggggagtgggcgcgggggacgcgggcgcgagggcgacgtgggtgacgtggcccggaagacgcagggcgcggcggcggttgcggttacggggcgtggcggcgccggctggaggtgggagacgggcctgacaggtgggccccatctattggcgacccggggagagaagagcgggggctcgggcggctggctgggccgtggccttcggccagcacagcggggagggggagagaagacagaatgggccggcggcccattcgaaagagaaaaatggaaaaagaaaaagaaaaggaaggaaatgaattttcttgggattaaatattgcttgtgctcaattttaattggttaaaattatttctagagctctggaaattccactaaaaatcttgttagcgtatttcgacatgtagaactcaagaaaaaaaattccacatgccaattccgattattatttgtattgatttattagggtttactcttgcttttacaccggtattttcttgagaccatttataacttcaatttaggcttgggaaagaacttcagggtgtgacagcgcgccagctgtcatctgccaccgtttctttccctttttccgactttctctttttttttctagcatttatttcacgcgagttagctaatcgatctgtattttgttgccatctgtttcctattttagcgcacctctcacgctatttccttttttgtgttttcttttccttttttttagttgctagcacacgtgtttcttaaaatctttgaattgaaagttttcaaatcttgacttgaaagttttaaattttgagttgaaagttttcaattgagggttgaaagtttcaaattttcagttgaaagttttcaatttttgagttaaaagttttctattgtgagttaaaagtattcaaatatgggttgaaagttttcaatttttgggttgaaagttttcaatttttgggttaaaagtttttaaatttgagttgaaagttttcaaatatgggttgaaagtttcaaatttgagttaaaagtttttaaaatttgagatgaaaaattaaaagttttcaaaattcaacttcaaaaatacaaattttaagttaaaactttacaaatctgggttaaaagttttcaaaatttgacaccacatatagatttctttttaatctattatttttaaaaaaatcttatcttaattatcgttattagtatctaaaactaacagattagttatcatcattacgttaatacatgatttcgaaaaaatcaaaaaaaaggtcaaacctcctccacctacgcgccggaaaaaagaaataaaaaaaagtgaaacccttcgcgtgcgcgttaccagcacgtacgcgcgaggtagcttttccgctcttttcctcgggggcggctagctagcgcgcactccccttgagtccctcctctgttagttattactcccttaactcccccctctattagttattagttatagtattaggaaaaattctaaatatttttcttttggagattttttttactaacaaaatgaaaatttttaagctagatttaaaaactttcgatttaagatttaaattttaaagtcaaattttgaaaaaactttcaactcagattcgaaaactttcaactcttagattcgaaaacttacaagtccagattcaaaaatttgaaaactttcaactggagatttgaaaattttcaacttcagattcgaaaacttttaaatccagatttgaaaattttcaactcgagatttgaaaactttcaactcgagattttaaaaatttcaagtccaaaattgaaaatttttaagttaaaatttgaaaactaccagtaaaccaatcactagtaaaaacaggaaactaatcactagtaaactaattacggttgtttctcctattcgtgcgatagcaaactgcagaaaaagaaaaaaaaagagagaagaaaacaacggtagcaaaaaactgcgaaaaaaaagaaacagaagagaagaaacgcgcgcgcgtgccatgggccttgtggaccggaagtgagttccggcacagcgcgcgcgagctagcattcctgcttttcctcccggaataagttcatctgaggtcccttaacttatcaacgaatccgattttcgtccctcaaccgaaaaaccagacacaacgggtccctcaactatcaaaaccggtgcagattagatcccttagcggttttgagggtggttttggctgatgtggcgcctacgtggcaaatttgacttggtcttcatctgacgtggcattgacgtggcgcttacgtggtaattcgatccagaaaaataataaaaatccgtgggacccacatgtcagtcttacatagaaaataaaaaaatagtgggacccacgtgggccccacatgtcagtccaacttaccctcctcttcttcctcctctctccccatctcccctctcttcatctctctcccctgtcttctctctcatgtgcgacacgacagagaaggagcggaaacccgctagccatcatcgtcgccgccgccgacgtttccccgcaccgcctccaccaccgcatcccagtgatcaccgctgttgtccacgtgaacaccgccgacaacggcacccctcgtcgtcatcaatgcgggtgcttcgacggcagtgtccggtcgccaccgccacggtggtcgactccggtcagcctcgccgcgacggtcgactccggtcagccacgccgtgacagtcgactccggtcagcctcgctgaggcggtgtctggtcgccgccgccgccatcgacaacgacgacgacgtctgccggagcttcttgcccttgcgcagccgcacgttccagaagttcttgatctcgttatctgacctccccggcagcctcgccgcgatctgtgaccagctgcacacgcacgcacggatcatgaacactccattgatcaaatcgatcgtttcatcatctcatggttaattgagcaataatctagctacctgttgcatcgcggcatctagatagcagtacaaatggtatctacacgcataacaatttataaattgcaccgaccatcattgttccagcctcccagatcgctcgtcgatttctttcagtttttcgtctactccgatgtcgttcgacggggtctcccggctggagacgtcgccgccgccggcgttggaggaggagatggcgactgtgactcaggcgccggggctgtcgacgccgtccatgctcggcaatccagatggtggagctccggcggcaaccatgatccagagcgcgccgtgcgccaccggcggcgaggcgttggtgggcgagggccggctgcgaaaggggaagatggtcgccgaggaccagagcccgccgagcgtcagcggcggcgcaccggctgacctgcctcccggcggcgacaagctcactgagaacggcggtgacactgacaccctcctcctgggtgcccgttgttcgtggatagagaggatggtaggacccattgacatgtgggtcccactattttgtccttttgtatgactgacatgtgggccccatgtttttgtt

SEQ ID NO: 5712 - DNA, 45576 bp, Oryza sativa
ctcttagtgattatggatgcattgtaagtatgccagtgtttacatttgcagttaccgcttggtgaaaacaacattatgaataaaattgttatatgtgaaagaacttttttgctaccgaagatttcagtttattttgtgctcaaatgatttatactctactgatatgtcatcttttccctttcagttacttgttgccattctttccgttgttgatgacacaaagcttgttaccaaggttagctagctccagtcttctatgcacctgttctgagtattgtgctgtgataaatatcgtatggagcatttatataacacttttgtttgatttgatagatcgtaattcaagagctcgccaaacatttgaagcaacttatttttgacaaggtgaaaaggaaaactgagcttctgatatttttcaaaataaatccacaatgcactaatagtaatgaagcttcttgttggtacagaatggaagacgtccattgctgcaactacttcaccctaattgttcacgctatctgcctccagctgatctggcttgtctgaactatcgtgtgccttctcttatttcaaaggcaagctagctattctgtttagtattttaaggagaacatagtgaagtgctgtgttataaatattccacttttggttaggatgaagcttccgagagtgctgcagaagatatcccagagaataaggtggatgttgcaactaataaggagcaagatggttcagaaagcatgcagagtgcgtctgacagcaaaaaggacccatttcaacggcgacatgaattgttgatcaaaagtgaacttgccgaggtgacatttattcagtgctatgtttattcaaatacagtgttaaaaggatgcaccttttcacattgattactgcagtagggtacaatatgatttctttggtgctcgtttagtcgcatagcagtagccagtcacagtatgtatagctacatgcccaccatgtcctaaaccccataataccaacatgcacagcattttgtgtgctcacgaatattattatataaatgatggcaaaatggtccattagggattttcctatgcaaggtttcaagtatgtaactggaaaacaacacttacaataagggtctactgtattttcttgtgtgcccactattttgcccaattagtgctgacgtgacaactaacataagttaatcgtgatgaatttactagccttgctcataggcctttctttttgtgattattagatataatatctagatgccatcgtggcagcatagagttacttgtgactcaaagtattgaatatgctttatgtggatttaatataatgcagaccttcctgatcttttctcaggtgctcatccagactctcattgagaatgtcggggagttacttcgaacaaattttggcaaagatgtattgcatgaggtgaactacttttgtccttgcagatggtgaaacctgctttttattatatgctaacaatttttcatgtcataacctcattggcatggcatgatctttggctggtactcttctttccgtgaatatcggtcacttgtttactgaatcatgtatcagggaaatcatgatttgaataagttgcaccaagaataccctttcgtagtatatcaggcacaaacgagttagtgaaatacgatacacagtcataatctggaatattgaagcaacgtgtctttgccaatctgcggtgcttgattgttgtcattgtataaataatgtttcataagtgccactggtgtcactctgatatgttgacatttgcaaatctgaaggttgcggttggtggagaagataatattctggagggcatcactgacaggatccacagcttgcacaatgcaatagcttctgatgcagcacgtccaaaggcagaagatactgaacatgcctttgataactatcattccagccgtctaatcagaagacttatacttgaatctccagcatttgctgccatcctatggaaaaaagctcttgaaggcaaatgcaagacatgggctgatgggcacaggtacctcgatttttattgatatgaccctctcgcctcttctcatgttttccaggagtcacatatagatatgttctattcatcggatatttataaaattcaatcgttgattggaatttgacaccagtccctttaggtcatattccggtggcattgtctaatttatcatgcatactgtaaatttctgatattctctcagcttgcttgttctgcctgatgaacattttggttttgatttcttgatatttttattcagttccaaggtggtcgcagcattccttgaatcgcccgattccaaggtaagggatcttgcaaaagctgagctgcagccgctggttgatcgtggcattctgaaaatctcagaccataaagcagtcgaaaaatgagttttgcacctgacttccaagcatctacagcaatacgagaaatcgacagacgaacatccgtgcttctgtgttggatgttttttttgtaacatgagtatgttctgcggagcaattttgtcacctgttaaaagagtgtagctactgctgtcaccagtgagtgagtattaactctccgtaatgttatgtacctttacagtaaaattgcatttattttggtatgactgcaagatacgaattctccggccgtgtttgttctgcataggaatgcgattgataattttattgacaactgacctgaacaaatcttggagaaaacggatgccttaatcatagagttgtcatttttaatactagaaaacgatttttgcaaaacacttacaaatgcttcaaaacctgggcagtatttagagcagtatttagagcaggtacaatagtaaactattagccagctataaacatattttaatgagataaaaaagataagagataagagcagcggactgtagatatgtagctagctgcagcacgaactccaagacgcagtgtgtatatgataggtgggatcgtatattaatagtatagttagctattagattgactatagatgaattggagctagcagtggacagtggactatattattaaacttcttttagtgaatttcactgttttcctcttcttgttgccgtaaaatgaactaaagaaagctaagcaatctgaaaatgtaaacgattctttgagagagaatggaagctaataaatctgcaatgtcactagcaggagttcgtccgtcaccaatgacgctttgttcttgcggcgcgctccggcgcggttctgatctgatacaccggcgactcgccggcgccgctgccgcaccatctctggttccgatcggcggcgaggttctcctcgaaccggcagaactccgcggcgaacggcggcggcgggggcgggcgggtgtgcgggtagccggggaaccgcagccggtcggaggggtcgaagagcgggaacgactgccgccgccgcgcgccaccgccgccgttggccttgaggcagctgtcgatgacgcggcactcgtcccggagccggttctgcacctcccgcagcgcctgcgccgcgacgggcatcctcctccccccgccgccgccgccgcggtgcttcccgtgctgcgcgccgccggtggccgtcgccgccgccggcgtcctcctctccgcgcggtgcctgaacctgtcgtggcacgcggcgcagtagctcgccgcccgctcgtcgtcgaaggctcgccggcgagccccgtcagtgaggcacgcgtgcgcctgcacacgttacacgatttgatcgtcgcatcaaaagcagaaaccgcaacgaaacgaaacggtttttgcagaattagtactactaattacgaggcagtaaaaactgtagcaaatcaccacgtttaatcactgttacgttaaccacgaggattcaaagtttcaaatcgatttgaaaacgccgctctgtgggcgaccaccgctgcagtaaccgatggtggcggcgatcgaaaattgaccatatctccaagaagaggagcccaatgcaatgcaaccacccactaaattgaaagcaagaaaaaaggcaaagattccaagccatcattaggaagaagaagcatgcggaggcagagattaccaacctcggagacgatcttgaatgcgacctccgcctttgcgtgcgtgttcttgtccgggtgaagctgcagcgctgcatgcaaaccaaaccaaatcaaatcgaaccaaatcaaaatcaggtaatccgattcagggcattgcattgcgtcgcacgcaccgagctggcggtagcggcgcctgacggcgtcctcggtggcggcgtcggcgacggcgaggacgaggtaccagtcgacgaagggcggggatcgctgccggcgccggtgcgtgcacgcggagaacgccgccgacgccgcgcacacctccctcaccgcctgcgccttgctaccgccgccgccgtccgccattgccattgcccccaccgcgtcactcgatccgcttcacctccacggccatgcacattcgatcgatcgatcgatcggccgcagtgagagccgagccgagcagtgcaggcgtcgcggcgagatgctaccagttatagtaaccgtgtccacttcgtctctgcgtgtgaggagtggagtggcgagacggtaccgttcaaagcagcgatgagaggagatctcgaggggggaattcaacagcgcaaattgcggccaagcgacaaaaatcagaatagggaaataaaaaaaacaaaatgatttgatttaacacggatcaattaaattcatcacatactactagagaaatatttatcctgttttttaataatatatcttattatcatattactctctctaataataagtatttgataattatgataagatttggtgaaacttctacaattccgatcatcgataatttctttctcatattgttggttcaaagattaaataaattatgtacgtatatttgacttaaaaaagactatcgtaatttaataggtccatttatggatctatatgctttgattggaaccaaaagatctagaaattacagtcttaatagattttgaaaatttattctaataaaaacttcaccaaattttctactccttccgtttcatattataagttgtttgacttttttcttaacaattttttttagatttgactaagtttatagaaaaaaaatagcaatattaatgatatcaaattagctccattatatttaactttgaatatattttgataccatgtttgttttgtattgaaaatgttattatattttactacaaacttaatcaaacttttttaaaaaagatttaaaaaaaagtcaaacgacttataatatgaaacgaagggaatacttaacatctcatttatgggagtatcttttatggtaccacatgttagtctctctatattatcttccgatgctctccttgctcgaatgagtacatgttgtatggacagagggttgcagggatcaaacaagtgcagctcgccgacgagatttggtgtttgtcctgttgctgtaaacgtccaatgttttaggttggccatggcgatcaaagtcctgatgacaccgaatactgatctggaaatggaaatgcagagctgtgatcattcagatttcagagtttcgcatctctgatgatcgtcatctgaatggaaccagtccctgtttcttggactaaacttctcacataatccagttgcgccaaacattcagctggatgattggctttcaggttccgattgttcacactgtcactacgattggaagtactcgtagtataataatcaacaaacaataacagtatattatggtcttacagtttcagataataaactccggttgtcagtcagtcgccatttcaacgagactgaaccagaaggttcatactgaaccaaacatttctcaataatctgaactgtatttctgtaacatttgtcagccaggcaggattagtttttccttgagccgtgagaccctgacaccagtggctatgtcgaattctcgatcgattggcaaggctagtactctactgctacttgacaaatgaattcagtcaaaagagagagttgcttcgagactttcaaccagaagcactgtatcaagttaggctgctaatgcatcggttgccgatgcaagaattttgtccagtatacttggatcaccacagaatgccaataaaagaataatattttcaatgagcaatgaaatactattttcattttgcaaagacctgaagaacgactgaacacactagctaaacacgaaccctatcttttcaacgttccaatttgcgacgccaaacacaagcaacaaagaatccaaagctgatcttggaacagtgtaaaaattttacacacccaaccaattgctaatatgagagagcctttggagtaattgtggctgttcacagctaaactcaaatctgatgctagaataataaagaagacatattgattattgaagcgtagctcgcctgcagcagcaatcagacagagctaaactgctataaacagtttggtggctgcagaatgcggctaagattttcgagcttcatgttgcgatgatactcgaaagatcatacggatatcctcccagcaccatctggccgtccgtagcttgatccaacggctcggagagaaggagatcttcttcttggaaaaaaaaaacattcacgtgccactgcatgtgggccccacagctcagggctccaaactctcggcatcttcccacgagggtgccagcatcatcactcaccagtcaccacggagtaaaacccacggcctcattgtccttggcgccctcttacatgtgggcccagtggtagaagcgggcccacatgtcggtgtgtgtggggagtaatgggtgagaaaaaacccgtggtttttttttcttcttggcagcaatcatttcggtggggccatgtcgagctgaccaattggcgcttccatgtgatccacgctgtcatcccgggcccaccagctctcccttgtcgataagcatccggagctcgctgctgttcttgtttctaattgctggtttctaccagggccttttagcaaaaggggacaaataattaatcctactagcattttgtgatcttgagatccactgttttgtttggatgattgaccgagcacgaacgtaaaaaagactgtgaggaaagcaaattgtactgtacttatattcaataaatccatttttagagatcgttttacaatgcgaaattgcgaaccgagagccagaacattccttgaaaattagtagacctatgaaacttagggaaaatgcttccctttttttgtttggggaaaagaaaatggatcaatccggtaaataacatcgcgcctgcaatggataatttatcgtggtgatgtcaaataaaaatggaatagcgtttggggttatgtcgaatttcctttcattcaatctctatcgtaattggaatagtagtgtttttctattcaaatgcaaatcacgtgctctgagccctactcatgaacaatgattggagcatactaacactacagtacaattattgccaagaaaaaaaatggtacttgatgcgcagccatgttttttttttatgcttaaccgatgaatatgcaagtacacacgctttcagttatgatttttgtaaaacagctttacgcacatactactaaatcttttagaaaaaatgtttagattgttttaaactttataatagttaatttatttatttatactattttataattatcataaattatgaaggtattcagccattgatgtaagaacattatgcaagtggagactatttcatctgaaaaatgtcagtatccagcgatgacatcaccctctcggcaaaccattttattttcgaaaacgacctccacaaaccaaacatatttggctcacaagcttcccaaaaattccaggacgaattcgaaaaccaaatttcttaggggctctttagttcgcaaaacaaaattttcacctatcacatcgaatgtttggatacacgcatggagtgtaagtagtattaaatggaaaaaaaaccaatcacacagtctgcatatagattacgagacgaatcatttaagcctaatttgtgctatgatttgacaatgtggtgctacaaacctacagtaaacatttgctaatgacagattaattagacttaataaattcgtctcgcagtttcttagcagaatctgtaatttgttttgttattaggctaagtttaatatttcaaacgtttatccatgtatccaatgtgataactaaacctaaaatttttcccaaactaaaccgtgccttattttaaaaaccacctcacttcacttggggggcaagttgcaagtctcaagtttacaaatccacccctttcacaaacaaaccgaagcttcttctccacttcgtcccacacttcaacgcctcgcgatcgatcgccccaaatccccgccgccgccgccgccgccgcgaatcgccggatgcccgccgccgtcgccgccgcgggggcggcggcagcctcgggcaccgcgctgctcgcctacatactcctcgcatgctgccggccgcagccggcgccggaggccggcgaggaggaggaggaggagtcgcggctgttgtcgtccggggcggaggcgcgggggagggaggcgggggatggcggcgaggaggaggaggagtggccgtacaggccgccgtcaacgtgctgcgaggcggcggcggtggccgcgcgcacggcgcggcgcacgtgggacctcaccgtcgggcgctggggcctccacggcatcgccttcgggatcaagcgccacatgaagcgccaggtccgcgagatttttcgcatttcacctcgtgattcctcgctcttgtgcgcgattactgcgatgctgccagtattcagttcttctgttcgtttctgtgtctgcgctttgcgtttcttacttgcaaattgaggatcatttcgctcgatggctttaacgatagcgactgatcacgatgttctaactgcgctcaaatcgcactgagcggcggaacgtgtagttgctttgcttcgagtggactttttcttcgttttagttttactcttgctgaaaattttggtgtaaaaggcaggatttatgactatttcaaggtttgacttgatttgacttgcaagtaagactgcttttgcctttttatttgggaaataaaggctcaatgttgggtcagtggcttacaatagcttcacctctaccactaattcaatacattcctcgtacttgcaatgtcagatcatacttaaattctgtgcgggacttaagatcgttgatgtaaatatgggtaaatctcatggatccgtaaggtcggattcatggattttttcagagtcaagctggtcatggtggtcaaggtctcctctagatgttgatctgaagtgagaaacgtttccaactgttctgaacttctgataaccaatcgatatgcgttttatacagagctggttattttgttgcgcatgtgtgaatttgctagaagaacaactaataaaattggaccagaattctgttgtcttgctaaaactaaaatggttgctcaaagaagaggaaacaggacgcactcaacattcagttcaatataatgtactctgtttatctgcagatgttctttgcaaagctattcaatgcatcaaaactcaataagatgtacttcccgtgagtgaagagaagctggctatccgatgttctgatgaatcagcataactagcattttgttctttaagacgtaaattcggcggtagtagattgtttgctgaagcaattcagttatgcagattataatcagcttggttctgtatagctgtcttgaacatattacatagtcaatggtgtggaatcatattgtgactgtattttttcctgtttgtgtgctctagggtgatttgcagcatgagtatagtggaaatgattgccttcaactaaaaggtcacgacgcacacactgaagtagcttatctacttgagcacttgaagatttgcatgttctactcaaagaaaacattttcagcgtttcttcagtttggtgggtacaatcaagaagacattcttattcacaaggctagggcgagggtgagtaagtatcactgtattcctcttatctcatgcttaaggtactcacatttacaatttgtatttgttcctccacattttgactcactcttaactatcaacttgatgcagcttatgcaaccttctttcgcgcttgtgtgtgacaaaaaatccaagtgctttctgcttttcattcggggtgctatcagtactaaggagcgcctaacagccgcaactgctgctgaggttccttttcaccatatagttttaagtgaaggacaaatcagcaacgtggttttaggatatgcacattgtgggatgcttgctgcagctcgttggattgctaaccttgccaagccccatcttcacaaggcagtacaagaattccctgattatcaaataaaggtatttcttattagtgctatgcatggatgaagtgactacaatttataggtgtagccgctgcagtgcgctgtgatctatatacatgaccttatttgaaataatttgtttttgataaatatcactgagacagttaagaagcgtaatcagatctctccttttgtcttttatgtcatgtttatttttgtgaagatttctgacccaaattatgtctccttatttgtcatttgtactaggtcattgggcattcaatgggagcaggtatcggagcaattctgacatacattcttcatgagcatcatgagttctcatcgtgcacgtgtctggcatttgctcctcgtaagtgacttattcatgatttacatctttaaagccacactttgcttagtttttgcattgtgccttcgagatattatatggctttatgattatcaggtgttttcttatattattttcctgagttgtaactttgttctgtttcagtacttaatgggtgacaaaagttgttttggcactatgttctcatgatctcatccatgccaactgtttggttgaacgttcttgtgtacaatttgcattattggacagtgatggagaattagccattgttttatacagatatgatagaattgcattgacttgcaagatttattttattaggctacaagttaatccaggaactgagacagttatactattttctagatttaagagaggaaatgctttcagatttttaaagggttcctgttttgtatagctgcctgtatgtcatgggagctggcggagtcgggcaaagaatttgtcacttctctcatcaacagaaatgatgtggtcccggccttttcaaaagtttctgctgagaacctgcgagctgaggtactctgaatttctgatggccagtgtcttatgtgtcagcataataaaatcagaccttcactagtatgaacttcttttgtaattaacaaggaaacattttaagaacttagcaaagtgttaatacattaatttcttgtgatatttcaagaaatatgtgatgcaatggagatcttagcttcaaacttgaaatgttaacctcattggcatactggacagtggccatataaaatttctgataaattgtgaaaacgaccatatacctgattcccaacagtgttctatcatcactgatttttttgtctctactgcaggtaatggtatcatcaaagctagatgatgagcaggatcaagctcactttagcttatttacggcaataagtaagcgtgtagctttcataaagtctcatatgctgtcagtatctcatccaacagagaagaacacagatcctgattctagcatatctgaggtaatacctcttaggcactttaatttctactatttaaatgattgcttctgtcacttgtcactggatcctaaactagcacaatgataattttgcgtccttaagccacatgtgaacccagcacgagtattaatttgattacccagcggttttaatgactgttaacagctgatccagcgatcctttctagcatccaatcccaatcaacaccgataacactgtggcgggcatgctaatattatctgttagtatactaggtagtaggcatatctttggtacggatgattttccttccattggccatacaagcatcacatctattacaaaagggcaaaatgagaatttccatcatgcacagttcctgcttctccgtgcagtgtaccttccaaaaatttacagaagcaaagtaactcttgggtttactgattagtgccaacgtgagtacagaagcaaagcaacgagaggattgacgattttctgacaccctatttattctgtcaatgcagcccttgctcaaacatgtccccgaaatcacgcagcctgtaacaaatgggctaagcacagactgcaaccagcatcaaacggacctcgttgctaatacagagcaggacttttcagctgtatcagttgttacctctgaagaaaagattgtactatctagcaacgataatgttatcagtacaaagtctgttgctggatcaggctttgcagcacaaggggatgtgaacatcaatggatcactggacactgaacaagaacaatcatccttgacagggcaggaggaaccagaatcactgaagcagaactgtgatatcaaagacaagctgaaagaaccgctaccaacctgcagttcgcgccagtttttccctcctggaagaattattcacatggttgcaatggcctcacctgacccaaatcctggtgagggatccagcagcaatgagatcattagcatttatgaaacgccaagagatttgtatgggaaaataaggctagctccaaacatgataaaggagcattacatgcctagttacataagcacaatggaatcattattggaacagctgctcaaagacgataatgtagatacaataacaaatgatttgtaaattatgtaaaaactcaataaattattaatccaattctttgcaaattgcattgttctaaaacaatttccatatgcctgcatgttatttctgtcccaatgctactctgtatatataccactaaagctaaatttgcatggtcaaagttggaaccattccgttgaccggatgacgtggacatcctccgtacggttggtctctcatgcatgcagctgtaaatcctctcggcctcacgctctatatcatcactttcaagtgttttcatgaaaacgaaaatttagctcgccatcacgcagatcgacatggctgctgcttctctccgtctggtcgtcgtcgccgccgccgtcgcgatctccctccggggcgccgccgccacggcggtgaccgtggaggacgcgtgccggcacacgaggcacgaggcgtactgcgtgaaggcgctgtcggcgaggccggagagcagggcggcggcgttggacatgccggcgctggcggaggcggcgctgtcgatggcggcggagagcggggcggcggcgacgtcgttcgtgaggaacctggcgaagatgcccggcggcatgccgccggagtgcctggaagggtgcgtggcgaagttccaggaggcggtggcggagctgaggcggtccgaggcggcgatggaggtgcgccatgacgccgccggcgccaaggcgtgggtgacggaggccagggcggacggcgagacgtgcatggacgagtgccggatgacggagggcggcgccgccccggagatcgccgacaggatcgacgagctcgccaagctctgctccatcgccctcgccctcaccaatgcgtccatgagcaaacatccgtagcaaatcatcgtgtataacaaaaacgagatttggagggggagacctctatccaaacatttattaaaaagaaattatgagcgtgttaaagattgaacacgagatctcggaatcgggattgaaaccatataccctttaccactgtactatcatgtgcatttcatgtatcctcgtgtatatatacgaccaccaaattctctcttgttatattcatgacttgagcacgtctcattgcaacgtttcaaatttccaacaaaatttatgttggacacatcaggctatgtaaatctgccaaatttcaatttcaagagtaaatattgtatttatcatgcattagcttgtgaaatagatggtatcacctatcacgtaacagaccaaacgggctaaaaccggtgacgaatgtggtacgattcgattggtttggaattttggatgctgagtgagattcacaaaaggccagaaagggctgagtacttagaatcatcatttttacagttttcacacaaaatcaatttaaatcctacaaaaactatcccaaaatcctataatccagatgagccgaatattcttggatgggccgtggagactattgcagcccacagtcgcccgtcccactttcggaataagttcatctgaggtccataaacttgtcaacgaatccgattttagtccttaaccccaaaaccagatacaacgggtccctcaactatcaaaactggtacagataaggtccttctgtggtttagatggcagttttggctgacaaggcgcctgcgtggctattttgactcggtcttcatcggacatggcactgacgtgacgcttatgtggcaattcgatatagaaaaataataaaacccgtgggacccacatgtcagttacacaaaaaataattaaaaaatagtggggcccacgtgagccccacatgtcatcctcaccctacccttcttcctcatctctccctatctcccctctcctctctttccacgcgccattggacggggaggttcggcggccggtggcggcggcagcgacgcaagagaaggggcggccggctgggttcctcaagggcgacgacaacctggacgacgacgacgacgactgcggtggcgggagcgttgggtgaagggggcggagcggggcggccggcgcacgcctattaacagtgaaatttggtaatcggcaaagacgtcatcggcttagaatcattatctgctgcagcatctcggaatcagccgatgggagttatcaagtcgccaatagtcggattcctgctatattcggttaaggaaatcaatctactaaaggatacttatccctaagtgaccgagtttaaagaggatgcggcatggcagtttatctattaattaggaatagtttgttagtttccttttatctttaggaaagtgtgtccgataaggactttatattttccttttatctttaggttagtttctttcttgtccgacaagggcttgtatcaacccatgggtataaatatgtacacccggggtctatgtaatctatctccacgatcgatacaattcggcgcatcgccaccccttttaccttttctactttattttatcgtctggcgggacttggcacccgacgcggggctgcatcggtgttcgatctccggcttcgatctccggcgaaggggtaagtccaatgtttcgccggtccaggcaattgtatcatttatgtcggcgtcgttcaaggctgcactagtacattcgacctcttggattgctctggtttggatgatatatttgcctacctatttatcatatgtctctgttaatctagtcttagcatatcaatttagctctatcggctgcttctcgttttagggtttttgccggtattagctaaatcgtgtttctagattagattagcttagacatctaccaccctgaaaactcagtcaacggcttgattgtctagatataatgtttcttttcatacttagtgctgcatcagttaagtttgatctactaagtcgtgcttagaaccataatctctagcctgcttcttgattgccaataagggtatcatcggggttttagccggtgagttatctggacgttgcatcggctcataaggattgtatatacatataagttggatttagcgatgacaacaaaggtttcactgtttaatctaatcttgtggatttcatgacatcggacctccagccgatgtgtgctttaaacctcggatcgatgcttatttatcatatcattgctagccgattggtttataccggattatattgcaatattatattatcatcagccgattgcctttatatcatcatctacattggacatatagccgatttatcaaaaccctatcgctatcggctggtatcggcatcggctattatcgactatcggctggaactactctatcggcttgtcagccgatcggttgttttgatctactatttgcatatcttgtcagttgcaggatcaaactgactggcacgcccgcatctcaccaacctttggacctgcacaggagttaagcagatctcctaggccggtgtgttcgattttttcgtcaacaacgccggattcctcaagggtggcgacgacctggacgacgacgacgacaactgcggcggcatggaagcccacgtgatcctcccatgaggaacccgcgcgtgcgccggccgccccttctcttgcgccctccccttctcttgtgccgccgccaccgctgtgccgccggccgccgaacctccccgttccgtggcacttggagagacaggagaggggagagagatgaagagcggggagatagggagagatgaggaagaaggatagggtgaggatgacacgtgggccccaccattttctaattatttttttgtgtaactaacatgtgggtcccacaggttttattatttttctggatcgaattgccacgtaagcgccacgtcagtgccacatccgatgaagatcgagtcaaaaatagctacgtaggcgccacgttagtcaaaaccgccatctaaaccgccgatggaccttatctgcaccggtttttatagtcgagggacccgttgtatctggttttggggttcaaggacgaaaattggattcgttgacaagttcagggacctcagatgaacttattcccccactttttcgatccccctggcatattcggcccaagataacccgatacaaaaaaagcccaagagtgtgtgtgtgtgtgagagagagagtgagtctgatttgcttcctccgcgaaccggtcgtcttctccagcgagacagccgccgcagaaatgggtgggagtcagctcagcctcaactcacttccgctaattcgctgcatgcaagctctcccacgtccatggcggatcccgcccgcgcatctctcgccatggcagcattagcacgcctcgctcacaaaacgctcccgaccacacgaacccaactcccgctccccaccaccatatatcgctcgccgcggtgcctccacccatgatcctccatcgacgacaatggcggcgacacgcggctccgtgcggctcctcctcctgatcctcctcctccgccccgccgcggcggggagcccactgatgatgacgtgcgccaagacgccgcacccggacgtgtgcatcaccgtgctgggcgccatcccggagtgcaggaacaccggcgacccgcgcgtcctcgccgagaacgccgtccgctccgccgccaccatcggcgcggcggcgggcacgttcgcgcgcgcggagctcgacatcgtgaaggacaccgacatgtggcagtgcctggacgagtgcgcgcaggacatcgaggaggccgtctcccacctcgacgacaccgagggcggcgtcgtcgacctcgacgccaagttcaaggacgtgcggctgttcatggacgtcgccgagagggacacgtggtcgtgcgaggagagctgccgggacgcgccggactccaccgtcaaggccaccctgctcgacaagaacgaggcgttcgagaagttcatgcgggtcaccggcgcgctcatcgagatggtcatcggaacggccggcgagccggcgccggagccgtcagctgatgaacactcggacgaactaataccggatgtccagttatgatcaattcataatgtactaatcgctcatgtgacttctcatctccatttttgatcgatcgtgttcaggtattttgattaggttaattaagggcccgttcaatttgacgtcattttcaaccataccattttttttaaagttgtcaaaaaaatgtctacgtttagtttgctactaaatttgataaatatataagaaatcctgccaaaatttggacaacattatcatcttgccaaaattttgatattgccaaaatttggtaagatttattttggctacaatctgaacaggcactaattaattaattagctcttctaattcgttgaatgttttgtttaaccatcaataaagtggttgattcgttcattagctaactaataaatcatcagattataatctttctttgtcatatatgcatctctctctctcccctctctaagcttactgagccagtgtgatcatgattttaaggtttaagattattgtaatctagattgttaagccagattactataagctgaattataataagcggacataaaataagctgttagctgtttgtatctctatattattagtcgtttgttagttgttagccacccaataattaaaaaaacatctttagagtggattattatattatagtaatctggtttatagattgtaataatctatcataataagctatatgtttgtttaagcttactcctaatagtttatattataataattctaaactgaatcattcttaattaaagggcattatggctcagttcaactcatatgttgactatagagtgctaatcagatattattttttaggtctaacttaaatatggctacggctgggaccttcttaattttctttcttttgtcaattaattgttatatataggagtagaaaaagaaaacttatctttgtgttcctttggggatactataaagtctttcacactgtgctgagctagaccggaacctcgttgcgccacatcggattttggtcgacgtgtcgcatgcgcccgcgaccaaactaggtgtctcgtgcccacaagaggggcgcaaaacttcgtcgaggcaaatccacgcgcggcgccgaaatcgtgaggcacccgcgctgtgagcagcgtttcttggccgcccgtgccctcgcgtcgattccgcccggcgaaaaccccgaatcaccctcgaaaaatcctctcctaccacagcaatttcctcctcccaccaccgattcttctcctcccacgccgtctgctcccgccacccccgctgctcccaccgtcaggaaaggcggacccgtccgccgctgcccgccgccggtgctcccgagtccgcatcgaccaccacatccgccgccctgccgctcccaccatcgagaaaggcagatccatccgccgccgcccaccgccggtgctcccgagtccgcatcgaccaccacatccgccgccgcggccaccacatctacctcgtacgccgaggggagaatgggccgccgcggcggaccgggaggtggagcggtgggcggcgacgaggccggtgatggtggttgacgcgacgggtggtggtgggctggtggccgacgcggcgggcggcggcgaggccggtggtggtggccgatgccgccacggcagccggagatgcctcccgccgacaagagccggcggccacgcgcgcaccggcgagctgccgccaagaacgagggagaggaggtggcagatgccgaggacgagcgtgccgaggagagagcgggccgtcgtgacggaccgggaggaggagcggtgggtggggcggagtggaaggaggcgagctcgcgatgggatggaggaaaacgggagcaagggtgggtgaaggaacgctcgcccgtgctagccggacccgggtcacgcttgttgtgggcttagttgccttgcacaatatctctatccaattaggccatgcaaaataggatcctttcactgtggaaatgagtgtctttgtgtgtgttttttttttttggctaagccacgaggtccggtgtttgtactgtgagtgccccaagagatactaagacttaggcactagtggacactagaccggccggctgaattctcccaccctttgcaagtttttccaaactcccatgattaaattctgcggaggaaggagatgtgcaggatgcagacaacgaaaggaaccaaagaagaagaaatcaggtaggacacggacaccaatgatggaagaggcagatacattggacgtgatggaacacgtgaatactacagcagcaattaacaaccaaatttgtcgaattattttcttgtatagatcaaatttcgaactaaaattatgtggaacggcgaacaccaccgggttgtatgttttttctttttctttttctttttttgcaaacaaaggtcaattatcttaatataataaaatattacaagttttccctgcaaaaaaaaaacaagtttgcaatcgtgtagtattaacaaattaacaaccaaatttgttaatattcacctcttggaatgagagagatacaagcaactacaagtcttgacttcttttttagctatttgtgtgaagattaagatctcactggatatggattgcaggggatgaatggtagactattctgattttacgataattattagggcataaacaaataaacaaaatattaataagttacaaataaatgtttaaatattactaagtggtataggaaattgcagagtataagaaatttttatatagtaaatttctagaaaatcagactatttatagcttaagaagcatgtccataagggcacccgcaatggttatctataggctctctataagagatctatgtcagcatattttcctatttggaagagattaaatgaagagagagagcaaagctatctactaacctgaagatagtctatagagaaaaacgaggcaatgcattagagagctatagatacccatatagacatactattaagatggtttacaattaatttagtctattgctgagatgtacatgttttataaatagcaccttactttaccattacaggtgctctaatactctagtactaagtggttgttgctgaaaataacgcatcaaaaggacatggagcccattggccctctaaggtctgcaatatcaagaacgacacaacacgcatttcagtcactttgaacacgattagctgacaaaaagaaaatcgcttacctcattttcaaaaactaggggtgtgtgatgttttgacatttcattattacgtttgagtatttgtcttattaaaaactattatttataactttcattataaaatatagttatttctagcataataccttgtcccataataaagctattttttcacctacctcgatcctcctctcaaccaatcacaaccattctctttcacctactttcttttttcaaccaatcacaccatttcttcaaccattctcatctactttaaaaatgcccgtgataacctaacaaatgtctacactttgagacagaggaagtattttgttatgatttattttatcattaaaggtattttgtgtgtaactaatatttttttatatttgtactaaatattttaacaagacaaatgatcactgttatgtaaaaaatcatgaacattatatatttaaaaatagagtgaataactctttttccaaatcaaagcgagtgttcagcgtcttttttttaacacattctacgtccttatttagtttgttcactactggacaaccaatcttttatcgtggtacccaaaacacaaatatctcggttagatttagaatcattactaaagatatttttaagtatcggtttgaaaaatccaagtcctaaaaacgtctttagttttggttggtgttaccaaccggtaataaaaatacatctttaccaaccgagactaaagacaatcgagactgaagatggagaatctttagttccggttggtgttacttaccgatattaaagatatctccaaggttagtttacaaataaagcatctccatccaagtcagatgtgtgtagtatgtgcgatggtaacatgcgtgagggctgaagtttaaatctcatatcccacatattatttttgatttagtatgtatctttagtactagttcttttaactggtactaaagatttcgatttttagtctcgctttactagctattcttagctgctacaaccgagaataaaggggattttaaactggtagtaaagatcatttctctagtggtggttatttgtcaaattaatatatatattactactataaaagataatattggtgatggaagtatggaactaccatcaatccaccacaattactcctgcacatttttacaaattagtccctaatttttttaatattaaacaagagtttaatatttgtttgaatcaaatgaacaacatatactaagggtgtgtttagttcacgccaaaaatagaagtttggttgaaattggaacgatgtgatggaaaagttagaagtttatgtgtgtgaaaagttttgatgtgatggaaaagttaaaagtttgaagaaaaagtttggaactaaacaaaacctaaataagtatggacattataaccgtagcaaaacatgtgctttttgctagtcgtacgaagaaaaatggaggtacaaacatgtgcaaaactgagccccacggaaacactgctagggaaactaagtcccacgcgcatttatattgggcacttgttccgaacacacggcttgttcaacgacagttagggctgctttagttcccaactttttctttaatttaaatttttaatttttttatcacattaaaatttttttacacacaaatttctaacttttttgtcacaacgttctaattttaatcaaatttctaattttggcgtaaactaaacacacccttacttgttaagttaactatacctgcttggtttcgcataaatttggtcctttttcgcaaactgatttgagtatttgaccggatatagctaattgcgtatccggcaccgcaatcacgtgcagtgcagcggcggcgcagtcgagagtgtccatgcgacaaacacacgttgttttggccggacacggagtggatcaagtgcggtggtggtggtggaaagtttggttgttggtatacgtaatttatccatcaattatcaagcggcacggcactttcagtatcagacggggtcctctcctctcctctcctctcgtgggatttgaagaaattaaaatccatggattattcatgccatacgttttgcaagaaacatcgcagaaattccatcagttccccaacgcagtacatttttgcatgcacatgggcaaattaatgggcgttacatatcattaatgtagtagtaagtacgtttgttttttaatttatgacaccgacgtttcaccatttgtattatttaaaatatatataaaaatataagttaaaattatatactctttgatgataaaataaatcacagaaaaataaataatacttatataatttttttaataaaataaatggttaaacaactcgttaaaagttggcgttgcacgttaattagaaaaatcgagggagtatataagatggtggtggcagctaacctaacccaacacaacacataatatattaatgtaaactctcgatcagctggtaaactaacgaaccaacgttcgcggtttgtaagacgaatcgctgtagcatatccttccgggaaatcgacttgctgcgtacgttgttggagtgtgtgacatttttcttttcaggggaaaggactttattaaatcacacgagacatattacaatcattttcgatcaaaaccatgagatagaattggactcaaattaatcaaaacatttagaaagtaataaataaataaattgcagtaataatcatgtttgatattttaatatcttaatgacaattagaggagaaatagcgggcgggccatagagaagtacaatggtgaagtcgttgatggtttggtgggacttttacaaagtaaaaaaaataaacccaacgataattatgtttcattctcaatggcagtaaaagaggagacaaacatatggatcgtagaggagtacagtaacgatgtttgacaggtgttctgaaaatcgtaaaaacgaaacccaataagacgatgaactctaaaaatgcaagatttagtgtttaaatgtcccaagtaggatgaatagaagccgtggtagattaagcaaatacgagtaacacaactggtagtgtgataaaggagtaactggtaaaaactatacgattagaaacacgggatgataatgttcggcctttcaaagatgacaacaagatacaagctatttaacaaattttaaataaaagtcatatataaaaagcagataaatttgtacatatgctagtcacgcaatttgagcgggtacccagctagttaccttaaaaaaagaaaataaaattgatcaaacaaatcctcaggttaaggattacgctcgaagtgtaggtaggctgtgtttagtttctgaaaaaagttggaagtttgtggaaagttggaagtttgaaaaaaaagttataagtttatatgtgtaggaaagttttggatatgatgtgatggaaagttggaagttgaagatagttggaggtgaagtaaacacgaccttaccaaggttatatttggctgctagctagtgctgcttctggcagcgagccgtcaactgtattgggtcaacgaaacggtggttggaccggccggtcaaacatgcgtgcatgattactgcattgatccgaccaatcaattcgaagcatacacacataccagagttcaactcgccgctcgcgcactatataaagcgtcccctcactcccagctcatgctcattcccaccacaagctaattaaggtaccagcaactccatcacatccttaatttgcagcagcaggtaattgtacaccggcgaaggaaattaaaggaaagtaggagatcgatggccaagccaagcgccgccgcctggtccaccggcctcttggactgcttcgacgactgcggcctatgtacgtcctcgtcctcgccgccggccgccgtgccatggctagatcatatgcaaatcctccgtagtactactaatgcagtagccgtagctgacacgtgggttcggatccccacgttaatgtctactactacatcagcagtagtgcagataatctctactgtgctagatcatatcatgaacactgattcgttagttctgatctgtaactaacttattagttcacattgatctgcaggctgcatgacgtgctggtgcccgtgcatcacgttcgggcgggtggcggagatggtggacagggggtcgacgtcgtgcggcaccagcggcgcgctgtacgcgctgctggcgacggtcaccggctgccagttcgtctactcctgcgtctaccggggcaagatgcgcgcccagtacggcctcggcgacgacgccgcctgcgccgactgctgcgtccacttctggtgcaacaagtgcgcgctgtgccaggagtaccgcgagctcgtcgcccgcggctacgaccccaagctcggatgggacctcaacgtccagcgcggcgccgccgccgccgcagcgcccgccgtgcagcacatgggccgttaaatggattagctagctatagcgtcacctcgtatctatcatatcatcgatcgatcgtactttgggcgtgtgaagtggtgtccagttaaaaaaaagttttttttttgggagctagttatagtatccagttttttaaaagaaatttataagtggtatattaattatatgcgtttttttacttgatactatctactatgcctctatatactcctgtaattaagtttgtgtaagtatggtgacgcatggtcaggttttgtttgtaattctctgcacttaatcaattgtttgttgtatttattaatttgctgcaaattagctgccggccccgtgtttggaaagactcctctcatttcaaattacttgttgctctattaaatcttgcacaaactaataagatttgacatattatttttccaaagcacatgatccaatataatgcactaaatttgtaggtgtttgatccaatataatgcactaaatttgtaggtgtttgatccaatataatgcactaaatttgtaggtgttatgactgtactaatttgtaggttgctctttacactaaattattgtaacggataattttcataacactaaatagaggtaaaatgatctttttataacacttaacggatagttgctaacggaaacctaatgatgatgatatttctgaaacaaagacgcttataccatgataattattttcaataaggtagggttatcgataacatttcttatgttttctcatattaattgtaacctgtgtccatcctccttgttgaccgacaacatgcagatcaagctagctaatcttgtgtttcgttggcagcatgtggttatgatggtgatgggtcaacgagattgtgtatacttcgtacttaaataattggccaaacaaagcgtcgttggctgtgaaacttatagtacgcagatttgtagggtaaaaaaaatgcactgttaggttcatttcgcatatatcacgagttctaataatttagaccattttcaaccaaatgattaggatgatatccataacattaaataagctaccaactaagatgaaaaatgatgtggcaagtgaataaatgagaaaagagaaggaaaccatatcttgcatgagatatggtttctacgcaacattcaagacatcatgtgagataaatagtattaaatttaagtataaaataatggtgtatgtattgaaagagtagtgtctagtactagagtttatgaaaactacgtctagctatatgttttgctgaaaattcggaaggaacgacacttcatctttttgacgatgtgtggtagacgacacaagcaattaaacaacgcgcatctaacctcattcagtaagatttaattagtacgcgtatagccgtatccacgcttatacaatagtgcattgtcaactactggtactatcaacgacctagaattttttaataatataaattaaactcggtctttacttcagtggccaagctagcctggaaatatatatcaacaacatttgtattactcgttctccacgacttcaaaattacgacctgcattactaaagatcccctaattattaacctcgccattgataatcttgtaaatctccaaattaagatgtgtgtgatgatggttaattaggttaatctgcatgatgtatatgccccaaatttattagccaccgtcggtttcgtttgatctgacggttgtaaacaccttatacctgtagtaaggaaaggctgggccagaccccatactgtactcacttccttcgcttctcctgcaaagcaaagttgggccttcgggccttctggttcggttggcgatgtcagccggcccacttaagggactcagcgtgccgctaaatgggccagcagatcggccaattgaaataagttcaaataaggtctcttaacttgtcaacgaatccgattttcattagaaaaatgaaacgagccgagccgagtttgttataagccaaacgagctacgagcttttcgtccacccctgaaggacactagatcgccgcctgaattctcccaccctttccaagtttttccaaactcccatgattaaattctgcagaggaaggagatgtgccggatcgagacaacgaacaagaaacaagaaatcaggttggcgtacgtacggcaccaattaatgatggatgaggcagatacattggacgtcatgcatgcatggaacacgtgaatatttacatatcaccaattcataaccaaatttaccaaaaaatattttctcgatgtgtttgatcaaattttgaactaaaattttatggaatgccaaacatcaccgtacgtgttgtatatttaccaggtttttttttcgcaaaacaaggttgattatacttaaatactgagtagccgcgggcatatattggtaagcttgcaaaatcaaaagacactcatttttcctttttgttttgttttgttttgcaagttttccatggattggggtttgagtatttgacgggcatatatatagccggtgtatatgcatgtatcatcactgacacggcacgccaatcacgtgcagcggcagcgcagttgacgcgacaacaacgcgtcgttgtttcggtcggacccggaccggaccggagtggatcaattcagttcggtggtggaaagtttggttggtgtacgtaaaggttatccatgatcatgaagatgcatgcactttcagatgggctcctctcctctcatgggatttgaatagatgtgcagaaacatcgaagaaatttcatcggttcccagtccatgcgtgcctagaggttgcatgcaaatgtgcaaatacacgatactggtcgtgtttagttctttggtcattttttttaagcatacgaatacacatttaaagtattaaatatagactaataacaaaataaattacatattccgactgtaaattatgagatgaatttattaaaattaattcatggtacaattagacaacatttaatgctccatgcatgtgtccaaacatttgatgtgatatttttggccaaaattttttttatctaaacacacccataattaagcactacatattatattctgtcctttcttttacgtatagcgccggatagtctaaatttgaacttaatcaacatcatataataaaatcagagggagtattagtataagatggtgggagctaacctaacccaataacccaacctaaataataacgtactatgctggtaaacgaaccaatgcctgctgtttgtaacacgaatcatgtcgctgtaggcctgtagcatatctcgatcgcctagcttgttgcgtacgttgtgcgagtgtgtgatactgacgcgttgtttcatatttcctactccctccatctaaaaaaatcaaatctaatgctagaatataacatatcctaatataacgaatctgtatatagagcatgtttcacataatattttagtactaggttaacgtttttttacggagggagtaggtcctaatatataataatctgaaatatatttaatatattttaagactacgaatctagacaaatatatgttaaaattcataatcataaaatgtatcaaattcggttctaggttactacggagtatatattaagacaggttagtacttcacttttccacacaacttgtgaccacagctatgatttgatattttcttcgaaaacgatatatctttaatttgattgacatttatacaaaaaattaatagaaaatcgtactatgcgtacatgagatatatcattttagctggaaaataaaaaagatattactggcctggattagaaaaaaaatacaagtgaactggcaatcgatcgagaaaatagtggcgatactcccggttggctaggtaattagcatcaacgccagagggattattactgtggctaagagcaagtataatattgagctataagtctactataagcttatgtgaaggagaaagataacaagaaatcaaaagtgttggctcttatatgcaagagctagcttaacacaagctccaagatagagatagagagaggagaagaaaattaaagccaaccttataactaatataatatatgttggctttaaaatagactaatagtagaaaatgagctctaattaaatcccaactggcacgcgcattgattagtctcatgtcgatcacggcatcacgctctaattaaaacgatttgatgccgtcgcaaaaaataacatacagtactatgctggtaaacgtgtatgaatacatcctcagattgaggattaatctgaagctaaacctggatataaacacagcctaaaccttttacccatgcctagaagactggcgtatataaacacagcctaaaccttttacccatgcctagaagactggcgttgtgaaacaataataccacaccactctagtgcgttgtggaacaataataccacactaatctgggcggtgttccaacgtaatttcacatgacattaaaactgtcatgccaactattggtgacgtgacaatgtaactattagtgacgtggcaatattttgtcacgtcagacggggtggcgtgataaaaaaaagggattttgaaattggtattaaaacagtttattttaaaaattaaaaaaataaaaagtttcaaaaaaataaaaaaaatctagctagtgctgcttctggccgccgtcaactgtattgggtcaacgaagaccgacggagcaaacatgattatagcatcgaccaatcaaattgaagcagacacgctttcttaccagatcaactcgccgttggcgcactacataaagcgtcctcccattcccagcactagcagcaactcgattgatcacatccttgcagcagcagcaggtaactgtgtacaccggcgaagaaggaggaggaggaggagatcaatggccaagccaagcgccgctccggtgaccggcgtccccgtcggctccgccgcctggtcctccggcctcttcgactgcttcgacgactgcggcctatgtacgttcccgttctcgccgccggccaccgtgccatggctagatcatatcatgaacactgattcattctgatctgtaattaattaactaactaattgacattaatctgcaggctgcatgacgtgctggtgcccgtgcatcacgttcgggagggtggcggagatcgtggacaggggctcgacgtcgtgcggcgccagcggcgcgctgtacgcgctgctggccatggtcaccggctgccagtgcatctactcctgcacctaccggggcaagatgcgcgcacagtacggcctcgccgacgccgcctgcggcgactgctgcgtccactgctggtgcgagtcctgcgcgctgtgccaggagtaccgggagctcgtcgcccgcggctacgaccccaagctcggctggcacctcaacgtcgagcgcggcgccgccgccgcgcccgccgtgcagcacatgggccgttaaatagcgtcatctctcctcgtacatcatcgatcgtacttggacgtgtgaagtggtgtccagttaaaaaaaaatgttttttttggagcgtacgatcgatcgatcttactagatccatctttttcaaaattaattatgagtttttttaacttgatatctatacctgtatgtactcctgtaagtttgtgtaagtatatggtatgcatggtcaggttttgtttgtaatttctctgcacttaatcggttgtttgttgtattaatctatatgtctattatattattaaaacagctttgaaaaaaggcaacacgttcgctgtggaggctagaaattcccacgttaatcgaagaaaaaggaaaatatatgtgtcgttggatcgtatttgtctagattttgatggtctagatcaagcagggaaatacgtgagtccaaacaaaaaaacatctagagagattgactaggaatcggacatgtatgtatttggactaatttgactaggagtcggacatgcatgtatttgcatgcatgcgtatggccatttgagcctgtaaatttgtaattagagtcatgcacgttcatccacgaaagaataagcaaatattatgttaattattaagcgctcaaaggtagattaaaatatattccaataggttatggtaggactaaattacaatgctataattttatctatagaaacagaagataagtgttgtacactaaatctaattatacatgcatgtataataaaatatttatgtgcttaaattgtacgctatatttgctctaaagaaattatcacgttaattaaacaaaataaagaaaataccaaccatggatagaattgtggtatacttgaatattaacggttaagatttaattaaaatttaaaaagttaaagagatgaaacggatacgagtgtgaaaccgtatagcaattgaaccaattgcacacactgaccttgcatccaaatcagaataggaaattaatttttgaagtgatataaacgcgaaagtttgttcatgttaataagagggaaaaggaaaaaaaggaccaaatatatttttatttagaaaaggttttataggaaatacaactatactactataatactaacagtatataaacagaatagaaatctaattttccctgtgattaagctaaatcgtaagtcggtagctgagtagtaatgtaatgacatgtaaaactagcacccgtgtctgtctcatgcaccatacccatgacaatatgatgcgtgcacacatgaaaaacaaacgacgataacgcatgcatgcgaggtgttggacgcatccatcttattgactaaacccaattagcacatcaatgagatgctagcagcttagcatgtcatattactctctaaacctacattaaacaaacagtgaggttagcacatcttagtatattaccatgggaagttcaattattggaattatgatttttttaatctttagagtaatctagaacatatgacgagattaattaattaacatgtctataaagaagtaaagtggtggcggttgatgggatatctaaaaactattaataaaacaccaaatgaaatcctaatgacgattaaaataaaggatgatagagaggtcgtgaagcaatcggtcaagacggttatcgggatttctagaaaaaaaaaacccaataataatcatatttgatttttaaaatctcaatgacaataaaaatgagaggcagcgggcgaatcgtacaggagtacaatggcagagctgccgatggttggtgggagttctagaaagtaaaaaaaaaatttcaatgatagttatgttcaatttttaaaatcccaatgataataaaaaatggtcggcagacgggtcatagagaaatatagtggcaacatttgatgagatttctaaaaaattaaaaaataaaaccaaacgagacaataaactctaaaaactataaggtccaatttttaaaggtctgaacttctaaaaagtacataaataaaccctaatgataatcatgtttgattttaaaatctcaatgataataaagaaggtaggcagcgggcgagtcgtagaggaatatagtgacaaagtcgttgacattttggcggaacttctagaaagtaaaaaaatgaacttaaacgataattatgttcaatttttaattaaaatatcaatgacaataaagagaagaggcagtggatggctgtagaggagtataatggcagtgtttgataggacttctataaattataaaaatgaacccaacgggataataaactctgaaaactataagatctaatttttaaaggttcgaataagaatgaatagaaattgtggtagatcgagcaagtaaataaacaaggatatgacagaagtaagtggtagcaactaatgtgatttttaaaaactataaaaattagaaacacgaggataataaggttttgtcttgcaaagtgatcttaagacaatgagataactatttaataaattttaagtaaaaccatattaaaaaatatataattttgtatggtgctagccgcgcaattgcgcgggccatctagctagtttgatgcaaattagttgtgccggccttgtgtttggaaagagtcccctcgttttaaattacttgttgctctgttaaatcttgcacaaactaagaagatttgacagattacatggttacccatattttactgccacgtagtcgtcacgtcagcgaaaccgtcattcaaaaccatccagggagtcaaattgcgctggttttaacagtttaggggtcaagatttctggtttacggttcagagtcacggattagattcgggtcacttttaacatagtcaaagtgaacttattccgatgagctaccttcttttcccgtgagtgtaattaaattgctaaacataattttttttaaaaaaattacgtatactccctccattataaagtatagaaagctagtactatattagacacaatatagtactacgagatagacaacctagtaatataaacttagtcaagcctcacaacgaaaaccagaaagttgctatttggagttgccaagaagaactcagcctaacggttcgtttggtagtgctctaactcctaaatttagtttcagaaattgggtctgtagtaaagttgtggggtaacctaaattcagctttacctctctagttcatttcctctcattttatcctgttcacctcaacgactaattttattgtgcttataactaattaatcaagtaagtcataggtcatggattttatttttgactggattgtggatttttctttcgcgaacgcgtaaaaagcttacatgtcaataaatggatctattggtatagcatcacgaaagactttagcgtggcaaatcttctcttacatgactttttggttacattacggacacttttcaagttatcaggtgtgatcctatcctgctcaattgtttcaagtttcaactcaaataagggagagagtgagtgggtgtgtaggagataaggtcgagagaagggagggaggggggtgtagtggctgggagacatatggtcgagaaaaaaaaatcatccctttggctggttctactatttactacaccatctgttttaaaattctactatttactacaccatctgttttaaaatataaaaatatttgaatgaatgagacatttcctattatccgatttattaaaaaacccggcatggataagacggcactgaggaacattttttaagtagtgagcagcagcagcagcaggtaactgtataccggcgaatttcctttaaaaaaaactgtataccggcgaaggagaggattggaggagatggccaagccaagcgccggtgcggtgaccggcgtccccatcggctccgccgcctggtccaccggcctctgcgactgcttcgacgactgtggcctatgtacgtacatctacgtcctcgccaccggccatggctagctactagtagcttgcatccatggtgatcgatcgatcgatcaacatgaactgattcattcaatctgtaataacaatctgtgcaatattgataggctgcacgacgtgctggtgcccgtgcatcacgttcgggagggtggcggagatcgtggacagggggtcgacgtcgttcggcaccggcggcgcgctctacgcgctgctgtgcgcgttcaccgggttccagtggatgtacctgcacctaccgcggcaagatgcgcgcccagcacggcctcggcgacgccgcctgcggcgactgctgcgtccactgctgctgcgagtcctgcgcgctgtgccaggagtaccgcgagctcgtcgcccgcggctacgaccccaagctcggatggcacctcaacgtcgagcgcggcgccgctgccgccgccgccgccgccgcggcaccggccgtgcagcacatgggccgttagaaaaagcttcacttcatgcactctccatcccaaaataagtttatttgtaggtttctatatctagcgtttaacaattcattttatttaatttttttatgattagtatttttattgttattagatgataaaatatgaatagtactttacgcgtgacttattttacttttttttttcaaataagacggacggtcaaatgttgaacataaaaactcacaaataagcttattttgagacggaggtagtgagtgtgaagagctgtccagataaattattatacttgatatatctagggactatgcctgtactcctgtaagtttgtaagtatggtgatgcatggtcaagttttgtttgtaattctctgcgcttaatcgattgtttgttgtattagtttgctgtaaattagttggcgtccggcccattggatatagtctttctgtttcaaattatttatcgttctattaaatcttacacaaaccaaaaaaaatgacagattatgtggtttccctaattaaatacatatcctttttttctaaaacatatgagcccatataataagagttgtgactacactaatttatatattgctctttacactaaattaatgctaacgaaaaaacaataattttattgagcattcaacaatatataacaataaaataatcttttatagcactaacggaagactactaacaaaaatctaacaatgatgatatttctgatataaagatgcttgtatcataacattttcataaagttaggttcgtcaatgatatcttagaatagagcgtttgttgattacatttcttgggttttctcgtattaatttgtaagctttgtctatcctccttcattgactgacacttgcagatcaagccggatatcatgcatgtttgtgtttcgttggcagatatcatgttgtgtttcgttggcaggagtggcacacatgttttctgatggtgatagtcaacggagctagtgtatatactccgtacttcaataattggaactttggaagcgtcgtcggctctgaaacttatattacgcagtcttttagggtgagaacaaagatgcattgttaggttcatttcgcatcacgagttctaattaataattcatgaagctgtatatattgctgaaaattcggaaggaaacacttcatttttttgacgatgtgtggtagacgacacaagcaattaaacaacacgcatctaatctagttcagtaagatttagtacgcgtatagccttatccaggcttatacaatagtgcattgtcaactcctggtactaccaacgacttagaattttttaaatattatatattaaatccgacctatgcttcaaattaacggcctaactactagcttgggaatatcaagaacatttgtatatatattactcgttcgctacacgacttcaaaattaattacgatctgcattgctaaagaccccttaattaatctcgcatcgctaatcttgtaaatctccaaattaatgtgtgtatggtgatggtcaagttaatctgcatgatatatatgccccaaaattattagccgccgtcggtttcgtttgatctgacggttgtaaacacctgcaaatcaaatttgggccttctagttcgcttggcgatgacgtccggcccatttaagggactcagcgtgtcgctaaatgggctaattgggctgatcggccaatttgcgaatgcactaaggccctgttggatcaagctcatcggatcaactacctcctttttccgtgagtccaatttctaaattactaatccttttttctaaaaaaaaagaagcatactccctctattataaaatgtagattagtacaatattagacacaacatagtactaccagatagataacctactaatataaatctagtgaagcctagatcggtacaaaaaaccgatatagaatttcctctgatcctctcccttatcccacttctattcgacggctaattattgtgctcagccttaattaattaatcgagcgagtcataagcagtggagctatataccaatggtatcacgaaagactttggcatggcatggcatgccttctcttgcatgcatgaattttggggccctctcggaagtctcgtttgaacacataatgcaagttagaatagcctaccaggcttgaatcgtgatcatttccagttcggtggtttcaagttcgaagcacacagtttgctcaacaaaaagcccccttttttctggatttatttatttaacctgtgtatcagtatagtagcagcagcacattatacatatgtgaatgtgatgggctgattgggctcaatgtttgcgagatctcgatcaagatcgatctcgtgggggttgaagactaaatcaacggttcgtttcgtaagcaacagcacagaaatgtcgcgagttcgtagtaaattaacatgggtgcttagctgtgttgttcgcttgcattgcataccagatcaactcgccgctcgcgcgctatataaagcgtcctcccactcccggctcatgctcattctcagcacaagcagtagctagctagcaactctgatcacatcgccggggaagaaaagtaggaggagatcgatggccaagccaagcgccgctccggtgaccggcgtccccgtcggctccgccgcctggtccaccggcctctgcgactgcttcgacgactgcggcctatgtacgttctcgctcttttttataagcttcagctctttattttgctttttctcccttcttctgacataagttggtctggctgattccattgtggtatattgatatgtaatcattttacgtgttcacgaaaaaaacgttctcgctctcgccgccggccaccgtgccatggctagatcatatcatgaacatgatctgtaatttactaattaattcacattaatctgcaggctgcttgacgtgctggtgcccgtgcatcacgttcgggagggtggcggagatggtggacaggggctcgacgtcgtgcggcaccggcggcgcgctgtacgggctgctgtgcgcgttcaccgggtgccagtggatctactcctgcacctaccggggcaagatgcgcactcagtacgggctcgccgaagccggctgcgccgactgctgcgtccacttctgctgcgagccatgcgcgctgtgccaggagtaccgcgagctcgtcgcccgcggctacgaccccaagctcggctggcacctcaacgccgaccgcgccgccgccgccggcgccgctcccgccgtgcagtacatgggccgctaaatagcgtacttggactgtgaaataagagttgttcagttaaacaaaagtgatttgttccggtcaaaaaaaatctcaagatattggtatctcacagtatcaaatcgtttctgattgttgaatttagctggacaggacgatgagcattgttagattcatcgatcggaaactatttgataccgtgaggtatcagtaccatgtgatactttttatttggaccggaacaaatctctaaacgaaaagtatccggaacaaatttcttttagagtatccagttaaaaattttaattacccgtggtaaattacgtgtgttttatttgatatctacgactatagtcatgggattaagtttgtaaatgcgtgtttggtgatgcgtggtctcagcttttgtttgtaattttctccagtttaatggatttctgattgtactctccaaattagccggcctgccccttgtttcggggcaaaataataaatgaataatttcgttgaaaattaagcttctctggttcaaagtcaaaagtataggtgcatttatatttatgagtgtgattattcgtcaacgagagtactatacgtatcctacggtctacggcgccgaagtatgaaaatgtttaggtgtacaagctagtggacacacgcaatattcaagtataattaattcaactgtctatttcgaacttttgtaattcttttttaaaaaaacacagtgcaaatgtaacgcccatataatgactgggccaatatatcctaaaattcaaaaagtcattccaaacccctctatcatatacccattagtcgtcgtattatgagattcaagaagtcactgcagacgtatcctgtcatcgatgagtatgtcgtctatcactgaaacaataattaaccgtaaatgtaaatactcaggacaagttgacttgaacttgtgtgggtatattcctccaacagaaacctaaccagttgagttacactcgtatcaagagtggtaagaatattctagtggtaaaaactacccaatgtttactttttaatttttgcgggaaagggtggatattacaatcgtttcagtacaagacagagattctacactcgtactgcctaaatttgctaactcaagagtagctttagtacacatagaatcgcatattaattagaaactaaaaattcagccttttcaaattcttagtttacggagtcaagcacagggtttgctaaaatactaattctgccttctaactttccatttcaattcctaacccctttgcaacaaacagacgcaatatgtatagcatatgacaatatgaacacgtattacggttgaatgtgtgtactctagccacatgctgtgtttgtatatcctccttattgactgataacacgcagttcaagccggatatcatgttgtgtttcgttggcacacatgttacaaacttacaatggtgatggtcaacacggagctagttcatactccgtatatacttcaataattggaactgttggccctgaagtttatatatatttttgggagaatagccactatgatccctgaagtttcgctccgagatcgttttagtccctgacctttcaaattgtccaagcaagccattaaactttatcatgtggacatatatagtcattggcccatcgaaaattgtcacgtgaacatgccatgtcatcttccaatgcaaatatatgatgaaatacccaatttgcccttgcacatatcgtcatagggaaaaaagagaaagaaaacgagaaaaatacaaaatataagtaggtgatcttgcatattaaatatccgttagagttttaacattaaaatgcaactacttacatgaaatttatttggcatggtaattatatatttagtggttatagctaatttaattttgtattagcataatccagtgaaaaaagtttgccatatatccatagtcacattgaacaaagtttgtaaactcatttcattgtttttctatggtatatagaagggcaaattggacatttcaccacatattatgcatgagagcataacatggtatgctaacgtggcgatttaagttggcccaaggactatattagcccacttgacaaattataaggactcgtttggacaatataaaaagttagggaccaaattgatccccgagcaaaactttaaggatgatgttggctattctccctatattttactacatatataaccccgttttatagggtgaaaattatatgcattattgttaattcattaggttcatttcgcatccatcacgagttctataatttatgaagctgcatatgtattgctgaaaattcggagggaatacttcatatatcttctgacaatgtagaatgtttggtagatgacacaggcaaatagacaaatgcccaactgaattaatctcgttaggtaagatttagtgcgcgtatacacacattatacaagcagtgcgatgccaactactgatactatcaacgacgacgacttatcaacaatcgtttgtaatatatactcgttctgcacgactgccaaattacgacctgagttgctaatgatccctaattaacctcgcattgctaatcttgtaaacctgcaaattaatgtgtgtatgatgatggtcatgttaatttgtccgatgtatatgcccccaacaaattattaattagccgacggccagcccaatgttaattttggattaaaattatgaagctatatactcaaatcttagtaaaacataatcaaatcgtagtactgtccgttcaaaaaaaaatcgtagtactgtgtatcgtagacattctttaacagtacacagcttttgagtcggttttcgtttaacagtacacagattttgagtcggtttcgttttgatctgacggctgtaaacaccagccataccccatactgcacgtctgcacccactcacccttagaattttttttatttttaattttttttattaaaagttttacaaaaataattttttattttgaaaattgacagaagtggtcgcctaccgccctctgggagggcgatttttaaaaatcgccatcccagagggcggtgaaagtgacgtggcagacggccgttcgctctcgggcgacggccgtcaacgaaatttgcaggcggcccccttgccgccctctgctagggcgattttgtactgtgcggggggccgcctgcaaatgggcggcggggggcctggaattttgcaggcggcccccttgccgccctgggggagggcgaatttatactgtgctttatatttttgtataaatatcaatagttatcaaatctttttatattgaaaactatacaagattaaaatctccaagactggtaaaatacaattttattattttttagggcctatttggaatgttaccgtacaaatattttgttagtgccaaaatataagcaagttttggcactaccaaatatttggtaaggtaaaattgcatttgatcatatttggtttgctgccaaaatgtaaaattgtagtgaagaatgttctacataatctcaaatctagattacgtattaccaatgaataggcttcaatcgaaatcaaacacaagtactattcaaattaccaaaatattggtagggcatgtttttggtagcaatccaaataggcccttagtcttacgcatacaaaaaatcaccaccataattaaacattgtaatgataagatagataagaagtgccatcgatacacggtacaaatttgtcgatcccgacgaatcaagcatgcggtaacctatcggcaccttctaggtcggtcagaatgcattgcattcccgtggtccttcaatcgttgatactctacttgtgtttctgactctgttatcttctggccatgatatgatggagtgacattgtcgatccatcgagtaaatccacccatccttggattgccctgtaaaaatagtaatgttattcagtttgggtagtaattttgtgcaaatcatagcggattttgtaaatgattagacatacaacgaaatcgttgtctacattggggcagacaaaatatctccttcgaaatgtttgttcagcaaaggatgtagccacctgccagcgatctctgcacccacactttggacgctcggaccatttaggtaaccctaatggattgttcctccagtctaagcttgcaatttccacccgacgttcgtactccatccaagcatgaatgaactgtatggtcggttcaggttgcgttatcggcccgccacttgaagtaactctgactgtgtcaatccattgtacgaattgacatttccttacatcctcctatgtacatccattttgggatagttaagttaatgatagtactgaggagtgatgaaaagaatagttgtaattaccacgaaatcatcgtcgacaatgtttggacacacgaaacacctttgtcctcgagttcggtgccttacggaccttatgacctgacaacggtcaccacaacgacactccggacgctcacgccacgtggggagtcttaggggatttacgtgccattctaaagcctcagcagcaattcgacgttcatgctcatccttccaccttaggtagtccgatcttgtttcactacgtgggtaagcacgggttccgtcgttttgtgggttctccatgtctacccactcgatgaagttgcacattggacgatatgtctgcgtaagatgttacaattatgtacgaagaagttagtttttttatccatttgaacttcgaatagatgaagcatacctgatcaaagttcgcgcattggaagaatctcctgccccgagtttgtatcatgagggaagacttgagtatgcatccatccccacaatcgcacaaaggacggtcacaccatggtggaaaccaaccagcaaaaggatcgcttcgccagttgagacgctcaaggaatggcgcttccattttcgtgtgttgtgtgctagtgggaaagaagatatgaagaggttgccttcagattgtcaattatatagcgtcattttcactgcaatatatgtgaactcaatgagatacattattcattagatgtgacaagacgatcacgcgtgggcgtgattcactttatgtcaacaggcagcgccgaaagttgatagtgacaactcgagctgccgcttttcatgtgtgctgttgtggactgtgcatagaacaggtcgacaatgcacaaaagcattgatgcaagcacccaatgagaaaaaggctctttgcagcacactctttgttcgatcatcaaccgatgtaaatgtatgtaggtcatagtaagtattattattcctctgggcaatggtggctaacaaacgaggcaaattatcataagaagcttcaaatgtgccatacatcatctcaataatcttttgtttggctctctaggcctttgcatagcttatggtgtacttgaatttgttctcgatgtgcctaataattgattttggtttaaagccaatgttaccaacaacactgctgtacatctcacttgccacaaaagctgaagtgatgtttcggtgatacttctccaccccttgtaagtagcacttgtgctcggtcacaatgctaactttccaataatcattccatttacccttatatgcatggacacgccacggacaatcttccttcatgcacctcacttcatacacataatttgttgacttgaccaccctaaactctctctgcaaggaaactgcccaatgcttcaccgcctccttcatctcatccttatgagcataccttgcaccgtcaattacctcgttctccttatactcccagggtacatgatcaccctctgatataacaagtccagagaagtcctcatttgcccaatcagtggccattacatcaccttcctcatcggatgatgcgtcgtcgtccgcttcctcattatccgaatcttccctctccatttcatcaacaattataccgactctctccccctcatccgccatgcccatggcctgctcctcccttggttgattttcctcattttgcatcgatggtccaacaacatcccctgcattgataggaccctctacatcttcggtttgcattgaaacatttatatctttctcttgtaccgacacaaatataacgaggggccatgaccgttcaaaagccatttccacataccgtctccaagcagcagtgttgtccatcggcattagttcccaaaaataaccttctgttgcacgactcactacaactgatactgacattgtgtagacttcttggtctattctaaatcctctcaacaaccaactataaattgactgaaatgttctctccgcaggcctatcgatgcccttagatgtcattacaaaatctgacagatcaacaccatctggaccaaatctaatatttccttcaccgtgaactatctgaaatgtgaccttatttgacattgggcctgatgaaaacaataactgcgtaacctcgcatttctgtactacaccctaagttacattctctacaatattgttctccaaaattctaaaagtaggttacattctccagatcaaactaaactacatcttacaattaacactactgtctatgtctcaattcatactattatattctatgctctggatctacacatatgtgctgtgtgctacagatatgctaaaatatatggaactaaaactaaaacgcaacatatatactcaaatataacatattagtacaaatgcaaaagatgtatgggagcaaacctgtgatgaagtgagcgaagcagcagggcttcgccgctccccttctgctgccctcccctctctctctttcgttttttttggatttttagtgaatataatgaaatttcagagaggggggactgggctttataggggggaggcaaaaatcgccctcccccagggcggcaagggggccgcctgcaaaattccatgccccctcgccgcccatttgcaggcggccccccgcacagtacaaaatcgc

SEQ ID NO: 5713 - DNA, 104750 bp, Oryza sativa
caaatgtgagttattagctgacttgggtgaactttatgcaaacccccagtcgcattttgacatattctttgtacaaagaaagccacaaagctcccaattctgcagtgtacatccataaacgctgtattgtctgaacaaattacagcgtcatgaaacagtgactctttgttcctaaacactgaactgtggataaagtgtaacaaaggcgtcaagtaaaagcatttgttagaattcctccgtttcaaataaatcatcgtttgttggtttgtcctaaattaaacatgttgaccgttagtttgtaaaaatatgtatatagtttaacatatggatcatatactatgaaaccatttttagtaagaacttgaaaagtttataatgttgacacctataagtgcacacaacgcataggctgcttaaagttcattttcagaaaaaggatgatactaatgtaccgtgaatgcacagaaattgccatcagtaaatgcagatatggtattactcactttcaattcactttaagctcacaacattttacagttagcgaaaagagcgagtcagagaggccgtaagacaggtgctgacatgaatagctcccttcaatgggaagtaatacacacatttttacagcgttatctatgatcaaacggaaaacacgatttccccgattgccacccgccaaaggccatcacaatgtcattgttttcttacatcagagattgcaggaaccttggctgggtagttagacaaatccacatcaagcaagtctgtcaggtcgtaaagccctacattatcaactctgtccttgattggggtgctcattgtttcttcctgatctgcctggtttgacgatacgcttgatgtcaccgcactgttcgcaggcatcacagagatgccagacaattctacatcccgcccggatggcacggtactcactgaaggatacttcctttgagtgctgtctccctcattgtgattgtacagcacatattcgttataggtaggtgcaaactgcatgagaatggagcagattatacaaagacattggcatattatggtgatgtgtgtggaaaaacaaagcccccagatgcaaggggtatatgcaatatcctggttacctgatgaacagtatcatggtagaaatcattgaacttcagagcatgcagaaggcttcccttgaaatcaccagaaggtcgaccattgggaccagcatactcgttgtaaggaaatgcaaataggtggccaatagctgctatgagcatttcaacacacaatacgaagttctggagatcagcagctttttcagcatttttgataaaccgagattttgcagcaaggaaaaccaggacaccctgcaaaggagaactttaaaatatagcatgacccaagacataacaattccttggctaggaaacatctttactgtaaacagtctgataagacatattggaacttgagatagcaatcgtacttggatgtgaaaaaattttgactgttgtatatttacctgccaatatgtgagaaacactactgatttgatcatgatgaattttgggacaggattatatggccgaagcagatctctgcatgccgcatagaacaccgcaagagcatatagtgccattgagtatgagactgtatatatgatagtaatgtatagataggattgcttgacactaaagtttccatctgcgtattttcctttcgcataaagtatgaaggtaataaccaccaaaataggcttaagaatcacaaactgcaaacagccttgtttgcatctccgaataaaacgcctgtccaataacataattttaatcagcacttgcatagatatgacatactctctgaatgttactgtgcaactgcatgttgaagcattagattgttacaataagcacttaatatgtgcaaaagatatgtacgcacccatctagaggaatagctggaaaacagcaagtcatcagaaaccacgatggcttcagggttcgcccattcaaacttaccaccacagcaccaggacctccaacccatgccaagcaaagtgaaaagaaattgtagatgacccaagcatcataactgaaaaacaatcagagagattttaacattagtcggatatgcatttattggttcagatcctaaaacacaagtgcagtaaaaaaaattcaaaacgtggaaaaaaaaagtatcgacgatcgcataaaacattgataggaggctatgtgccttacgcccttaacaagcacagacaagaaaacagcaatagaatcatatccttggtcatggcatcaaattattcatagaatttataaaccagcagttctgtaagaatgaaggccatgtccattacaataacttattagcatttccattacaataacttattagcatactgtgtcagattatgatgattttgtagttatatagaagtggtgatcattcaatgcgctttctcccccttgttttcttcatgtgtgttgttggtcttagtaagacactcaagattaacagtgacaatagtcttcatatatcaagtgtatttaacatctgaaatcatggttcatgggctgatggattaaaacgacatctagaaatatgaatgcatgtgatgtggcgcaaatggcataatagatcttctctacactagtgattgctgaggcttatcaacacagtagctaaacgtaaacacaacacatatgaagacatgggcagtgtaccaatgttgtcatgatgatattgctagtatatacttcctccgtttcgcaatgtaagtcattctaacattttccacattcatattgatgttaatgaatctagatagatatatatgtctcattaacatcaatatgaatgtgggaaatgctagaatgacttacattgtgaaacggagggagtataaatcaggtgatagcaaaagaagtgcatcagagctagaatgtgacatggtgcaccagcaatatcaacaatgctggcacagatgtcaaatcatactaacgtgtggcaacaaaagaaaagttgtgcccattggcaattagagaatgccaaaagaaagtttttatggcagttcttatatttgctgcttgtctagtgtctacaacataactttaagatcattggagatacaagattacatgttcagctcccaacaagtgagcagaaaacaggaaccacaatccaaaagaacagttagttcacattaaggggcaagattataagattgacttacatctctcgaatagaattaaaatatattgaattatctggtaagataagggaaaggaacgacatcacggcatagacctgcaacaaataaacatcatcagagttaatatgctgaagtgctgcaaacaaaatcaattcaatataagggctaaatgtaaatgtacaccagatgaaacatgataatacaaatgattgcaaccattaaaagatcatcaggatcagctagctcgagcaaattcatcaatcagcacagcgattgcagccacggagttgccgtgctatcaaattttcttcaacacaacatctggacaccgatcaaacctaacaggaccaacaaatctactcgtagatccacgcacacaaaaagaaaaagaaaaaaaatcatgtgcaagttaattgcagcctcctgcaggtgcttaggctccatgaatcagaggcgggaactcggaacgacgcgtaatcgaagccatccaaacgggctcgcattccaggccagctcgcgaccgcgaaaccaccccccccccccccccacgaattcaccccccacaaaaaaaaacgctaaaaaccgcgaaggcatcgacagatctggcgcgagggggggagctacggggacgagctgcgttgcattaccgggaccatgaagatgaggcggacgatgaatcgctggtagatgggctccgcgtagtggaggaggtggcggtagatgtgcacgagcgcgatgacggtggccgccgcggcgcacaccagcgccgccgccgtgtaccccgccgccgcccagtccatcgcggacgggacgagccaccagcccgctccctcccagcccccacccacggcagcgagtaggtccggccgccgccgcctccgccgccggagcgctcggattggctccggtttggtgcgcctttggttgcgagtggttggggaaggaggaggaggaggaggaggagaaaggggttaactgtgcgaggaggaggtgtttaatttgcatctgcttctgattacgttggttggatttgattaattttcgtttgatttttcattagtttaatttaatggctcgatttgaattttttttttctatggggatttgaaggggaccggtcttcgagaaggaaagattcagatttctttccttcgtcttctctcgaagcgtgtgcgagtctgctgtctctgaatttgttttcaaaccataatcgaagtttccaacattacggagagctttgatgcatgaaaccgcgtgatctttattaaaaaaaaacgtacgaaattttcagggattttggtttatccatgtaattatttgtgtgagaatcaattatacggggatttatcttgtactccttccggttttattttaattaacgttttgaacaatgacacagtctacaaaatatatcttatatttttgaccttatttttctattataatatataataaatatatatatatctatttttattatagtgcttttaaagaaaaatctgtatatattgttttagttcttttaaacttaatatttttttaaagttattgatggttaaaattataaaagtttgatatcaactttatctaaagcatcaattaatatggaatcagggagagaactgtaatgtacgtttgtccatttacatttgtcgtgacattgttttgacgcggattctgggtaagttgacttgcaattaacagctgagataacgtaggaaatccaccacttgtactaatgtgcaagttaagtatgattagttaattagcttggccaaaatgggcacctgctgcagccgacagttacgtcaacgtctgaatattacagcctgaaatccgatgcagcaactgctattagcatcttgtatatctggctattaataccagcaaaaaaaatggtatcataattataattataattgttgttatattaatcatcatcgtatcttttgtgtcataactaacagtttgggcgactttattaatataagcggtagcttgacataacaaacagtatctctgctggctctgcttgatagtctgatacagctaagcccgagcttgctacccactggcttgattgcctgaacaataatctgcctgatttgaatattattccttttttttaaaaaaaaactacagagacacgatccaaatggtccagaacttcagattatgcaatgacagtcaggtaggtacttgttggttgaatgccagctagtctgcagcgccgattgctgattccgtcttatattattatattatcatgatgcttaaccaatgactgctccagggaccagctttggatttggttttggttaagaagaatgatcccaaatgtaatcaaactagtgcataattcttctgtaacattggaaagattcagaaaatgtaggattagcaagataacaacaaaggcaggaagtggattgaaggggaaatactaaacaatttatcttcagatataaacatctgtgaagttgtgagctggacagtcgccaatgagctgaaaatctgattagctcattgaggatcaattaaatatcgtaggatataaagttaacaaatagtttagacaaagttgaataaaataacggtgaggtgcaaagtttgttgagaaatcgtaaaaagataaattttcacgggtggagcagaagtattgggccattggaggaatcaggcccgctacgtatattggcctttttctgaagcccaatttccttttctgcttgtggagttctaggattccggagttctataccgaatacggtccatttcggtccgtccttatgtgtaggcgggcagcctagtacaaattttaggcccgtacacgtagaatggtctatatttagacctatctgaacaaaaccttagggatgttagcaaactatgacctcccaaccaaaccgattctcttgttttcaaataaccttaatttaatttacagtgaggaaatcagtaaaaatatgttcgcaatcatttaaaatttacaatattctaatgtgtttggtgctagaatatatttaagaattaaaggtagcgatgatggtagagttcttacaagggctcctttggattgaataaatttcataagaattttaaaggattttattacttagaaattttattatcaagtcatttgaaacaaaagaataagatagtacaaaatctaatggattggatacctaaacatcatttcataagaaaatgcttgttcggctatgctacatcatagccaagccaggttgcaatgcagcgacgataaattgcagccaaacaatactaaaattccaatgtacttgaaatcctttgtttggatttcatgcttctccttgaagtccattgcacactgtttttcctctctcaactatttatttcttccacaaataaatttttgtgtgttatttcctgtgagctatccaaaattaccatctctaattcttacatttcaaacctcccgtaaactttttgtagcgtatgacaatgttattcatgtgtgcggttttttatagcatgttcaagaaaaaaaaccttaaatgatcgaactaacacaccaacaattatagatatagctcattttttttatcactaataagatattaaaccactcaaaagcagactgtagacataccatatacttgcagaccatgaataatttgcagacttaatattatccaagaagataggagtatgacactaagcctgagatatttcaaaagagagccctggaccctggtatgatagcagcagaagagtacaaggcagagacagataggctctctgtgctagtggttcttgtgaacgagaggcctcctcgtcgacccgcaaaaacccttctcccccaaacccttccccgtccccctatccaatgctacccccaccccgccatataaaccctcgccttcctaccacctcaagaccagccgctcgtttcatttcttatcacttcccccctctctctctctctcccccctcctcctttctcccacctctcctctccaatggcttccctcctcacgctcccctccctctccctctccaaccctagcgcctccgccgccgccgcgggagccggagcggcgccgtctctgcgcctccgcgccgccttccgctgctgggcgctgcggcgcgcgggcggcggccggtgggcggccgcgggggccatcgcgtcgcccaactcggtgctcagcgagcacgcgttcaagcggctgcagctcagcgacgaggaggaggaggaggaggagggggcctacgggagtgacgaggagggggtcgaggcggtgggtggcggggagggggacgaggacgagctcgccattgccaggctcggcctgcccgagcagctcgtatccacgctcgagaagcgcgggattacccacctgttccccatccaggtgatgccaatttgcgctccgtttcgagttttggatagcttaactgtgcttgatgtcaaattgcaggtttcggtattaggcggagacagcgagggaattggtgttagtgtaggatttgttggggggatgagttcgtggtgaataagcctgtattgagcaattcatgatggggcttgttttgatttaaaaaaaaaacagtggcgggataagtgcggcatgactcgtttagtggggaaagtgagagtagtctacgctaagttgctcctaggatatatcacttgagaattgaactgcgaaactatggagcaagtgatagctggttccataattatttttgcgctccataatatcaagattaaatttcacataactacatagtttgtggttcaagtcgcagaaaaccacaaatattttaacacttggcacttaactgcatatattttggtattgaagtttcataaaactacactatcagagaatgcatccacgccatctcgccgatggattcattcgttagttttgtgaaacttcagtactaaaacatatgtagttaagtgccaggtgtcaaagggtgtgtggtttgttgcaacttggactacaaaacatgtagttttgtggaatttactctaatatcaaactagagtgctgattgctgttccgttgatgcgtagaacttcatagatttgctgcatatcaaattcgtcctattcctacagatactgctaactatcattaaattacatatttgttatttgttgaatcaggacagttgtacgtttatccttgcttctaaaagaataaaacaatatccagttttacgtttatccttgcttctaaaagaataaaacgatatccatgtcataccaaatggcatggtgcatattatgaaatgtcgatacaaatagccaaataagtttatttccctttgaatttcagctttcacatgctcaccttgatggtgcttatttgcttgacccttttctgatttattttcgctgttccagagggctgtattgattccagctcttgacggccgtgacctgattgctagagcaaagacaggaaccgggaagacgctagccttcggcattcccatgatcaagcaattaatggaggaggatgatggacggagtgtgaggtatccattcatcttcctatgcagcttcacattgtattgcatgacaatcagttgatacttaacaagtgcattaacccttttttttcccttttggtaggcgaggtcgtattcctcgtgttttggttctagcacctactagggagttagccaagcaagttgagaaggaaataaaagaatcagcacccaagctcagtacagtctgtgtttatggaggtgtctcatataatgtccagcagaacgcactctcccgtggtgttgatgttgttgtaggaacacctggtcgcattattgatttgataaatggcggaagtcttcagttgggagaagttaagtacttggtccttgatgaggctgaccaaatgcttgcagttgggtttgaggaggatgtggaaacgatattacaacagctaccagctgagaggcaaagcatgctcttctctgccaccatgcctggttgggtgaagaaattatctaggcgatacttgaacaatcctttgacaattgacttggtatgaacttcgtatttccttccatttccatttttattggtgtgaaacatgtcactcttgttatttttatttggttatgccctcaaacaaaaacattccaggaatcagtttcatctagtataagagcattcttacatttaatcacagatatcattttgattttccaagatcagatgtgtcagttgttatgatcatgttatatgctgtaaaaatagtaaatacaaattctgtccagcacacatgtaagaggattaagagatattagcactggtcttgagtatgctaattgcacttacacttgaatacctgttgtttcttgcaagatataattgtgcacatgttctgtgaaggtttacttttattttttttgtctggattagtcatcttttattgtcatgtgtatactcaggtcggcgatcaagatgaaaaacttgctgaaggaatcaaactttatgctatcccgctcacatctacatcgaagcgcactgttcttagtgatctcattacggtatgttattgcagttcatggattttttagctgccttttcccctcctctcttttcggctcagcctcctgagattcagaaactaataagatcatgaaaccagttacagtttatacagctatgttggtgtatcatcatgccagtagatgcccgataagttttttttttttacttcaatccaattaagatttcagaacataattcattcatacatcttccatgtctatcgaactttttactgactttataactagtctgttttgctgagcgttggccactcaattatctaaaaatatcttgttatcaggtgtatgcaaagggtgggaaaaccattgtgttcaccaagacgaaaagggatgcagacgaggtatcattagcactgacaaacagtattgcttcggaggcactgcatggtgatatttcacagcatcagcgtgagaggacactaaatggttttcgtcaagggaaatttactgttctcgtagcaaccgatgttgctgcccgtggtcttgatataccgaatgttgatttggtgggttcacatatcctcttcacttcatttgattcttagatattgtaattctgtaaatcacccttcctcacagatcttaactctttcctttccataaagcgattatcagtgaagcttctgagttttaaactccattattatttacagtgctaaaattagatcatcaaactgtccatttttccccccgaacttaggtttttgtattgaaatatcatctagctttgatgtgttttatagcatctcaatctgatatcttgggttaatcttacgactagttaacaaattaactgcattcgagcattatgctatctgggatgaactgtaggtgtgtatggatcaattaacgagaggatttcattttaatgcagattatccattatgaattgcccaatgatccagagacttttgttcatcgttctggacgcactggccgagctgggaaagcaggaactgcaatcttgatgttcacaaacagccagagaaggacagttagatcacttgagcgtgatgttggatgcagatttgacttcataagtcctccagcaattgaggatgtgctggagtcctctgctgaacatgtcatagctactttaagaggtgtgcacacggagtcgattcagtacttcattccagcagctgaaagactgcaagaagaattaggacctaatgctcttgcttctgcattggcacatctgagtggattttctcagccaccctcttcacgttctcttatcagtcatgagcaggtaagaattaataagtgacccgaggaaattacatgtatccatcattaactgatattttactatttctaccattgtatcgaacacttcctttttccctaccttagttatagctacccatcaacttcatccagctgtcctgatttatgccttctacatttgaggatttatatccacctaatgttatatgaatacaatgggctactagtactgattactgaaattgcatcttttataaatttataatgggcaatcaaataattgtatagaaaagctccacttttttttttgagttgctcaaagttttgttgtgcgtttaccgtttatattttctttttaaagctagaagcactcatatgatttcttaccctctattaaaacacagggatgggtgactttgcaactaactagagatccaggatatggaagggggttcttttctcctagatctgttactggctttctgtctgatgtttcttcagctgctgctgatgaagttggcaaaattttccttacagcagatgagaaggtgagctcttgcttgagcatgtcgatcattaatttctgtgcatgagtgcattgggtctatgagcaattgagcatgcagttttgaagctgttggctgatactagttttgcagcatatatatcttctttaattaatgtgcattacgtgcaatagtatgcattgcagaaatcgatgacacatatcactactttttcatgcatatcttcaaaactcctgcatttatgtgtatgactttcactgtgatgctcatgcattggcgcattgttggttgtgtcaggttcaaggtgcagttttcgatttacctgaggagattgcgagggatttgcttagtatggaactgcccccaggaaacaccataaccaaagtgacaaaggtaacctttgcagcttggtatttttcaattattgctattggaatttatagtgcaattgctatacgtaatctgtgtgatgatacacaagtatttgtctggcgtggtggcatttccatttatttccaaccaaggcatttaaattgactttaaatggcaagtaaaatagggaatattctaccattattcttgcactacacacagtatagaatgcaatagcaatccctggtcttgttttggatgcggaattggttctttgtgagctaatgtgatgactgttttccttttgttctctgcttgcagctacctgcattacaggatgatggtcctgctactgatagttatggccgattctcaaactcggaccggggtttcaggaacagacggtccaggggtggtggctcaagaggcgggcggggtggttgggactctgatggtgaagacagatttcgccgtggtggcaggagcttcagatctgacaatgatagttggtcagatgatgactttggtggcgggagaagatcgaaccgttcgtcatcctttggtggccgcgggtcatcttacggcagtcgtagctcgtcatcctttggtggccgctcatcatcttttgggtctagggacaggtgagtttcacaacatcgcagaaataacataatgtctattcttttttcatccatgctgtatctttcttctaggagatgccaccagagaaaatgaaatacattatgagttagacaaaatttgcttacctggtaactttagaatgtttagtcttttccttagccactcatgtttgttagtactagctactcttatgaagttaagtcttgtcatatgaccaactcatgtgttgtaattaaagctttgctgtgaaattaatgacgggtttcctagctagctcttgctacagcataatcttgcctccctgaatcatggccagtgattacttgtaccttctcagtaccagaacaattacttaaacatgctactagttaactcatgctgctttcttaagctaatgagctgttcctcatttacagcagcaggagcttcagtggtgcttgcttcaactgtggcgaaagcgggcaccgagcatcagactgcccaaacaagtagatggtagaaacaacactcttccctgccgctcgggagttgctccttctgggcttgatcatgttccaacaagcggctggactattcaacacatgccaaggaacaccaaagcccagtcccccttcatctgatccatacatgcccaacactattgcctgacgaagattttgcactggttagtacagctctgtgtcgtcattccgtcgtgaagattttggcacgctgaccaccaaaggagagccttctgttcatttatatgtaatacgggttttacagggacgttaaatttttgttaccacctgggagttctcaataggatgttaagattaaatgaaccgtgtgtacagctcgttcctacacgactggactggctgatgccatcagaaactgttcgcgccaattagaatcactgtccaatgtcaaacaactttacatctggtgcttgtcaaaagtttgcatctggggcatatcaaaggttgccgtttgtcgtgtaaaggtttggtcggttgttccggcaggtggcacgtacctgaagatgacatggtcaatgctgcgtgcaacgggagatagaaaaacgttcatacggatgcaccgtcgttcaacttggtagctaatggttggtcggctagccaaaactactgctacgagttgtgtagattgtcgaagctggacacagtttctcttgcgtacaactcagagtagtttactgttgcttaagtttgatgtgtttcttacatttgagcaaacgcgatctgtgtgtgtcgacgtgtcatgtgtgtgctgcttacgtatacatagacccagtcgcagtttggcaccaaaggcaggggggcgtggtgttcttccggtgtcagaattcagaagtggtaggtcgatttggtggctgacgatatgacgatatcgattaaacggcacagcgaaatgcgtgaaatgggagacatatctatcaggtcaaagttcgaggctgtgcccatgtaaaaggacggagttggtttgttgatcctaacacgataaaaacatgtgcctgacaacgaaagaagaccattaattaactatggatttgcttagtttaggccgtaatctttttgctggagactgtgtagaccgtaatttaatttccccacgggttgtgctcgtgccggtggatgatctctgaaccaaaccattgggctgcccagtactgctgcctagtaggagtagctgcattgcacgcatgtttcccattactgaatctgtacgtacattttgcacacggaggaacaggactcgtcctgtcgccaagcattggccggaatgacggcttcatgccgtggctcgtgagtcgtgaccattgcattgcatgacaaaacaccacacacgctgttcgtgccgtccctgccctgctgtaccttaccaccagtacaacactccccaccccccaacacacacacacacattatttctccgtagaggtagtaagttttgcaccgttcatatccaacgtttgaccgttcgtcttattctattaaaaaaacttatgattactatttttattgttattagatgataaaaatgtatgactttttttttattttttttataaattttttaaataagacggacggtcaaatattggacacggatactcacagttacacttattttaggacagaggtagtacatccggtttataatagccgattaacttttgaatacatgtttaaccatttatcatactgaaaaattatgtaactaccttttattttcatgtgatttggtttagcattgttttaaacatgatttatattttttttgcatatttatataaaaactttgaaataaataaattgtcaaatgtatagcgttatctattaaaaaaacccggaggaagtatcttggtaacagcttaagatagctgatatcatcatgccattacctaattcctttttttttatatcttagagaacttgccaagtggtgaaatgaaatgaagttccactagaaattaaccatctgcctagctatttaacaaactcacgttaccatcactactacctgttttacagtttttattttctgcagtaacgccagaagagagttacacgctaatgtgaaaggtaaactaaagatttaatatatatgatgtggttatctgggtcgatgacgatcatgcacatgccatgagcagattaggcagagggatggcgtgtagagaactgaagtgaacaaattgaataaattatgaggatacagtcttcttggacaagcacgcaccgttttcagaataacaaatccttgagcagtaactgttcttgatggagatgcatgatgtgtttttcaaaccccaacactcactctgttacaggtaagcaaagagtgagaagaaagctattgctaatactatagtagtgattactgctgcccagtatcttattactatcaggttcccacagccatactactactcgagaagagttgcagaactaaaattggttgacttggatctgcagctgcctttgtttgcaagacaagtggaatcagatcgaatttttggggacgagacctacttgacgttacacacgtactcctactgaataccagatcattcatagtaccaataatttactacaaccattagtaccagtagagtgtactggcctgcaaatcggttgctagctgcatggtagtactcgactagattaagagtagctttgcactgctacgtagaagtagtatctttgatggctgtcaagtacatggagcgagtatttacctcaaatctgagctaactatggttattatctcatatcaccatccgtgtcctacagtaattaactagaacatcaaatgctggcagacatgatatcagaaattcagaactctgaatttatctgaagcccagtaggagcactgcaccatccttacatctgcgaaccattagagtgattaatagttctagtatcacgatttgccacttgatacgcgattaattctttcccgttctgagttctgacaagctacatcaggagtactagtactacagtactccgtatcttgttttctttttgtgaggaattacgtgcaagttccaacagatcaggctggacagaaaggattaatcaattaagttgtcatcagtcatgtctttatcatgggcgattagatgctttccctgcggctgcgatgctggctgcggccacaaggatgccatttacgattcgcagcatggtccacgcgtggtgtcatcgctcaacttttccaacggttactactactcgatctcctactttactcctatataactgaccattttactttttactgtatcttactccatttgttccataatataaggcacaactattttttaaagttgttttataattcagtataagagcacccgcaatggtaaagtaaggtgctatctataaaacatgtacacctcaacaatagactagattaatagtaaaccacttcaatggtatgtctacatgggtatctatagctctctaatccattgcctcgtttttctctatagactatctccatgttagtagatagctttgctctctctcttcatttaatctcttccaagtaggaaaatatgctgacatggatctcttgtagagagcttatagataaccattgtgggtgccctaagacaggcatgcatgcatgttattaagtagtacatttttttcactcaaatattattatttaaatcctccaccatcaagatatctaattttattgggtgcatatattctatttattaggtaatccaaactacgaggtaataataattatttattggtctttgggttaagggtggttgttccttatatttccatagtagtagtaatacattttcattttaattttgaatccatatatatttgagtcatcatgcatggtatcatcactgagtgataatagtacgagattattagtagcaagtaatcattagagcagtccattcaggatgaagtatctttacgtatttgacgaggaattgattgctggtatcatgcagacacgaattagcttggacgccatttgcaagcgatagatcagggcaggctcgccgctagctctctcctcactctagctacagtgtacacgcaagctcatcattagttcagacaactaaaatttgaagcatctgcactgcaaatatgacaagacgccatcatctgtgcatgccaaccctgtacgattgatacacacacgcacgggggttagttaattaatgatagatattctatgagattaactaagcaattgaatacttaattaagtaaagccggcgctcatgcagatgcagtgtacgctgtgaccagccgagattagagattactgtactagtagctagttagcgtgaactaccatcacctactcccttctactccatcgcatagtaatagtaataaactaatgatagtatatgccagccagctccctgatttaataaccaactcgctcttaatttcttctacctcgggtaattaacataagtaatcatctttcttgcttgtgatgtggacgtcacaaaaagatctatccatatgttcatcgtagttaagcagtagtggagtgctaccatggaatgctagctagtaattgattctttaccaacaatcgacttttttatattaccctcaacatacgtctatttactgtgattaatctgctagctaataatccttcactgacttacgtactgtaagccaactggtcaatgtatatatcgtctcttcagaaagttcagagcacgcatcgaattaacggcacacacccatctgttgatggatcgagcttaattaattaatttataaatgaaaatgatgacacagactgctcatcttttaactccaagttgatatttaaatactcatatatcaaattcctgaacccaggaataccatgcagaaacaactgacctgcagtttcattttcagctggttgctgcaacgaccagccagaaatataacgaacttccgaggtgacatgtctgagagaaacgcccacttgtgagtagctttcctcaagaattcatcttgtatccacctgtggcacgcaagaaccttcgtataatcacgatcagatcgacagctactgaaggattcaaggatacactgtttcatgctttggtcttcacttgtgatacagccagattccgtttcacctttttatattgcagttttcagccacatgaaatctctccttattgaaattaaaactagaatatatgttctagaaatcagtacacatttcctaaaaaaatgatggccaagacttggctgcgttcttaatgagcttagagactaggttactcaatcgtttacagagagcacgtttttcgaactaatacacgatatattttgtgtaaaaaatatataaaaaattattaaaatgaaacaaaaatattttttaatatataatagttaatacttacatgattaatggttatactccttccggactgataatacttgtcgttttaaataagtgtgaggtcaatctttaaaatctttaattatggatcatttttaaaatatttatctttcaaatatggtgactacatgtatagattagtcttaaaaagtactttaataaaatcatatatttgttaacacttttatacatattataatgaaaataatggtcaaagttgtttttttgagatcgtgctcttgtccaaaataacaaatattatcaacccagagaaagaactcgttacccatgccagaataagttgagtcagaaacgaacgaagcatttgacagaaccatagtgaagttccgctaacctgaacattagacagtcttggaaaacaaagacatactgaggccctcacataccaatggtgtttcatttgatccatcaaaagttcatgtaagaagcattccatttccatcacaaaccacacaaactattgaattaaatttatgtggacttttcatttgcctttgaggcatgctatggctgtgtttagatccaaagtttagatccaaactttagtccttttccatcatatcaacctgtcatacacacgtaacttttcagtcacatcatctctaatttcaagtaaaatctaaactttgtactgaactaaacacagccctatatccatgatgctgcagtgcgaagaatccaaaaggacattttgggtggagaggagcagaagagtacagaagggacattcatgtcattcaggtcaacgactctctgctcccatccatccaacggaagcccacctccgtacggtttacataaacaaacgcatcaaagacctaattacacactgggttggtcatgtaattctcccccacaatatactaacctagtactccttttgtaacttgcaaaattttgattgtattagagttgcgacaaaaaatgtcaatatttttcctatctaataaaattacccttgattaactaaaaaaagaaaaatacccttaagcgtgcatccttttcattgacagcaccggcatgtatggtttatgatatgcagttacttgtacatcacaaaccggcactattccctccatacgcaacaaggatttccccccccccctagcagtagaaaactcaagctacaaactaccaggtatttcataaagtgcataattgtccatgtaaaccttgcttagctgaacaaatccaatccaaagcaagcaaaaccattaatcaaatcaatcaattaaaaaaatcaattaatcaattaattataattaatccgcccataaatcagaatgcaagcagagagagagagagaggaagtccaatgaagaaagaataaaagccacccacctcttcccctccactccatccatctccccttctctcctcctccctctcctcctccgcacccatcgccgacgacggcgaggcctcgccgccgcaacctcctcctcctcctcctatcaattctccattcctcgccgcagccacaacgtaagctcgctcgctcgctcgctcgcgcgcgcgccttgggaaagaagaagagagcagagcaggccaagaacctgtggctgggccatgtccggcgtgcgggtggcggcgaaggcgcctgcggcggcggcggcgtggccgtacgtggagtacatggcgcggtgggagcggcaggtggagcggaggcagctgttcctgcggagctaccacttctcgcgcgacgtcgagctctcgccgcgggcgcgggcgcggcgcgtcgtctgggtcgggctccgcaggctccgccgcgccgcggccacggggctccggcggctgcgcgcgcgcctccgcctctgcttcgcctgggtctcccgccgccggaacatccaccgccgcggcgcccgcttcggccgctacggccgcctctccggcggcgccgcccacgccccggcgcccgccgcgtcgtcgtccgtgtgcttctggtaggagctcgaagctgcaaagcatcgatcaagcaagaaaggcaaagctaggttgggttaattggcgtctcaaacaagaaggcaatctaagctcattgctgcttggataaaaaagtaaaaattagccggtaaaatgttagtaacttgtagtgtaattccatggagtcagttctttattactgcttcactagagaggataaactgggtgtttattacctaaggggattgtttatgttcagtgttttttcgttcttttctttcttttacttttaatggtgaatctacactctactactctgccggtctgccccaatggatgaacgagctgtgtattttgctcaactttttttttctgcatttctacctgctcctctgttcttcaggtcgcttgatttgacctctatgttcgcttctttctttcttaaaaattgacatgtaaataaaatcagggttgtgtacatatactatgcatgcacgtgcatatgcagtttcagacaaaatcagttttttttttcttcagaaaaatgtgaaatctttgaggccactgtggcaatctagtatcaatcatgcaaacaagatgagaagagaattggagcaggataatggaaagatgcctggccggtgaatcttctgagttgcagggaccaagaaagaaagaaaagaagcccaaagtctgaggtctaattctaaaaaaatattcagagtttgtttggaagtaggtgaggtgagccacggttcgtgtttcagctttatttcaagtgcgtgtcgcggtcaaaaggcagcagtgcaaggagaagaacaactgaagaagaagagataagcaaatggttgctacttgctacatgcaatgcaaggaagacgatgccaaattgaaaatggcatctttgattcctgcctccttttcaatgaattccgtgagagattgggaactcctcttctctctgatgtgcacaagatttgatcttggattggctgaattcactgtcatttacttcaaacaggcagtgaacagccggcatcacttcttaggaatgcagaaaaacactgtaacaaatatgtttttttggaggcaatctttgtgttgcaatctgtcaaatatttttacactcgtccagtcactccatgccggcacatatgccatcacaataaaggattttgttcagtacaaatcctgaaagactttggctggcaccaccgtgtcaatacgccttaactgaaacactgtactggcaggaagtaattcatcactggttaaaactgaccgatcaattgatgcactgtagcatgcactccaccaaaatcaatggagtactagctttaatttagccgtgtatgttactacaccttctccacgagtccaggccggtcagtggactcagtcattatcactaagaaatccatcattattatcctggcccatatgccacgctacaaatctaaatgcctgattaatcaagtcagttagctattatcttaaagcctctgtctcaaaatatatataaggatactatcttaaatttatgaaaagaataataatatttacgaacagaatatattgatagtatcatatgagcattgttttgaaatatattttcatagtttattttttgatgcggtagtttattttttgaatatattttattttcatcctactcttttcgataaaaacttgattagctaaaagattctaacttaggacaaatctgaatccttatatttggggacggattgagagaggaggtagtagtaggactcctccatcttacgacgagtagggtacttgtactatctacatgagatgatggtcccagatgcatgtgctagctagctattgtctgcgtgatcttttcttgactcctctctctgcattctgtttaacgtagttcatgaacaatatgatggtttgattctggaatgtggtgccattgtcttttcaaaagcatgattgagcaattcgacatggacgttttcttctttttctgatcagaaggatcggatggattgtgatgtttcagactttcagtgtgtgagaggaaattcaggtaatcatacattcatactgtacttcagtactggtagcaacagctttggaaacgaacagctacctcgttgccattgcagtcaggtttggggaacctaacagagacaaaatttgaatccaaaagctgggaaataaacagcccagtttgaattcatgatgaggacaatagctcactttgtgagtgcagattgacaaagtccactactgtgtacttttaaggttagctgctatctgctttagaagttgtaaagatgtcagtgctgctaatcttctcagggagctgccatggtaggatgtacacctgaaatatgaaaaaaaggaagagctaacagtggtagtcagggtttataatactacgctattacctcacgattaccgtggtaaccatctcagtttttcgtggtaaccatctcagtttttaaaaccttagggtttttctcggtaaccctacgcttttgctcgactacaaccggggttcccctaccatttttgtagtagacagaaaaaatgtacgagctgtccgttcatctcttcctccctaactttgtttctcatcttttgggtttccaattagtggcggatttaggccatttctgtgggatcggctgaccccacggctttttgaaaaacaccatataaatctcgatttcatgtataaattcaaaaaaattagagaaataacccacttaaatataaatcattagtaattgaccccccaggtataaaattctggctctgccactgcttgcaatggagcaaattttgccaaatcatttctccattctcgtttcatttactaatcctacctaatgaataatgatacatgaatgtaatgcacccgttcgtgcagacacagtaccaccatgacctgtcttaagtactcctatatgtaagttaaattgaagataaacatgtatagtttgggcgcttcacatggctctcatttatgatgcagcagcgacagcagcaataacagagatagagatgaatgcccttcaacatgatatactgctagcgctccttcatccacgggtttcatggaccaggagattgattactattcgcaatttttgcctctttttttttttctaatccaaattctaaatccgctaggcttcgtctggaacgtgcgaaatttttaacgatttttgtgagagataagctgatatgtgccgcaaatcctacgaagttatttcctgccagattttggcattccagaacattccagcatggcagtatgaactagcactagcaggatgcagtcttaaaaaaaatactactatataaaatacagtattagttaataataattgttccatggtaaacaaactgcgctaaaatattagtagacaaatattgcaattgataatgaaggaaattgattgctgcaaggaaaacaaagaggtgcatctgtactatttagcaatttagaatatatatattaaaaaaaagaagggatttcactgtcatatagaagtactctgcgatttgatgatgctcaatggaagtccaaaacagaataatgttaactttaagaaatagaaaactggtatatttttccttgttatctttggtattttctgatacaactgaacatatataatcaagaaaaacaaggatattgaggctcattaaatataacactgatagatccttgcagtatcaacatggttcttgaaagtatcaaaaaagattctgtggaactgcgtatagaggggggaaaaaggagaaataaaccatcccaaatcctcagcaattcaaaataacttttattttctgagacacgtgcaatactagagaccaagaattcttcttgcttccaattcggtatagagtattagaggacataaaaaaacattttgtctgcagatgaatatgtaagcaaatagatataaacctcaatgaaaagtgtgcaaaattatcacaagttgaaggtttctctcttttttttaagaaaaaaaagagatgatcttgaggaatgaagattgcttaacgcaaaaaagataataatcaaatactgcttaatgggatcagatagtcataaaattgctccagctgtgtactagaggatcctcctcaatactcaatgagaaaaacccaaaagttaagtgaaaggaggccattagagaaggagccggcacggcctgtcacgaatagaattgttgcggtccgattctaaatgggccaagtaacgcaggatggctgtgctagtgggcctgaccacatgacgttgcttcgatgacgggcctcaccagtcaccgaattgggcctctcccagccgggcctagcccatcaagaaaccataatttggatggactaatcgattagcatttcgcaacaaacaatcatattacgcgtacaaataccgcattcccgccaaaaaaaaaaaaaaaaccatttggttcgcctgagtccgagtcggtctcgaactctcgatcgattgcattgtctgtactgcgatttgatcgcgcgtacgtgcgccacgtccacgataaataccctcgatcggctaccatctgctagctctagctctcctcgatcaattcagattctcccctgatcgaggtgaagctagggcaacgcgagagctagcgccgccgacatggccgacgacgacgagatcgctcttgagccaggctacgtcttccacccttccgacgacggcctcatcaccctcttcctccgccccagcatcgccaagatccccttcgaggaccgcctcatcaaccacgccgacgtctactccgccaatccggccgagctcgtcggcgagcacagaccggcgccgggcacccatgggagcagcagcgtctggtacttcttctgctccccgcgcttcaccagcaagcgcaagacctccgggaggcggcagcgcgcggtcggcggcggcggcggcggcgagagcgtgtggaagtcggagggcggcaagaaggccgtgatcggcgccgatggccgccgcgtcgggtacctccagaagttctcctatggcgtctacgagtcgtcgtcgtcggggtcggcgcgcacgttcacgaggctagggtggtgcatgacggagtacggcctcgacgacgacgccatcgacggagcagacaagcaggtgctctgcaaggtctaccgctcgccgcgcgcggtctgcgcggaggcgcgcacggcggcggcggcgaagtcggccgattcgccatgctccggctcgaagaggaaggcggacgacggcgcggatcacccggaggcgccgcccagcgcgcggccgcggcaagaggaggccgggagcgagcagccggcgatcctgccggagttggacctggatgcgttgctgtcggcgccgatggacgacagtttgggagtggaattcgacacggccacgacggagcagtacatgaggtatctgatgaacgacgagccattgccgtgggctccgacgatggaggttgccggcggcggagacgaattcatcgagacgacgaacggaccttgcatgggcgaagaggagatcatccagcggctggcttccggagaaaccctcgacgacattcttggctcgaaccctaattaaatgaaacaagtttttgattgaggtgtagtgagcggctgtagcactaagtagtgcagtgtttttcgtcagagaacaggtttagttagacatgtactatgtactacgtatcaatcaattagttaggtgtttgtttgatcaactgagatgcatgaagatatgcattgctcgattgatcatctcgatcgatcgatctgtaataactaatgagaagagttgaatcgattctttctgtaaagtctgatgtaataatgcccttctgtgaagtgaactaacgaaattcatcttcatcagagagattcagagtgattctctttttgtatcttttgcgagtattcatcagagtgatttgttctggcgtttgggcaaaatctggtttgatatcgctgtgtcgatggctgtatcattgtgcgctaaatctaaatgggccaaattgggaagttggctcgtggtggtaggcccaaccacgcggcatcccctccattatgggccctacccgcggcatctcctcgtggacataggcctggcccatcacgtactcgggggctgtgtataaattattttttaacgcggggtcttgttgtaagtttgccaaatcagcttaaaatgcaaagggtggataggataaggcaaagccattgggctcgtcggagagacaagtagagagcagcgtagtcgccgcacttagccatgctcgcctcgccggcgctcgccggcgcgcgcgccttcgcggcgaccgtgtccgggagcctcggcatccccattccggccatctccgcgccctcgccctcgcaggcgcggcggcgggcctctctcgtcgtcgttgcaaaggtcaaggtgtccactccccaggccgaccgcatcgcccgccatgtccgcctccgcaagaaggtagtaatagcgcctgcacgaggggaattagccaacgttgtttccaatctcttgcaatgcgatgattgcgcgctcctttttgcggttagttggtaggtgtgaggcttgtggggtgagagcaatgtcatgccgttgacgtatttgatgaaatgcctttgtggcggcggtacactaaggagagtaggattcgctagtgtcatcctcagtgacgtccagttcaaacgagtaatatcttgtttatgtatgtcttgattagtcctacttgttagaatgtcagttggccgtgaggtcgcaaacaaacagtttgtggctttgtgcatactatggtgggtgactcagtttgtaggctttgccagaatcagaatgcatgtttctgtgaataaaagcatgcctttgtgtaaaccttacataatttatttcaggttagtggcaccacggagaggccaagactcagtgttttccgctcaaacaaacatttatatgctcaagtgattgacgatacaaagtcatgcactctggtttcagcttccacaatgcacaagtctctttcaaaggacttggaatactcggcagggccaacagttgtaagttgattttgacttacccatgtctaatttctttgcttctttttctctctgaaaataataaattgagcagtgcagtaccacaataataccgtaggtgatgctattaacattttgtaggtgcacttatgtgaaaagatgattgtgcatccatatttgtctgatcagacaatcatgctcaattcaatctcacttgttcaaatccttaacctagtgtcgtctcttggagacattgattgcgaaatcaataggttctagaaaaacttaccattgaaatatctgacgatcctttgctgatgtagctctgaagaaaacccagaggaatgcacaaaaaatgaaagctgtttgaagttgtcgcggttgttttttatggttttatgcatgtggcatttccattttagtacatggttctgagctctacttacaaattaaatgttccacaggtcagatagtataggattaacagtgttgaacacgtatcttaaagtttagtgtgaaaaaaaatatatcgaatatatttctgcagttgtttcttgccgaaagtcacagctctgtttctgatgaaagttctctgttgttctggttggtttccaggaagtggcacaaaagattggtgaagtgattgccaagtcttgcttggagaaaggaattaccaaagttgtttttgaccggggtggtttcctctaccatggtcgcattaaagctctggctgatgctgctagagagaatgggcttgatttctgaaacctccaaatgtttgttcatatctccagaatcacttgttactttctttttcgcccacctgtcgaacagagtttttctttgtagtaatttgatttgctctgcaggcttggctactctttaattgtatatcaccccactatcagctcaccagttattgagtttgtctgcttcatgaagtttcttttaacgggcatattttcagtttaatagatcaatctgttgccatcctatcctacatgtgttgttttgaactctgttcgtgcaaaatggagcactcctacaacctgctactagagttctggcctgcaaaagcccaggcctgaaatggctaatgtgggcttcctggccaacattttgtgccaggcctcgtactcttgtcgaagctgtcaggtgctctggagtctggagcgcgttattcagattacaaaaataaaaaacgtgctaattgcactgatgcatactactgtccttttccttttcatttattttccatcatctctgatcgaattatctatcagtaggtaacatttattttctaaacatctcttccatgagtctttcagagtaatggctgattagtgattactgaagcgaaaatgaacgccatttactaagcttacatttctctcactttcgaaagaaacaaatttcaatgtgccaaaaatcgaaggtgtgtcttgcccttgctattagatcaacaggaaaagctgggagcatttgggaattgcataatctcagtattagttgtgatttgctttggaaagcttaagcgattcaaatgtttgcaaacaaaatttacacttttgacaatcttctctttttcatcggctataatgaagctccaaggtgttcaaccaaagattagcgttattttatttacataacgttccacgtgattatttataaaatgttctgcaaaataaggcaatcagatggaaagggagagcttacacatcaagtccattatgtgattttctgttaatttaattgctcgcggtgtcttattcagtttgcattttttatggtcatttggttctctcttggattggaacacagcaactttcattaactagatctcaatcgtcaacatgttttcaagctacagtagttgttagctagaatctatcacagatatactccagcaatcatgtctatagtcatgcggcgagttaggtattcaaatgcagtggatgcagatttttcttcttcttttgttgttcagtgaccaagagcaagagctatctataaataaaataaatatgttaaatctcgaaaagggacacgacaaaccgctcaggtactcttggagatatatatattacacgacaaacgtcattacgtgcgcatgatgcatagcactttgcattgcttgtgaattgtgaagtcttagaaatgacgttatttcctttttttttctaaatctaaaaaaaaaggttatgttgtttctcgagaaaaatgttatgttattacattgcctgtttttcccaatacatggaaaaaatttagtaaattcaagtactagtgttgcaaaatccaatattttgggtggatttagtaatttgtggagggcgaggtgtatggttctttcatgaggcattctctcatttatccgacttacaattcggagactccggagactgacaatccggactctggagagttcaataaccagagtcatggtctaatttatctgttaaggcccctttgaaatgaatgataaagtttttgaaggatttaatttttttaaaggattttttaatagagtcctttgattcatagggagagggtagaatttttttgttatatagaactgcattgcaatggccaataccataggaaaataaccaagatgttggaacactttcagttttttttattgtgatgcaatcaaatgactactcttcccaatttatgtgttttgaatttatgtgggattaaaaatatacactattccctttttttttccgtgggaggacatcgattcatgctttttttttgtcatgcgtgtttcaaagggctcctaaatatctgctaaaggatggagattgatgaccgttcaagaaaaaaaatcgatgctgacagttcatcgataattcagatagtaaaagatttgtgctgtgaatggtaaaaattgaaaagaaaaaatagcagtagagagagacgggtctcgagtggcgataagcatgcatctgatccgatttccgagtagtccaacaaaagattattttttagatgatagatttttcattaaccctatatccacaaagaatataaacggccaaaatccaacgagagatgtccaaacaagaagtacattgcacgagtcgaagtctccaagagatcattgcagatgcgtgctggtaaaccacgcaacgtacgtacgctcgacacttgcaaactgctgccgcgccacggcacgacactcgtaggttcgttcttgcatatatgtgccaaacttttctacaagcttgacacgatccttaccttgaattgatccaatatatgctttgacttatcattgcaaagattctttcttcttcttcttcttcttcttcttcttcttcttcttcttcttcttcttcttcttcttcttcttccttttctttttttttaaaaaaaagaagaaattgcagttcactgaatggctttcaactagaaacgcacacagtggatattgctgcgatgctgcatctgccggtatctagaacgaacttatagaatccaataaagatttgcacaaccttgcacaagtgacgtgcacaagattgaggagacattgcttcttttttatctttattttgagcaactctgaagaaacctttcagtactacagctctgaagaaacccgttttttctctttaattagagcatatctgaagaaacccctttgtagtacagctctgaagacaaccattttctctctttaattatagcatctctgaagaaatgtaatagcatctgttagagcaagcctgaagaaacttcacacgtcattcgcttgtgacctagataaacaataatgctgcaagtgtacaactatggagttatattgtaagctacttcctccgttttatattataggactttttagcattacttatattaataaattatttatatgaacgtgagtaatgctagaaagtcttataacatggaagtaatagtagtgtactgctcgcctcacatcgatatgatcttgcagcgtcactccacacctgtagctttcacaagttggattacttctcaaatcttaactgatggtagtgctttaaattattgggcaattctggctacttaatttttatctccgattttttaatatataacacaacacaattgattttttattagtatttgtcttttcaaaaaatatgtgtttaaataaacaatcacaccaggcataatggtactcttttcactccacttaagtaagtaattggataaatattattggttaaattttgagaaaaaaaatcaattgtgtcatataatatttaaaaaatagatgaagtaattattaagtacattattattaattattaactactgctgattaataactatattattacaggtgttattgatccgagcttttttttggacaaatatatttgcagatggaaggtgcgaagcatgccgaaagcagcgatgggatttacgacctgagaagtgagaactttcagccggccacagccggctttagactttttttttttatctgtggaattcgttcagagaacaacaaagctttactttgaccctttaaacttatatcacctaccaatggagctagcgtaagtatctagttctcctttgggaaagtcggcaaggaaggaaggattaattaggcaagatgggtaagtgccaacattaagaagttaactctgcacttgcagcggttgttgttacagttacctatcgatgttactgcctagcaacctcttttttttttttttgccgactgatgctgtacgactgtacgtacctccccatgtctatacggtttagtttaatcttaacgaaacattatgctctggacagatagtacattaatacagtaattaattcgccataaagtacgttgatgtgattagatgtacttgcagcagcattactagattaattgtattcgttacgtctaaaaaaaatctgcctacctagctgcctctttggcgatcggaatttcagaacaaactggaggaagttttttttcttttcgtgttaaaaggaaaaagaaagaaaagaagtagaagtatgattaaaaattaattagaagaaatgtgaccactgcatcttaagcacgtagtagtgcatcttgaattttattttgttttgaaccatatgactgtggattattatgagtatatgcagttccacgtactccgttaacgtggctaattttggctccgccatccaaaccgaccgaccgatcgagtccgacggcaccaccacctgtgcagcatcgaacactttgtaaggacgatcatatcattgcaacacgtacttccgtgtcccttgtgtagtccatgctgacgtttctggcaccaaaatcacccaaaaaacacttaattaatttagtttgaaaaacattaataactaattttgtacgacgacgtggccattctcctgcgaaagtaatcgcgtagtgttcatggagacgaaagcggcaggactcctcgcaagaaagaaagaaagaaaacggcaagacgaaattgtacaaaacaacacgatgcattctagctcgatatgatcgatctgcgccgtcctgtatatgcattctagcatggcagaacgcatggaatgtttcagatattcaaaacacacacagccgtcacgtcatggacgctagctgccggcgacgatcaccaccgttgtccacgtactacttccatctaattaacgtgcatcttctaggctctgctcatgcgcctatatatataaaaaacgcacacgaattcgatcgcgttgcatatttgcatgaacaagtcacaagtgtagtagaagtgcagggcgcaagctgtgcaacacacatggcggcgatgacggtgaggccacggccggccgccgccgcgatcatcatcgccgccgtcttcggcgccgccgcggcggcggcgggcggcggcatggtgggcgtggacgggacgcagttcgtggtggagggcggcaggacgatctacttcagcgggttcaacgcgtactggctgatgatgatggcgtccgacccggcgcgccgcgccgccgtcgtcgccgcgttcgcccaggcgtcatcgcgcggcctcaacctcgcccggacctgggccttcagcgacggcggcgaccagccgctgcagtcgtcgccgggcgtctacgacgaggccatgttccaggtcaccaccattcgtcgtatatcaatgaccatttgtcacgtggaatggtgaacaaaaactcacagtttttgtttgattttctctggttttcttttttgcttgcaggggctggactttgtgatcgccgaggcgagacgacatggcatataccttctcctctgcctcaccaacaacttcgacgatttcggcggcaagcgtcagtacgtccggtgggcggccgacgccggccacaacctcaccgccggcgacgacttcttcaccagctccgtcgtcaaatcctactacaagaaccacgtcaaggtacgtcacaatcgatatatacatacatcgatatactagatgttaaagagctggagctcgatctctcgtgcaggcggtgctgacgagggtgaacacggtgacgggggtggcgtacaaggatgatccgacgatcttcgcgtgggagctcatgaacgagccgcggtgcgacgccgacccgacgggcggcatggtgcaggcgtgggtggaggagatggcgccgtacgtgaagcgcgtcgacggcggccgccacctggtgacggccgggctggaggggttctacggcgacggcgagcacgagagcaaggagctcaacccgtggggcatctactacggcaccaactacgtggccacgcaccgcgccgccggcgtcgacttcgccaccatccacctctacccggacgtctggctatggggctccaccgccgacgagcaggccgccttcttccgcaactggacgcgctcccacgtccacgacacggcggcgttcctcggcaagccgctgctcgtcaccgagtacggcaagttcctctggaagggcggcggcgccaacaagacgcagaggaactacttcctcgacgtggtgctcgacgccatctacgcctcggcgtcgcgcggcggcccgctcgtcggcggcgcgttctggcagctgctcctcgacgacgacgtcgtcgccggcatggacgacctcagggacgggtacgagatcatactcgccgaggacagccgcgccgcgagcatcatcggcgagcactccgagcagctggccagcctcaacggccaggacgcggaggcgcttcgccgccgccgccggcggccggcgagctcgcaccggaagacgcgtcttggcagcggcggcgacagcgacgcactccgactcccccgaacgctcttgattcgcttcatctctttgtctagatcgatctcttcatttattcaagacaattttgttcttttctagtttgtatatagcttgcatccttctccttaggtatagttgttcgttggcacatcttgcaactgtaacctgtcgaaatcatcaggaacgcttcaggatggctgttctgacgatgtatgttttgtaccatagtttcctgtataaggtgttttgcaacggttactacgatggagtaccatatttgtttatactaccattcttaattattgacagtagaattttctttactgtttgtaattgttaaattatagtgttgatagtggaatacagtagagaccaccgcaagatggaatgctagctttctgaaaagaaattttgtactacagaactgcaggtccctgcttccaatactgttggccagttgaagtcgacatttcaacctaacacaacgcttattaatcagcgtatccctgactgttttggaggttaacagtggaacatcacttggaaaaaggcccactcagatttatgagttacagtagaaaaaacaaattttatttgccagacatccttttccatctttaaacttgaaaaaacgggaggactacacattgagtgctgcaacaatgacttaacatgtggatgctttcctgcataactgctgagggaaaagaaaagcatcaaagcatcctattggaatcaaattatttacagcattttaaagctaattacgtgcctgtctacttgttgagcgctctgcaagtcttcagccgtacgtggtcaattaacaaggtaagattttctgctctacggggggctgcaacgatggggtgattttccttaatcttcttcattttttaacttccggtgacacaagcacaagagacatgccgtgggaagggaagcaagtagcaaactgatccaaaggccatacatttatacccaaattattcaatgcaggagcaacggatcaaggaatcccaaatcactcagattgcaacgccgcctcaccaagtcggcggcgacccagatggatcccggcgaagccacgacgcggcggttggcggagacgatgaggcgcccatgccgagccgagcgcgagcggtggacgcggtcggcctgcattttgcttgggcagtggcggtgggccggtgacccattaacaggtcatgtcgggcctagtatgtatgggccaaagcttccgcccattaacgtgttggaccgttgacggttggtgttagaggggtgcatccggatgaaagggttagaatcttctccccacgcgcaaagtgagtcattaattaattaaattttaaaatatattaatatgaacttttaaagaaacttttgtatagaaaaatttcgcaaaaagtgtaaggaatctgaagatgggaacttgtagttcagaacgcagtcgaaaaaagattcaataagatttaatctatccatgtttatcggtccatggtgcaagtttagagtttggggcaatttgcttatttgacgctgttcggaagcataacttctaatttgtcctcactttttcaaatttgcttatttgacccatttctcaaaatgaaagatcaagactaaacctgttatgtgaaaacaagataacggtgctaagaaccaaattgtcatatttttttctcttgttcatttgaccataatatataaaagctttttttattcgaatctttgacataatctattatattattaaaggaatagaaaaaggagcctccatattcgctctcatggtctagaaattctcacattaatcggagaaaaataaaaggcagagtccatatagaaatacaatttagaaataactgaaattcggaattaaaaaataagaatattagaagaggatactagagtccatatagagtccatatagaaatacaatttaaaaatagttgaaattcgaaattaaaaaataaggaatattagaatagtagactagagtccatatagaaatacaattaggaaataactgaaattcagaattaaaaaataaggaatattagaagtagcgtatagagttcatatagaagtacaattaggaaataactgaaattcaaaattaaaaataaggaatattagaagtagagtgtagagtccatatagaaatacaattagaaaattactgaattcggaattaaaaataagaaatattagaagtagagtatagagtccacatagaaatacaattaggaaataatagaaattcagaattaaaaataggaatattatgagtagagtatagagtccatataggaattgaaaactaactaaaatttggaataaacataacaaaattaaaagtaaagtttagagtccgtataaaaataaaatttacaaataactaaaattagaaattaagaaaaacatgggaagaagagtttaaagtcaatataggaatacaatttagaagtaactaaaattcgaaaattaaaaattaaagaatattgaaagatgagtttagagtccacatagaaatacaattagaaataataaaaattcagaaataaaaataaataatattgaaagaagagcatagagtctatatagaaatacaatttacagaaaatttggaattaaaaaaagaaatattaaaagacgagtctagagtccatatagaaatatatataatttacaaataactaaaatttgatataaaaaataattaataactaacacgtatataaaatacaatatgaatattacacattagtagttttgtaaagttattgcaaaatttaaaattatgttatcattttaatatatttgaataatataatgagaaaacatatatgctattatatgagaaaatataatgatgctagccacgcaatctgcgcgggccaccatgctagttgtaataaatttagcatagctccgagatttgagacaagtttaatcgatttggcttcaaattgatatatttgacaaatcaaattaacaaaatatgatataattatctttttcccatcccaaattgcatataattaataaaatatagataaagcaaaacacacatagagctgagagccatgcgccactgtcgcccctacttctcacgtgtcgctgccgctgctggcgtgactattgatcccttcgtgcgctgtagtctccgctgctacctccttgcccctgccccccctcgggtgccactacccctggcccctactcccaccatgcaccgttgtcgtcgcaccctctgcgagcccacaccgctgctctcttcatgtgtcgttgtcgcagctctcatcgcacgccgccgctttcaccgccccgctacctccgcacgtcaccacccccactccctcctcgtgtcgtcacctctccctccatctcggctactgtccgccacgctagtctttggagatgaatggatgagaagaaatttagggatatgatgttgtgtacttaggggtattttgtcaatttggcgtataaatagtttttttaaatgaaatcttaacagtgtttgcaaataaggtcaaacgacaacttcaattttaaaaaatatggtcaagtgagtaaacttaaaaaaatagagacaacgaggtttaaataagcaattgtctgttaaagtttccctgtctttcccattgatgaagatgacagcggcaaccaagctgcagtttgccggcttgcagcctctcggatggctgatggacggttgagatgaaggcattgtaggcaagggccaatcctgtccaacccggctccgacacgtgccgttgccagtttgccacacctcgtcgaggcgaatcccccgcctttgtgattcgaaccgctttttgggatcattcgaatccaatccaatcaatcgaatgctgcaagaaaatccaacgcgcgccaccgacacacgcgacgaccacctctctacctcgccgcatccttcgatcccctcctctttcactggtgcccagcgctcgcccgtctccacccaactgaacttgacttgcgccgccgccgccgcggggaagcctccgaataaactcgcagccgcggggcctctccggcgatgctcggggctgcccagggaggatactaggggcggatttcgagggcgacacggggggtgtcgcttgctccggtccgagtccgacgctgctgagccatccacggacctcaaccctaggtatcgctttatcgaatgagcgttcattcgcctctcctttctctgtccctttttttttgggatctagatggggccatggtttgctctgtttctgtttttttttttttggttctaaaaaattcgtcacgggctcatggctagacgtacggggtgttgtggtgtattttggatagccgaacagcacgaattctcaattggctagattacggttggattcctgaatagccgacctgcaatttgggtggattaggtttggttcctggatagcctacctgggatgggttaagcttagattctgtggaagtagaattttggttgattatcaggggcttagagttgaattcagtgaggaattttcgttttcttagatttaggcgtattatgatttagggaggtttcgtgaggaatgggatttttattttgctggttactgtttgatttcggtaggaatttgaagttgaggtgattgtggttgcaaaagagagagaatctggatgtgtgccatctttctattatttaggtcgttgattgcttaagtttcaatctaatgctaaatttattgtattaccattctataacttttgtctaacacccctggtttaaaattttcatgtggaacctgctatggattggttgggatattttcatgagatctcttcatcaaagcatgatctgtgctgttattacaatataaatggtgcacgttgctcttgtttacacttatctgtgatttgttaatcttctgttaaacaatttgctccctatgtttgtcctgccctgaaatctggacttgtttagcacaaatggtgcattttctgagacatgtgaatggctttatctctaggtctatggtttaatttggcgtaggttgatttttgattctatacttttgtttccctatcatttgacgctttacacacaaaaaaaaaaacttcaccgttattgactgactggcattgaatatgaagcatctagctgtaatagtttctcagccattagtatggttacgagttgttatgccatactgattgtatttatcctttttttcctggagtgggcaagggaagctgtttttgtttttattcatcctcagtaaaaattttcatctagatcagattatgtttcctttgtttgcaagtgatgtttaaaagagaaaaaaaaataacatgtgggggctaaatcagtgaacaatataaaatttttcatgaaatgctggtgaaaagcagataaggtgtggcttgagcatagtaagttttgacctatagtgaggctgtacaaatcttctgatgtcaatcatcttgataatgataaatgcatgagttcttgcgctttagttcaaagacctccaccctggcgcgctgccgtggcgcctggcgatggcatggtggccgtggacggcacgcagttcgtggtggactgcggcaggacgatcttcttcagcgggttcaacgcgtactggctgatgatgatggcggccgacccggcgctgcgcggcgcagtggcgacggcgttccagcaggcatcggcgcacgggctcaacctggcaagaacgtgggccttcagcgacggcggcgaccagccgctgcagtcgtcgccgggcgtctacaacgagaccatgttccaggtcatcctcgcttgcttaccatcgtcgtcgtccaaaccaacgcaaaaactcactggttgtcttctctgtaacgtttttctgggcaggggctggactttgtgatcgccgaagcaaggcggcacggtatataccttctcctctgcctgaccaacaactttgacaattttggaggcaagcggcagtacgtgcggtgggcgggggacgccggccacaacctcacctccgacgacgacttcttcaccagcaccatcgtcaagtcctacttcaagaaccacgtcaaggtcagtatatatgcaaagcatatgcatcgataatcgatgtgttacatttcaatctcactcattcattcatgctgccgttgcatcggcgtcgatcgatgcagacggtgctgacgagggtgaacaccctgacgggcgtggcgtacaaggacgaccccaccatcttcgcctgggagctcatgaacgagccgcgatgctacgccgacccaaccggcgccatggtgcaggcgtgggtggaggagatggcgccgtacgtgaagagcgtcgacggccggcacctggtgacacccgggctggaggggttctacggcgccggcgagcacgagagcaaggagctcaacccgtggggcatctactacggcaccaactacgtcgccacgcaccgcaccgccgccgtcgacttcgccaccatccacctctacccggacgtctggctatggggctccagcgccgacgagcaggccactttcttccggaactggacgcgctcccacattgacgccacggcggcgtacctcggcatgccgcttctcgtcaccgagtacggcaagttcctctggaaggaggtcggcgccaacaaggcgcagaggaactacttcctcgacttggtgctcgacgccatctacgcctcggcatcgcgcggtggcccgctcgtcggcggcgcgttctggcagctgctgctcgacggtgacatcgtcgctggcatggacagcctcagggacgggtacgagatcatactcgccgaggacagccgcgccgcgagcatcatcggcgagcactcggagcagctggctgccctcaatggccaggacgcggatgtgctttgccgccgggcaagctctcaccggaggacgcgtctaggcaactcgcttagctgcggcggcggcgacacccttgaactgctcctccggatggtcttggcttgtttcgtctctttgtccagatcgatctcttcatttattgtacagaatttcattcttttgtgatttgttccatgcatccatcttcatgggtatagctgttcgttggcacatgttgcaactgtaactaggacaaattttcaggatttgttcaagatgattgtcctaatgttttgtaccgtagttttcttgtagactatatagaatgctttctgtgaaaaaaaaatactatacttcaaaacaatcccatcttccaatactactccctctgtttcaggttataagacgttttgactttagtcaaagttaaattgctttaagtttaactatatatgtagaaaaaaatagtaatatttttaacccaagacaaatttattatgaaaatatatattcaattatatatttggtgaaactaatttaatattataaatattactatatttgtctataaacgtagtcaaacttaaaacaatttgactttgaccaaaatcaaaatgtcttataacctaaaacggagggagtatttgccaatggaaatcgtcatttgaacctaacacaatattaatcagtacactttcttactattttggaggttaacagtggagtgtcgctgacaaaagtcccgtggaaatgtttgagttacaacagggaaaacatttttgtttgccatatgcatccttctccatctgtttttctttctttttctttttttttaaaaaaaagagcactacacattgagcgctgcaacaatgggccggcgccaagcgcattacttcacccctaatgggccgtcatgaacacctgatgggtttaatgtcatgaaacctgaactcacgctctctcgctgcattttttttttgcagcaattcaagccacaatgatctggaagaacgttggccttccaaatttctttacattgtctctaggaaaggacttgcaggtgcattcagttagtttcagtttcaacaaccctgcagttttatacttatgctgttttcatttaattcgactagtttcaacaacctctagaatttcaaatttagatagtaataatgcatgcatgtgattagataaaaagttagcgctgacatttcccggttgctttgtttgctaggattgtgttgcatctcatgattctcatctcgatttcgcggtaattttcaaacaagtgtacaagcttctcagggtacttcgcatccaagctagcactattgacctgcatctccttcagaatttgcacgatttgcatgtttagtggatttgcaagattgaaaatcagttagccaagtttgggactaaattataagagcctaagaggtcatcagtgaccgatttaatttgtcagccacaccatcagttctaaattatttttgtggcgtccacaaatttggcctgcatacttttttaaaaaaatctgaattaatcaaccctgttatgccaaaaacggttgctgatgataacatttgatttgtgcgtacgtatctgctgacgataaattacgacagaagcaactgaaactacgatatgatggtctgagaaacatcatatgccttaacggacgatcacattacagttgaattttctagttactactaactaattgcttctctaatcgagtctccgccgtgcaactcgatcacatgacacatgcatggtccatacgcagtcaaaaaaaacaaaaacaaaaaacaaaaagaactttgctttcgtctaatatatttgaggcgcgcaagctttgcgtgatcacgaaaagaagtcacagaaaaacgcaggcggtgaatactcgatcgaattgagttccccaaatcgatctcatctcatcaacaaatgctctcaaaattcgtccaatgcataagcatggaagtgaatgagtgatccaatatttcacaaaaacccagctctcaaaagcccactgcaaccgcttaattacttggctataaataaggtggtgaagtggccatgaatggatcacaaagcttcacccactccaaacctctaacacctgcagtggcctgctgcctatatttgtccaattcgacaccgatcgatcagcttaagaggctgagcttaattaataatcactagtggtcacacgtgtaagcactactagttagcatcagtttgcataatcccctcgcatatttgcagctagctagttatacatatatatggcaggaatctagcttggctgtgcttgttcttgatccatccatcgccaattcgccatgcatgcgttcttgccctgagtcgatcttgtgaattggtggtggtcggagagatagattggttggttgcgagggcgaggcggcggcggcggcggcgaaggggatgaaggcgacgtcggagggggcgtggcagggggacaacccgctgcggttctcgctgccgctgctgatcgtgcagatctgcctcgtcgtcgtcttcacccgcggcctcgcctacgccctccgccctctccgccagcctcgcgtcatcgccgagatcatcgtaagttgttctcatcatgccttcatcagttaaatttcgcaatcctttcttgtcctggtattatgcaaccatactatatacaaccttaattactccctccacattttaattttaatgtatgacgccgttgactttttgacgaacgtttgacctttcatcttattcaaaaaatttatataattataatttattttattgtgacttgatttatcatcaaatgttctttaaatatgacataagtatttttatatttacataaaatttttaaataagacgagtgatcaaacgttgattaaaaagtaaacgacgtagtacggagtactttgtcgttgcatgaactgtatggtttatcattttgttcttgaatcctgacacgctgttgatcaacgacaccacctcatcctggcaaagtttcctccattcgcacatccttcttcccatcccaaacagtaattacgaaaaacggagcggtccattagcacgtgattaattaagtattagctattttttttaaaaaaatagattaatttaattttttaaagcaactttcgtacagaaactttttttaaaaaaacgcaccgtttagccgtttgaaaagtatacgcacggaaaacgaggaagaatgtttgggaaaaggggatagcaaacagagccatatggtcactcattcttacctagagtgatataaaccgcagttacttgaggataattctagtaccaataatcacaagatcaccataccaaagaccaaccgatatttttttaaaaaaaaaatgcgtgcttttatactagcacaaccaaaaaaaaaagttaagctttggacctcaggaaaattaatccggctttgtaggtaagggaaccagaggtggtagttgcagaagattgctggctatttttgggtcacctgctagttttatctttcctacttttagagcaacctgtacttagtaagcactaagatgatgttcttgacaagatcagtagcttctgctgccattgacaaatgcaccatgcatacaatgaagaacacaatgcaagaagctgaaccttacagataaaaacgtaagaaaactgtttctgatcgagttcttcctcatcacacgtgtgtaactcgtaccagtccacgatacgtaccacgtgcaatcgtaggaacaacacatactaaccagagttttctttcttcgattttgaaaatataaatcaagcattgcccttctatagaaaatacaggagttgacttcgtgaggatggctctgactctgataagctaccggctagctagtacagttaaactagtaggactagtatgaaccatttcgagccagctgactgtttggattattctgtggcaattactgatgcagctattttctatgcaaatattccctccatactcgtaaaggagatcgctttggacaacgacatggtctccaaaatacaactttgactttttgtttatataaaaaatatttattgaaaaatgatatatgtatacttttatgaaagtatttttcaagacaaatctattcatataatttttacatgttcaaacttaacaacttgagagttatttatgaattatattcccaaggtttgacttaaacattgtcctaaacgacttcatttacaaatacggagggagtatttttcttgtgtagctttctctggactaacatatattttagcaaacagatacagtttccaagaagaagaaagtagagctctaaaaaaaactggagaagtatggttcctttacactttaaaaaacataattttcttagattctgaagaaacatctggattaatattaggccaacagttgcatcaccattgaccaccaaagcacagcagcaatacgctgccaaacaaccaattactacagatcatcagttgattcctgaagaatattaaatataaaatataagtagtatatgtgctgtatcaatttcaggcccatagcatcaatcatactatactctttgggttctttcccttacagttttgtatttaattcttcatttatttatttctttattacccgtttgagcaaaatgggtatgttgcatccgtccaaaataagttcatttttcatccaacccacaacacgtgccaattcaaaacttatcaattctcaatgcaactagttccaattttatctgctctcagtataattattttttactttttacaaattctggtacaatgattacttaaaaatagatttattttattttaggacaagtagtaagagtaggtaaaaataaacttattatgagacggagggaggaagcatctttgtgtgatgatgaactgactgcaatggcggcgtgatacagggcggcatcctcctgggcccgtcggcgcttgggcggaacaagcgattcctcgacaatgtcttccccaaggacagcctcaccgtgctcgacacgctcgccaacgtcggcttgctcttcttcctcttcctcgtcggcctcgagctcgacccggcctcgctccgccgcaccggccgcaccgccctcgccgtcgccgccgccgggatctcgctcccgtttgctctcggcgtcggcgcctcgctcgtgctccgcgccgccatcgcccccgacgccccccgtggcccgctcatcgtgttcatgggcgtcgcgctgtcgatcaccgcgttccccgtcctcgcgcgcatcctcgccgagctcaagctcctcaccaccgacatcggacgcatggccatgtcggccgcggctgtcaacgacatcaccgcgtgggtgctgcttgccctcgccatcgcgctctcgggatccgggtcgccgctcgtgtccatctacgtcctgctctgcggcgtcgcgttcgtcggcttcgccacggtcgccgtgcggcccgtgctcgtcttcatggcacggcggtcgccggagggcgagccggtgaaagaatcgttcgtctgcgccattctagtcatcgttctcgccgccggcttcgccacggacgccatcggcatccacgcgctgttcggcgcgttcgtcatcggcgtgctcgtccccaaggaaggcgcctgcgccggcgcgctgacggagaaggtcgaggacctggtgtcgtcgctgttccttcccctctacttcgtgtcgagcggtctgaagacggacgtcaccaccatctccggcgccaagtcgtgggggctcctcgtgctcgtcatgacgacggcctgcgccggcaagatcggcggcacggtggcggcgtcgctgctgatgcgtgtgccgctgcgtgaggcgctcgcgctggggatgctgatgaacaccaaggggctcgtggagctcatcgtgctcaacatcggacgcgaccggaaggtgctcaacgaggaggccttcgccatcctcgtgctcatggcgctcgtcaccaccttcatgaccacgccggccgtcaccgccgtgtacaagccggcgcggcggcaggcgtcgtacaagcaccgcacggtggagcgcgccgacgccgacagcgagctgcgcgtgctcgcgtgcttccacgccagccgcggcatcccgacgctgatcaacctcgtggaggcgtcgcgcggcacgaggaggagcaagctcaccatgtacgccatgcacctcgtcgagctgtcggagcgctcgtcggccatctccatggtgcagcgcgcgcgccgcaacgggctcccgttcgcgagccggcgcggccacgaaggcggcggcggcggcggggaggtggtggtggcgttcgaggcgttccagcggctcaccgccgtgacggtgaagccgatgacggccatctccgacctcgacaccatccacgacgacatcgtcgcgtcggcgctggacaagcgatccgccatcatcctgctcccgttccacaagatgctctgccatgacggcacgctcgagcccgtggaccgggcgttccaccaggtgaacgtccgggtgctccgcgacgcgccatgctccgtcgccgtcctcgtcgaccgcgcgctcggtggcgcggcgcaggtctcggcgccggacgtctcctactcggtcctcctcctcttcttcggcggcgccgacgaccgcgaggcgctcgcgtacgcctcacgcatgggcgagcaccctggcatcgcgctcaccgtggcccgtttcacggccgccgccgacgacgccgccgaagacgacgacgccatacaaaagcacatctccaacgtgcgcaaggccggaaacgacggagcgttcaagtacgacgaggtgtcggcccatggccggcaagaagtggcgttcgccatcaagacactgggtagaggcaagaacctggtggtggccgggcggtcggcggcggtggcgacgccgctggtggacaagacggactgcccggagctcggccacgtcgggagctacctggcgacgccggagttctcgacgacgtcctccgtgctcgtggtgcagaagtacgactcgagaggtgacactggcacatcgtcgtcgagccaagccggaggagaggcgaccgtggaggaatccggcgtgccaatccgccggccatagtcgccggaggagacggccgctacgtcgaggcagccggcggagccatagtcgcactgcctctctgctgcatgatagcacgtatatagcaacattagtgtgtccctcctgtcggtgattagatcatatttggttgttaattattagctaattagttgttaaattagggttcacaggtttatttagagaaagtttaatagtatagccaactatggctccaaatcgcctatataatagccaatgtatacaatagttacctataaatatatactatataattaataatgtctggtctcacctgtcatacacacatgaatcttagagtctgtgttgtagctggctacaaatatgtagtccgctgctcttatctcttctcttttatatttttaaaatatgtttgtagctgacttatagtttgctattgtacctgctcttagagcatctcgaacaggttccatatttaaattttagcaattttgaagcaaaatcgtgctccaatagccatccggctggccaaactactcctctcgttggccaaatttggccagccaaaatagcctagccaaatcgtgggtcccacctcttccccccctctcgtccgatgaacgttggcgccgcacctttgctacttcgcgccgccgcccgtccgcttaggcgacgccctccactggctccgccccaccgcccctccgcaccgcctctccgcgtcgcccctccgccggcggtgcccctccgcgccgccccttcacaccgccgcccgtccgcgccgcccctccacgacgccgccccctgctttgccgacgctgccgttgaccgccgccggggccgcccctccgccaccgtcgtcctttgccggcgccgcccctctgcaagcatcgacgatgagaaggaacgaaagagaaaaagaaaaaaaggaaggaggagagagagaggggaagaagaggagtggagactgacatgtgggttcgttgttattttggagaggattaatagagagtctgttggagtgatcatctagtttgactagccaaattagatggagaattggccatatagatgtttggagaatctaatttagagagactgttgaaggtactcttagggaaagtgatgggctaactaagttagtggttaattagtacaaaatgcagtgcagctgtaattttgtaagaaaaaagtgttgtaaacttgtaccccaccagttagcgtcaaagcaaaagttaaaatttgaatttttaacttgattcgatattttctgagtaatttcttcttatttttggcttgtaaatcgctacaaataaatatataaaatactgtaaattaacataaatggcgaaaatattgtacatcacacaagcgtattctcacacgaatttgtaatcgttccagcggcacgcgctgccgcctccatttcccacgctaccggcaccgcccaccgccggacttcctcacccgcggctccggcggcgccaccgcccaccgccggacttccaccgcccgcccaagtactccctctatgcccagcatcggcgaacttctcgacccctcctcgccctcaccaatcccgctcctccccccaccccctacctcctctctcctcgtttagttgagattgcttaccctgtttgattcttcagtggtatgatgtgtagatgtagtccggatacgtgcagcgggagcgcgggcggagctggagtatggccaatctagagggcaaagggaggtaaattaaggtatagaatttcagttttatccattacgcctatgctttgttttccaattcatactcactctcatgtgcaaactaaccaggatctggtaattggaacgatccccattcctgcagactcatagtgtgattcattgaatcaagctaacaaactgactgaaaattacctcatcagtgctgagtctagatcataactaactttatacagaaaacattgagttgtacaacatgtatgatgtatctgtatcaacttgttcaatctcggttaactggaaccaatttatgaaaaggtggttatcacttcccttaatctctgctcaggttgttgttttcaccattttccttactgtagatcacttggtgttgtgcattcccgttctttctgtatgatgatcaattttttagactaaactcaggtccaagtctcccaagtccactaaagacttgactaataagtccatccacaatttctttctgtcagtttccttgactgtcaaaatactactccctctgtccctaaatatttgacgccgttgacttttttaaacatgttggaccgttcgtcttattcaaaaaatttaagtaattattaattcttttcctatcatttgattcattgttaaatatactactactactcaagttttttaataatattcacaaaagttttttaataagacgaacggtcaaacatgtttaaaggagttaacggtgtcaaatatttaaggacggtgggagtagtattcagtagtttacacttcacagggtctaacaaaagccattccctgcttagaattgccagtaggtttcttcagcatacaattactatctcatctcaaggaactgcagtagactcttccacctggacaatgttcccacatattctcttcctatccctgctgctcttggttcctgaagaccccaattttgccgctggagcttcagccaatgagtcattcattactttgggatcctctatcaacacaagcagcacccagtactggtcctcctcttcaggccgctttgcgttcggcttctatcccaacggcgaaggcttttctattggggtgtggcttgtgattggtgtgtcaaggacaattgtgtggactgccaaccgtgatgagcccccaattgctggtggttctatcatatttgggcatggtggtgcgctccaatggtcacgaactccatcaactccaggtagccaactgaaccccatatctgacagttctacacctgctgcctctgctgccatgttgaacaccggcaactttgtactgtatgatatgaacagacaggtcatatggtctactttcagttttccgacagacacattgttggcaggtcagaacttgcgtccaggcagatttcttctttcaggtgtctctcagagtaatcatgccagtggcaagtataggcttgagaaccaacaagatggcaatcttgtgatgtacccaacaggcaccattgactctggtagtgcgtactggtctacctggactttcaacatgggcctcctcctcacgctttccttagatcctaatggtaccatatggatgttcgacaggaaaaactcctatacaaagatactgttccatgccaaccagccttccaatgcctcccctgatatggaaatttactatcgtctgacatttgatcccgacggcatcctacgactctactcacatgttttctttaagcttggcagggcacctacaacagaggttgagtggcttgagcctggcagtgatcgctgccttgtgaaaggtgtttgtggtccgaatagcttctgccatctcaccgtgactggagagacaagctgctcttgccttcctggttttgaattcttgagcactaaccagagcacacttggttgttggagagcattgccaaccggtggctgcgtgaggaacagctctaacgatgagacgagagtgacaaccacgatggtcgaagtgaagaacactacttggttagagaacccgtatgctgttctaccagccacaactagtattgaagcctgcaaactactttgcctctccgattgtgcttgcgatatcgccatgtttagtgattcctactgctcaaaacagatgcttcccattagatatggcaggatgcctggtaacaccacactctttgtgaagatctacacttaccagaccatatccggtactcgccaaagggctatgagtatccatgcaaattctgcattgatatcaggggtttccttggccatcttttctctgtttgtgctattagtggcatctctattacttatctgcaggcatcggcgatcattggcgcacatgacgatgacggcaccacggcaagaggactccaggattgatgggaacattgttggcctcagatcctattctttccaggaactagatttggcaacaaatggtttcggcgaagagcttggcaagggggcatacgggacagtattcaaaggtgtcgtggccgacaccaaccaggacatcgctgtgaagaggctcgaaaagatggctgaggatgggcagcgtgaatttaacagggaagtgcgtgtgattgcaagaacacaccaccggaacctgctgcgattgcttggtttctgcaatgagggcattcatcacctgcttgtgtatgagtacatgccaaatggatccctggcaaacctcctctttcactcagatgcctcccctgcctggagcaagagggttgcaattgcactagatgttgccagagggttgcaatacctgcattcagagatagagggcccaataatccactgcgatatcaagccagagaacatactcattgacagtttggggatagctaagattgctgactttgggctagcaaagctactgattgggaaccaaacaaagacattcaccggcatccgaggaacccggggctatctagcaccggagtggagcaagaacagagcaatcaccgtgaaggcagacgtgtacagctacgggatcatgcttctggaggtcataagctgtaagaaaagcatggatctgaagcgggctggggaggagtacaacatttccgagtgggcatatgagtgtgtgatgtttggtgatgctggcaaggtggcagatggtgtcgacgaagctgagctggtgagaatggtgaacgtcggcatttggtgcacacagagtgaacctgtgatgcgaccagcgatgaagagtgttgctcttatgattgaaggtgccatcgaagttcaccagcccccaccccctgcatcatattcgcagtcactaacatgagctgcaagcataattctgagtaagtaaaaggcaaaaaaaaaagaggtctacctgtaacatttttttttaaaaaaaaaactgttgataagcagagtgcaatctgaatctactgaatagatccagagtatatgagaagtggcacttagcaaaaggtgtgatcagaagaaacctcattgattgtgtaaagggaaaaaaacatttgatagcagatacccattacagaacaactctttgtcaacaggcacaaaagaacctagctaattttttgtaattttaacaattataatatttcagactttttttagttgaaatgtcaggtcgtttgctgatagaaatccttgtttaatttgcagaaaaatgatgaagtttgcttgaagcgctgcaaagtacagcaagggtcgtccgtctatcaccagttcaaatacatgagcttgcatcatggaacaccctgaaaattgacaaccaagtcttttacattatgcagctataagttttacattttgatcggtagaatgctatggatggcataagtacaggaacggtcctagcagatgctgttatgctagaagtctaatagatcatttcagtgcaggaaaatatatgatgaatcatgtactctgtttctgatatggaataaagtttatgagttctaaaaaaaaagtacaggaacggaaatccattttcgtctgcgatggagccttgatttttagttaactgccgtgttcgcttttctgatcgcgcaatgcatgttggattgttctctgaatcgttgtaaatacattgctgcattctatcgtatcaaatgatttgaaactatgtactacctccatggctctgtcctagaatatatatgaacttttaactatagatttgaatatgtacttgttcagatttatagtcaaaattattatattttgttacggaggtagtttgaagtaaatgattttgatgtcaagcaaatcaactatttgaagtaaatgatttggcaacaaaatgaaacgatgagaagtcccggcccaccaatggttactggatctcaggctctcagctactattcgtgactcgagttcgtgatgggccgagaccatgatcgctaccaatggtagagtgatcggcacagcaccatcgaaccaaattgcccaaacgccagaacgaatcactctgatgaatagtcgacaaaaaaaaagtatcactccgaaatccgaatccacgatgaagatgaatttcattagtccacaaaagtatcactccgaagtccgaatctacgatgaagatgaatttcattagcccacaaaagggcattacatcagactttacagaaagaatcgattcaactcttctcattagttattacagatcgatcgatcgagatgatcaatcgagcaatgcatatcttcatgcatctcagttgatcaaacaaacacctaactaattgattgatacgtagtacatagtacatgtctaactaaacctgttctctgacgaaaaacactgcactacttagtgctacagccgctcactacacctcaatcaaaaacttgtttcatttaattagggttcgagccaagaatgtcgtcgagggtttctccggaagccagccgctggatgatctcctcttcgcccatgcaaggtccgttcgtcgtctcgatgaattcgtctccgccgccggcaacctccatcgtcggagcccacggcaatggctcgtcgttcatcagatacctcatgtactgctccgtcgtggccgtgtcgaattccactcccaaactgtcgtccatcggcgccgacagcaacgcatccaggtccaactccggcaggatcgccggctgctcgctcccggcctcctcttgccgcggccgcgcgctgggcggcgcctccgggtgatccgcgccgtcgtccgccttcctcttcgagccggagcatggcgaatcggccgacttcgccgccgccgccgtgcgcgcctccgcgcagaccgcgcgcggcgagcggtagaccttgcagagcacctgcttgtctgctccgtcgatggcgtcgtcgtcgaggccgtactccgtcatgcaccaccctagcctcgtgaacgtgcgcgccgaccccgacgacgacgactcgtagacgccataggagaacttctggaggtacccgacgcggcggccatcggcgccgatcacggccttcttgccgccctccgacttccacacgctctcgccgccgccgccgccgccgaccgcgcgctgccgcctcccggaggtcttgcgcttgctggtgaagcgcggggagcagaagaagtaccagacgctgctgctcccatgggtgcccggcgccggtctgtgctcgccgacgagctcggccggattggcggagtagacgtcggcgtggttgatgaggcggtcctcgaaggggatcttggcgatgctggggcggaggaagagggtgatgaggccgtcgtcggaagggtggaagacgtagcctggctcaagagcgatctcgtcgtcgtcggccatgtcggcggcgctagctctcgcgttgccctagcttcacctcgatcaggggagaatctgaattgatcgaggagagctagagctagcagatggtagccgatcgagggtatttatcgtggacgtggcgcacgtacgcgcgatcaaatcgcagtacagacaatgcaatcgatcgagagttcgagaccgactcggactcaggcgaaccaaatggttttttttttttttttggcgggaatgcggtatttgtacgcgtaagacgagtatgatttactagtttgttgcaaaatggtaattagcccatcgaatttatgctttttctgatgggctaggcctgggacccaattccgtgacgggtgaggcccatcactgaaacgtcgtgatgcggctaggcccaaatttggacagcgtggccggggtcgtgacatcatcaggttcaaagggggttcggagtttccatcctccgaacccctttgacctctttttctctccaccacatgaatgcctttgtttctctggttccttctctgaatttctctgctaatgaagctcaatcaagttatcatgcaccaccattgaactactaatcttctaacacgcgtttattatcgatcttgccaaaaccatgttcatgcatgctctggccattcagcgtctgctactgattgatcatgcagtacaactttggtcccttctctgaaatgttaccatttttcttctgatgaagcgtacataccatgcgttgcatgaggcaaacattcattttctgcagccggagctggagagtagctcaagtcgtgacgccgccaggttcggagattaaagctccgacccctattttgacctcttttttccggccccaacatggatgcaaaatgtctccttcaattcagccgcccatggctctcttgtccttatcatgcatgtatggccacacatggtgaagaaatcgatcgatagaatcaaattcacgagacattcagacatgttggaattaatagatgggctaaggccaattcaaagattaattctttagaaaatcacaaaagcccatctcataagatggtatgtatgtgagtttaataccactttgcttattataggagagggaacctccttaaaagggaggatgccctcctagccacttgaagcatgtgtggtggagagaagaggggggaaatacacgcgctcgccctgtctcgcagggcagggttgttttgctgcgggaaattcggatttgttttgttttggaaacattccaaaaaatctggtgcgtgaaaacggcatggagttgcgcgacttatccggtttgctgcgggaaattcggatttgttttgttttggaaacattccgctgcggaaaattcggatttgttttgttttggaaacattctgaaaaatccgttgcgtgaaaacggcatggagtccgaataagttatgcgcgacttatccggtttgctgcgggaaattcggatttgttttgttttggaaacattacgaaaaatccggtgtgtgaaaacggcgtggagtccgaataagttacgcgcgacttatccggttcggttacgcggagtgaagatcatgcgggcgccctgatcaagcgacctatctctatataaaccgagtcgctgccttcacgcaacacacacgaaatcaatctagggtttgcctcctctgtactgcgccgtcgctcgtagactactacatcccgctcgccggcgtgcaccggcgatcgggagagcaggtctccggaacctctgccttcgacgtcttgcaccgggagaaggcggcaataagatttttgggaagcgcttcgcgcgactgctccctgttcgtccgtgacggctcgccttcctctccgctcacgtgctgcacgtcttcatcgacgcccgcaaccacgagtagttcctgccgagcaaccggtctttccgccacctcgatacgtgttcgacatgttgcgcatatttgatctgttcatgttttactacttagtttacatgtgtagatctaatgatgcgttcaatctagtttgcatctgaaatgtaataaattaaatcattatgtgcttataatttcaacaagacattcacaacattaacagtttagctgttagatggaatcggcagcataatatttacatgggtattactaccgctgcgtattttgccacaggtagacaaatcaagtgtgcttggcgacaagagatttgctattattgcagagagcttagagctccatcaacatggacaaaaatacagcaccggtatagttcatgaaaggtctgtttgctataaacagatccgggataacaatgtgggggtaaagtacggtctggatttcccaagaacagatccaggattttcttgatacaaatgctctcgaagctctacatgaaaagcatcacaagtgatccataagcatatattagacaggcatatgctaaaagaatatctactttttcatgcactatgtcatatgggaagcctatgtttacaatgtacattagtttcagtacgggcaagccaagaatattgtgcaagtacactccggtttcatgaaattaatggaccaaaatattttttttagttgcgccaataaataaatgcatgcaaccttaatatcttgttttattgcgcaaatcaagatgagcataacaatatactgatatgtccacacaacagattgcatagtattaatctcttgcctatcacatcaagtagaaaatgaccgcttgcgcttctgaacatcaaactcaacatcaatgaggccggttataccagctttgatcttctgtcctggtcgtactgggcctacaccctcaggagtacctgcagaggaattcattaataacccccacaatcacaactctaatgcacaacaaactgttctccaaaaatgtgatttaccggtcagtataacatcaccctccattaatgtcatgatggaactgatataacttattagagatggtatcttgaatatcatatcacttgtagatcccttctgcctaagttcatcatcaacctggacaagatttctctatgcttgttaataatttgttgtactttctacttcttagggggcaaatgaatagattcactacatgcctacatatttgtatagttacctttagccagagctctagatcatcaggattagctacatctgattttggaatctgttcaatagagcaagaatcatcaaggaaagtcaaatgcattggatgcagcaatggaattatgtagttcatattcagtagaatgacatcggcagcattcagagaatacgatccacgaccaacaaaaggagatgccaatctgtaactagtatcctgtggttcttttcatatgatattgactcaccttttccagcattctatgatttatttctatccattaataatcataaagattactggtgtatattccgtctcttcagttatccactactttgaatatggtacttggaactatttattacaagcaaatacatggaaatgaaaaataacgtgtcgagtcaccacctgaaccagtttctttaagcaagagaacacattgcttaccactgcactaattggagtgaaggtgtcctgtgctttacccaaagtccaaggaagacctgcagactacagagtacattggtttctaagtataaaacatagtacaagactgaaaagttatcttacattaagaaactatgtgattgattcatacaagtaccaaggatacaactgccaattagttaccatgattttgcacaaaaatagttataaaaaacattgtgtgtatatgatcaaacaagatagtggtaaccaaattcaaaagaaacaaatagttcttgttctagtagcttatacaattattagttgatatgattgcatgaacataataaagaagcagctactgagattatagtgtgcagcttgttgctgaatttcttttatcaatttgaatgttatgctcttatctatcctctgaaactaccaaggatgatagatggcaataaggtgacaagaccaaagaaaactagggcagctagtgcacaccttagccgcagactgaagttctcttgctgtcatgtccaaagcaagtgcataacctgggaaatccaaagatataccattagttataattgtactttgtcactgaaaggggaaaactgaaaaccagtatagctttttgttgactcgtagaacccacattaacaaatactagcataaaagaaagagtaatagtgaacaatctgctacttactgtagcataatttggtattgaaccaaacaataagatcaatttcactaccatgattatttagagaacatgaagcaaccaacgataaaagaaaatgtgactatgttaacgaatactcctcactaatgagactttcatgagcctggtcatggcaaaacaggcattgaacaagcagatggctaagagcttaaaattccatgtctgaatttttctaccaagcctgtcaaatgtatatggacaaagtttaccggaattgctgaaagagtgaaatttatatgtcctatagttgtccactttcagtctaagtctctaaggcctgctcaaatagttctgaatggcaattccaaggttctagtacgtagttttcacagaacaaagcatatcggcatctcctattcggatttttcggtggaaatcatattttgatttatttaccaaacttgtgattttcttccatgatcagggatatagaagtatacaactcatcacacaactaatcagctgaaaggatgccaccagtttagattagatccattttatcacagcacatcctagattatcaattacctcctacgaagtccatggcggatgcttcggggacgtcgcgcgcgcgctgggagatgacaacggcaagctcgacctcgtggtgcagcgactcgaccggctccggcacctcgatggcggcgccggccacgcccgcgtggaggaacgacgaggtgggcttcaggaacagcaccggctcctgcaaccagacgcggcacgggcaccaccgacgccggatcagggcaccccgcgggaagaaggcgaccggagaacccaccgccgccagtggtggttcgggattggagagtactgtaccttggggacggggttcccgagctccttggcgtgggcgacgaagttgcggcccacccctacgatcttcgtgctggccgccaggagcctctgcgccgccgccgccatggccgccggaggagagctgcgagcggcggagggatgcgtcgatcgaggaggtggaggtggtggtgacggggaagaaatggactccagcgcatggtcaagtgacaaaatatacggcccataagacaaaaaccggcatatcatggcccacaagacagacacctgccttcctgtgtcaaacttttataattttgacaaagttttgtagcaactcttgtaacaccaaattagtttcatcaaacctaacattgaatgtatatgttgatagtacatttgtttggtgttgaaaattttactatatttttatataaatttgattaaacctaaaaaaattgacttaaaaaaagaaaaagaaaatcaaaagtggtagtataaaacggagggagcataggaattagtttataggcatcctagaagctcttttaaattcattcagacccttgaaatttcattgtttgccaagatagccaaacttggcattacaaaagctctgcagcattagccaaacacagcatgacaaaagaaccacaccatcagcctaaagcattacatcctttattctcttgaaattattctttacagcagtaaattatctcacaacctcgatgattttggagaagaaacacccgtattgaacttcttgatgtagttatagatgtgatcactgatttcctgtgctctctcctgctggatgaagtgcccagcacctttgattaccactacttcctcaagcataggaacatctttcttcaacctacccttgtgtatgtagcttttgactcctgggagatggtaagccaggtcaccatccccgacaataaactttgttggcactagaacttttgcacctgtccatggtgccatcagctcccaattcctgtgcatgcaggtcagaggttatgagttcctgctacataggattatatgatcatatcatgcaacccacaactgcgtatgttgatgcagttctcaagtccatgggagtgcatgcttgtgatcatgactggtgacaaaatattcaatatggaaattactgaataaataatctgtgtagttcagaacagatttctatatttaccataagtgttttttttcttgaatacgcaggagaattgcgaatcatcattatattaagaagaaggaaaaggaaaaggtcccgacaaactacaagactgagaaaccaaaaagacgcacagcacacggcacacccagtcacccacccatacatatccaccctcacaaagtgttatgcaaacaagaatttcatctctccgagatctgttaactgcagttcatataggttgtgagctcctggttaaaaacacacaacagatgctatgatatctcatagtagtatagaggtattgaattggacaacagttaattccaagcaacaccattatctaaaaaaaaaagttaattccaagcaacgtatgcagtaagacaaacaggatacacagcaatcagtgacaacaggtaaatctaaaggaaaaaatgtgatattgtgcttcatgtttctctctctagtaacctgtcagggagttcaaaaactgtattgcaacgttaaacaggttgtatgtgtgtcttcttttggatagaatttaggtatctggagaaaaataattcgagtgatttgacatgtatgaattctgcacacaatgatttggtaccttaaaaatggcatacttacaggtcaaaacatcggtagtaattaataccaccagcgaagccagtttttgcatacacacttgctacataactgatatcttcctcagagagccaaggaggcaatgttacttccctgttgtttgcccgcatttttttaatggacatagcagaagatcctgttgtttgaacaatcaaggccaatttgaagaatctcttcaagtcaagactggccaattctttttcaactccaggttcctggcagccaagatgacacttgtgaaggcaaattataaaaattacatgactgagagtccgaacatggttcagaaacagttgtgaagcactgacttcatgaggacaaaacttgttcagaaatgaaattattccacatagttgtgcaaaattgttgttgtttttctaagcattatttagtatttactcattagcccatgccaatccatttagcaaactatgtatgattgatatttcatttcaatgtgtacgcaaactacaattggagctgctcacaaagaggaaaaagggcttgcggcacgactatattacattccccaaagatcaattgacaggaaaatttaacaccccagcctagcacatgcacaaaaatgaaatttcctgagtatgtctatgttatgtgttcatctatatgactagtgtgttaagatgaagagcagatgtgagcaccataccactggtaagatactaaaagacttctttttgaaaataagtattcatagacacaactcacttatccattgcaatgaagtgaactattcactaataaacaaaataagcacaatcattctcaaattagttgataattagtggatgatagacatttgggacggggatttagctttaattcttcgattattaaacagatagcagtcgattggccatttctgtggcctacgggaacaaattgcgcacctggaatcggcagacatagtaatcatcgccatacgcgccgcggaagtagtcgaggggcttctcggcggggcgcctcggcatgaacgcgacgctgaggttgacaagcgcgcgcacccggtcaggccgcagcaggcacaggttccacgacacgatggcgccccagtcatgccccaccacgaacaccttcaccgcaacaacgcgcgacgcgtcatctcagcgatttgggggcggaaaggggagagggggcgcgtgctttttttttacctgggggagctcgagggcgtcgaggagggcgacgaggtccccgacgaggtggaagatggtgtaggaggtgtgctccggcggcgcggtggtgccgccgtagccgcggaggtcgggcgcgacgcagcggtatccgcgcgcggccaggtgccccatctggtggcgccacgagtaccacagctccgggaacccgtgcacgaacagcaccgcgggagcagtgccgctgcccggccccgcctccgcgacgtgcatcgagatcccgttcgcctccaccgtccggtgccttaccgccgccgccgccgccatggtctcctctccactccgtcgcgcgacgcggcgacgacgtgcggtgctctgctactggctgtgaacctgctgattacccgaggtagttggagatagttgactgacatgtgggtccagtttcctggatgggccgatgtgatactgggcctagttcctttagtttccaaatgcaaagtggcccaggacggatagagcatttgcatcgcaaagcatggtcaattataccaaatcaatgcatcatccaaacattgggaagaaaattacacaggaattcagtcttttacttatcagtaggactttgcttctttgcgtgacagctgtataatacgaatctcaaagcaacatgtcttcatccctgatttccccagagacttgacttgacgagtaaacgcgttctcctgccgccgccgcacgccagtatccttggcggtgccccctcgcttcggcccttccttgcgtccttgtgggctgtggccctccgcgcctctcgtcgtggcggccagcggtgctagcggcagctaagtggtttgcacgtgttgaccagccgactctttgttagactaactttgcaggtagtggggattatcacttagttctcgccagcacttacgttgtcaattgaaaagaagttcaacagctaaaagacaatggactaggcatgcctataagacttcaccatggtcttggtgatgtgcttctatgatctcgtgatggcttttctctggcagacaatgggtaggcatgccttcaggagttaggtccttgccatggaccctgttggaattaatagatgggctaaggcacattcaaagattaattctttggaaaatcataaaagcccacctcatgagatggcatgcatgtggagtttagtaccaccttgcttattctaggagagggggacctccttaaaagcgaggatgccctcctagccacttgaagcatgtgtggtagagagaagaggggaaacacgcgcgcgctcgctcgcctggcagggcaagcggcgcgcgtgcacgacgttactacgcgtcgaatggttcgaaaaattggctcctcacccttgcggataggttacgcgcgacttatccgaatttgttttgttttggaaacattccggacggttcgaaaaattggctcctcacccttgtgcagatgtagcctccttgtgaaaacggcatggagtccggataggttacgcgcgacttatccggatttgttttgttttggaaacatttcggacttatccggatttgttttgttttggaaacattccgaaaaatccggtgcgtgaaaacggcatggagtccggataggttacgcgcgacttatccggttcggtttacgcgggcgccctgatcaggcgatctatctctatataaaccgagccgccgccttcacgcaacacatgcgaaatcaatctagggtttgcctcctactctgtactgcgccgtcgcttgtagattactccatcccgctcgccggcgtgcaccggcgatcgggagagcaggtctccggaacctctgccttcgacgtcctacaccgggagaaggcggcaataaggtttttgggaagcgcttcgcgcgactgctccctgttagtccgcgacggctcgccttcctctccgctcgcgtgcttcgcgcctttgtcgacgctcgcaaccgcgagtagttcctgtcgagcaaccggtctttccgtcacctcggtacatgttcgacatgttgcgcatatttgatctgttcatgttttactgcttagtttacatgtgtagatctaatgatgcattcaatctagtttatatctgcaatgtcatgatttatttatggaataaattaaattattatgtgcttataatttcaatagacccatggtcggataagatgttggtctcctgcagaaggaggaagagaactcatgaagaaaagacaatgaggaattggagaagaggaggaatcatgctttgagatttggactggacaggtgtcaaacaaataaacaaagtcctaccgatgagtaaaagactgaagtcttatgaaattttcttcccaaacattgaaatttcataggaatacggtccaaattacaacaacatttggtcacatatacgttgacactgattggcacacacgcttgtttgaagagtttttttttttgttttttttttacggcgatgaattgcatctgacagttgagttgagttgagcgcttcagttgggttggggtatgaacttggtgatgaagttgtagataaggtcgctgacctcctcagccctctcctgctggatgaagtggccggcgccggggatgacgacgacgtcctcgagcagcggcacctcggccttgagcccgcccttgtgcaggtagtcctggatgccggcgtagtggtacgtcaggtcgccgtccccgacgatgaacttggtcggcacctgcaccttggcgtccgcccatggcgccgccatctcccagttcctgtccatgttgcggtagtagttgatgccgccggtgaagcccgtcctctcgaacgcggcggcgaagtagtcgatgtcctcctccgttagccaggccggcagcggcagcggcggcggcggcggcgactcctcgctctccggcttgccggccttgtggacggtgaagcggttgcacagtgtccgccttatgatgtgcctcgcgtgcgccggcgcgaactcctcctccgcaacgccaggctcctgcaaacagcaacaattagcggccggtattgggccagattatcctgtgcaattgggcctcataaatgggccgccggcccagagaggatgaaaggtaagtggtctcatgtatggcagtggctgaaccgaccagaggtgatcacgtacaagaatgtagtagtaaaagattacctagagaatcgatatctttcgatgagaaacggaatggccaagtaacctcagggcaagtaattagggcttaatctctcaattccctatttcggcttgatttgctccctccctgcacctctataaaatggcacgcacgtagtgctcagttgatcaatcgatcagaagcagatagagctttctgttgcgtcaatggcggagatcatcctgaacaaccactgcgagggctgcgcgatcgacatccgcaaggccgtcgagaaaatgttcggtaagaagctagatgatgtgtgcagtgccagtgcatttttgtcatggcgatcgatttgacattttgggctgcgtgcgtgcgtgcgtgcgtgggggtgcaggggtaaagagggtttgggtggacatgtatgggcggcgggtggtgatcgccggccgaaaggtcgacgcgacgaagctcagagagcgactcaggcggaagaccggcaagtcagtcaccatcgtcagcgacggcacgccgccgccgccgcccgacgacgtcccctttgtcgggatgatgcacctggcgccgtcgccgccctactacccattgcccgcgccgcctccgccgccgccgccggggagctacctgtacggcggcaactacccctgccagaacccgtaccaccagtacgttcaaggaggcatgccggcgcgcttcgtcggcgacgacacctacgacgacggatgctgctccatgcagtgaccgatcgtgctactaccagtcgtagacgaataacggaataagccaacacgtagtatttcatctactgttccatcggagacaccaacagtagtagcagtatgcattttttttttcttgtactgcgaccacgcactgtaccggtcaggctatcgagtccgtgcaggagaaaatttcgctactccggctggaccgctggttctgatccgtttgggactttgaacaatatttacgatagtattattctactactagtagcatatataaaaaaggttcgtttgcgtctatctgctcacgagttctacctaattttctcccatgctgcatgttgtagtagcttcaaagtagaagaaatatatatgcatatcattcgttacttattataagtcgtttaatttttttcttagtcaaacttcttaaaatttaattaaaatataaaaaaatatagcaatatttttaatacaaaacaaacatattatcaaactatattaaatttaataaaattaatttggtgttataaatattaccgttttttctataaatttgattaaatctaacgaactttaattaaaaaaataaacagtcgaatagcttataagtatataatatgaaacggaggaaacgataagtacgtagaggaaatggcagaggatgaggttctgtgtattgaacctggaagcggcagatgtagtaggtggggccgtaggccttgtggaagtgatcggtggtcttgatggcgtcggcgccggagcggatgaagacgtggcgcatgaaggcgacgctggtgttgacgagcgccgtcacgcgatccggccggaacaggcacatgtaccacgcgattatcgcgccccagtcgtgccccaccacgaacacctgcttcaatccaaaaccagatcagatcagatcagcctctaagttttatttgcaacagctagtagaaaatcttgtaaataaaaaaaaattcactagtagtgacgaattggcatttaattattagtagtactctagttctgcttgatttgattaataagttccaagattttcagtactgatctgcttaagtacatagcattgacagattagtcgtggagtcgttggatgatgccaatcaaattgacaggcaagccacggcgtcacgttgggttgggatatgcccatatttttttttcattccgtctacccattgttgatgccgccttcagtttgaactttgaaccgtatcgaagcactatcgaacaaaacagtcaacttctttgcgctcacatcacaaagccaaatcaaccaaaagcaattttaaaaatggcagccttttcattcgctatccatgttcgacgcttctagggatcacgtattttattttatttagataatgatcacatattcgcatattttaattaatagcggaatcaaacaatttaagcgcatgtgattaatcaattaacagtaaatcaaagcgtggtttgcatctgctaagctcgtacgtaccttggcgaggccgagggcgtcgaggagcgcgacgaggtcgccgacgacgtggaaggcggagtaggactcgatctcgggcggcgcgtcggtgtcgccgtacccgcggaggtcgggggcgaggcagcggaatccccggccggcgaggtgctccatctggtgccgccacgagtaccagagctccgggaatccgtgcaggaacagcaccgccgcgccatcgccgccctcgccgccggcctccgcgacgtggatcgagatgccgttcgcctccaccgtccggtgcctaatgaccgccgccgccgccgccgcgccctccatgctctctagctccttcgctttcttctctcctctcctcaccggcgagctgatcgatcagcgtgtgtttgcacacttcgcgtgcgaggtgtgagctcgtatttatcgtacgtgtggtgccccctgtcgtgttgacaatgaagaaggtattgtttagtttcaacttttttctttaaactttctactcacttttctacacatataaacttttaatttttttatcgtatcatttcaatttcaaccaaacttttaattttgctgtgaactaaacacatccgaactctcgtgtgaaagtggataaaccgagagagagagagagggtcacgtttgaaaaaaaagaaacggtggcgaagtgtggctgtgcaagcgtgtgacgtggacgctaacgcacgtggcgcgtgggaactggcccccaggaaaacggcgaccggaagagtgtgatcatagcggctgaactattttctcaaattaattttataaaatttaatatacttcgatcaagctatttctttaaggtggcatatcatgtaactatacagatttaaggtgaatttcttattaaactgtagatttaaaataaggtgtaagataaataaatatcaagtagcaaaatctcataactataagtttgttagtgtcaatttaatcataaaattaccacgtttataactccaacgtaatggtaattctagggaatttaagctttagaatttatagttctatgataactccaaatttattttgagagcgataacttcaattttaaatatgtagttttgtaatactttattataaatctatagttttgttataaaaaaatagttaaatttgtaagtgtataacatgataaatctataattttgtgataattcgtttaatatattatagtttttgaaatttagtcctttacttttggatgaaataggaaggttatattgacttggtcatggcctgcatcaatttcagtagcagtagagtaggtgcatccacgatgtgcttgaaaaaagcgataccccatcaacatgttcaataatacatttatataagtgctataaatcatattgttgaggagagatcctcaatagcggggaattgtgagaccccccatttgtgatttcggccgggggcggaggctcatctcttgaaaatcactcgctcgtccctaggattaccggcaagcttgcacgcagtcggattatacaggttcgggccgctatggagcgtaacaccctactcctgtgtttgggattatggatgagttttacaaagatttcttcactctagaaagcgcactcgcttcctctcttctggagttcaggttttctaggcgtcctcctctgtctcagtgggcagggtcctccttttatagctcaaggggataccatatgcgccgcctctacctaccctctatcggagggggatcccactccacttttcctgggctttaaaccgtgccttctcccggaagctaagcaacaaccggttctcgagtggaaccaggcgccgcccccgcctgacacgggggacagccctgtcattccctcataaatgaacgatgacctgtgacagcccttcctcgagtgacgcttggacgtgacgggtcatacccacccccactccgccgggtacaagggcgacgtgaggacatggttgccctatccatcggatgtgacggtgtcaggccggtcacatccgttggacagaggttagctaggcgcgccgcacgtctgcccttaccgcattaaatgcggtgagggacagttggggcgtcgcacttttatggctgttcagcctgtgctctcgctctctccctgtcacgcccggaaattcactagtgaatttccgggcgtgacaagttggtatcagagccatctcgactgtaggataagccaaatggtcaaaccttaaggactaattttccgaaaacatgatttgtgaaaatttctcctttcttccttatctagaattctttgcaaattgtttcattgtctactcccctctctctttcaacttgagtagttctaagacattgaaacttgaagacatttatgtggtcaacttatggaggtcagtcaagtggatcgaggaaggaccgaagtgccaagtggtcaagatggaatgaagtttggatcctaccttagaacctatgccgccaaagtgtccttgaagaatagttagtagggtagaacgcttgttgtttgctttgtgtgtaggtatggttgcattcccatcattggagtagttcattgatgagtgtgtaactatactaggttgcttgcttaatcaacttgaacaatataatggtctacacacatcagatcagtgttaacctggttaaggtcttgtctttagtgtaacccctctccttctatcttctctaatatgcaacagatggtgaacactcgcgccagtggaagtggaaacaataacaatgaagggaacccaattcttgctcaagttctggctcaacagactcagttaatgaacatgatgatacagcagatgcagaaccagctcaaccaagggaacaacaatgctccaccgccgcagaacaagttagctgattttcttcgtgtgaggccacctaccttttctagcactactaacccagtggaagcaggtgattggttgcacactattgagaagaagttggaactgctccagtgcacggatcaggagaaagttgttttcgcttcacatcagttgcaaggacctgcatcagaatggtgggatcattttcggatgaacagagcagaaggacaaccaatcacttgggtggagttcacggaagcattcaagaagacacacatacctgtaggagttgtttctttgaagaagcgtgagttcaggacattgaagcaaaaggatcataccgtggcagagtatcttcatgagttcaatcgtctggcacgttatgctccagaagatgtgcgtactgacgaagaaaggcaggagaagttcctggaaggcctgaaggatgaactgtcagttacattgatctcccatgactatgttgattttcagcagctggttgacaaagcaattcgacttgaagacaagaagaacaggatggataaccgtaaacggagaatgactgtattccaggaggcacaaggtagtagccagaggcagcatatcaggccactccaaattggtgaatcttcttccgctggtcaaggacagtcgcaacaattgaacatcgctggtgagatcaaatcagagactaatgaaagcaatgatgttaacatcgagcaagctaatcagccggtgccagttcagcaggaccagtctcaggagaataacactagtggaagggagcagcaggtatgtttcaactgttacaagccaggccactttgcaagagagtgtccgaagccgaagcgtcagcagccgcaaggtcaggtcaacaacattgtcgtcacaggagccaatgcagtgccagttgcgtcttcaagagttgcgtcttcaagtgttacagctcagccactagtttcaaagcagcagtagttttctttaaagccttagaataattatctgagttatggaataataagatagactacagtttacctatgcccttttctttctagccgttccgaatctcgggacgagattctttgtaaggggggtagatttatcacatcctgatttttgtttcaggatttataaattatttaataaattaataatagaatttatgttaaatgatctttaatttacaagtgaagttaaatgtgggaaataaaatttccttaatataaagcatggatggatttaatttttattaaattctccatgattaagtcaactctctgaaattttctcggatttttcggagctcaattcctaaatgatacaaagaacagttcagtaattatttgattttaatgatctaattatatttgttaagagcttttcttgtttaaaatccttaaattataaattgttgtttaaaaggaattattagaaatgattttaaaagcctagaagagaagatctaattttaatctgttaaatctcaatataaaattgggctagataaaattttgttaaatactttgcttaattctataattcctagatttttctgggatttatttgagctaaggaagtatttttaataaatggaattgcatttcatgaataatttaaattgaaaaaggtttttaaaagtctcttttggctttgggccgaaagccggcccaaaacctcctctctctctctctccccggcccagtcggcccagctcgagccgctgctctcttctctctctcggtgccgctgacaggtggggcccacctgtcaggcctgtcttcctcctcgcgccggccgccgctcgaaccctagcgccgcgccgccgtcgtctccttccaaatccggtcgatcctttcccgatccggtgaaatcaatagaggggaaatgatcttctcgatctcctcttccttttctcttatggaatcatcgcctaattcggtttggaaactcgtggattcgaggtcgaatcggatcggtctctttccttcaaaccccgatctttccttcccgtcgccggccgccgtgggccttcgtcgtcgcctcctagcccctttaaaaggttccccgagctcttctctacccgccgccacctttgccttcgcctctcgtcgtccgtagtgccctagcgccgtgtagcttcgagccgccgtcgtcgccgccgctccagccgtgcgccgccgtcgtttcagccgtcgtcgtcgctcgggaaggtcgccgtcgtgatcgtcaagtcaccgccgtcctcgtctgcctcttcgtcgccgccggagaccgccggagcaccgccgtcaccgtcgacccgaaaaccgccgccgtttcttcctcgtcgccggcgccatccgttgctcctccgctgttgctttggtcaccggtgagttcgccgcgtcgcgctctacccgttggtgccctccgtttgcgtcctcgcgccgtcgttcgccggcgagcttgcgctcccgagccgtcgccggtggtgacgtcatcgccgacgtcatcgtcgcccttccccgtgagccggtcgtggaccgttcgatctcggccgtccgttttggataggttctatctcgaccgtccgttcccgtgaaccgctgccgtgcacccggttcaccgcaaaccttagccgctgacgcaataatcctcttttccttttcaaaaataattcattattgcgtcataattcaattaaaatccatataagtgttttaatccgatttaatctttgaaaattcataactaattcatttcattgtaactcagtttaatgtggttcaagttgcaaaaattatataaaataaagatctacatattaaaattgtccataaattgaattaaatttatttaattctttttaaatgggctttaattagatttaatcttgtaaaattcatattaaattcatattaagtcagaatgaggccgttcaagtctcataattcatctaaaattatgatctacatgtttgtttactttttatgtattgtttatttggtttttattagtctttttcctcgttttgcgtgttagcttgtgaaggttcgcgagtgcgccggaagtattcaagaagattaattgaagaccgattattgcaaggcaagtcacacagatcctaaacacaatcctttgagcatgttgatcctatatttaaattctctatttatttcaactgtgcatttattttcgaatgtcaccgggtggtgtgaacctattcctttgttatggcctgtttgcattgattactctattccttgataccttgggatattataacttgactagttgagctttatatattggttcagctagatattagatatgattgcttagccatgcttagaaacattagcacactattgggataacttatgacttaatattatttaatgatggcttaatgatagttcacgatggtcaatcgtgattggttaattaattacttgccaactaaaacttgataatggtgggttgtgagcacatggttttgagagtcgtgctcatggcaattaaggaccggttcgcgagctactgttgtgaaacattaaccgtgccaaccacaagccagcgtgggcaacggctttaccttttgtataacatggttcattgcggatcaccagactgagaagtggcggagataagcccacgggggtcgctggggagtccatgccttgttttataagggggtgattatgatccaggaatggtgcactgtggtgagttgtgttgtgcagagggtattgtcacagcctctattcgggtacttttcagtatcgcgacgcatggtagacatgatgttgaggctgtgtcttgtgggtacagtggtacacctctggccagagtaaaactattcgaatagccgtgcccgcggttatgggcgggttgagcaatgtttttcgtgattagtctcacacctctcacaataattatggatgttatacctggtaataatttgcttagctcctggtttggagttagatctgtacagccgggtatggttgttcagaatggttgggcctgtgcagcatgggtgtgttgttcagtgttgattaaaatttctgattaattactccactgttttacatctcttaaatgttttgctaagtgctgcttttgcaaatgagcctatattatgccatcctttggtatccttgtgcacttgcatatttgctttgtggcttgctgagtatgtcatatgctcattcttgcaataatcaatcaacctcagttgaagaaaaagaatccagaaggagaagacgtttggcttataccccagttgagctgcctgtgggagtggagccggagcttcggtagattttattttccgctgcagttttcttcatggtgaggactaagtgcctcttaagtaagtacttatcgttttagttaatttgatgaatctgtatattaaattgtcagtttgtgtacctcggctgattcctggacgaggattttatgcacaaataagtttggaaattactagtgaatttccgggcgtgacactccctcctccgcatggcagccgggtgagggcctcggggcgaacccgcgggatagcccgagggggtgacgccatgccccgagccccccccggccgcttccacgactcgcgtgacgcgcgaatggggctaacttgcaaagtcacgtcgccggagggaaagtaaccctctacttcacatacccccgggtccatatctccgacagtagcccccgacgctatatcaggtatcgatttcctgagatcgttctgacatggtgcctcacgactcctcgagctggggttgtgggcccggcagggaatccaaaaggatatcgccgcgtggccaggttggcgtgccaaccataatagcggtttgaccgccactgaccgcgctcatgatgaagatgcttgaggcgcgataacccggggggtcagtcagaccacgcctcgattctcccgctcgctactcctgcggcggtagtggtgacggtttgctcaacttgcgctcatagccgttgtgcactccacctcgagtgtgccactgacagacgcactaaaggcgggagcggatacaacgggcgacgtgatgagtgggcgcaggatgcgaagagacaaatgcgggcgcgaggatcgtgggggcaagtatgggagcgcgaaacgaggaggcaagtgcggatgaagcgaggataaaagggggcggaggcagagactctgcccccttcctttcaccaaccgcccactcgtcctttcgcttctcaaaccctaacattctcgccacctcatactgtctcacgctccacgctctccgccggttgccatggcccaagacaccggcgacgcagtgctcccttcctcccgcatcacagcagacaggcaccttagccttccccgcaagatcatgccggacggtgccgtcgtgcgggcgggagagtcgcggccacggccacgatatccggagcgatccatgcacctcttgtccttcgccatgacgggcttgattccgccgttctccagattcttccatgaggttctggatttctacgaaattcatgccttgcatctcgcacccaatgccgtgatgacgctggccatcttcgtgcatttgtgtgagatgttcattggggtgcgaccgacgatgcggttgttccaggccttcttcattccgtagcttctgcaaggcgcggtggtggggggatgctacttccagccccggccaggcacagcgggtcagtacatcgagagcaatctccgcaagaaatgggaggactggaataaggactggttctacaccgcgttgccggaccatccgcgacttcgagttcccgctggccctcctgaaaggtctgccgcatggctggcgacttcggagctgggcgaggaatacgacgcggtgtgggatcgccttaggggcctgcggagcctgggcctcacgggggcgatggtctttggcgattacttccgccgctgcatcgcacctcttcaggaacgatcccgtggagcgtgggaatacactggtcccaacgaccccatgcggacgcatgtgggcgagcgctgggactagggtgaggaggacgcgaagagggtgattcggcgggtgctgggcctagactccgctgagccaacactaatcccagatgggattcttcccctctgctgctaccgtgaccgggagagcattctggccgtgatgtcagccatcgtgtcacgcccggaatttctatccaaaattccaaacgcttacatgtgtgtgaaccctcgtccaggaatcagccgaggcacacaataacaaattgataatagagtacaattattactctaattaataggcgaataaaatgtcattacagaggtagatagttcctctcaatcaataaagatctaagcagcggaaaataaaataaacggcgcagacggctccactccacaagcagcttgaccaaggctacacctaatcctccacaccatcagcatcattgtagaactcttcctctgatgaatgattgcaaggtgagtatatgacatactcagcaagccacgcagcaaatatgcaagtgcacaggataacaaaggatggcatagtagggtttcatctttttgcaaaagcagcattcagcaaacatttgagaatttaataaaacagttaagtattaaacaatattaacccaacgctatacaacataccctgttgcataggcccaaccattctgaacaaccatcccggctgcacagttctatctccaaaccaggaatataccattccaaaccaggagctaatcaaattattaccaattatagcatcatttactatggtgagaagtgtgagactaatcacgaaagacattgttagacccgcccataaccgtgggcacggctattcgaatagttttactctgatcagaagtgtaccactgtacccacaagacacaaccccacatcatgtcaccatgtgcctcaataccaccacggtacctcggaaaggagttgtgacaataccccttgcataacacaatccactacagcgcacctttcctggatcataatcacccccttataaacaaggcatggactccccagcgacccccgtgggcttatctccgccacttctcagtctggtgctccgcaatgaaccatgctatacaaaagataaagccgttgcccacgctggcttgtggttggcacggttaatgtttcacaaccgaaactcgtgaaccggtccttaattgtcatgagcacgaccatcaaaaccatgtgctcacaacccaccattatcaggttttagttggcaagtaattaattaaccagtcacgattgaccatcatgaacaatcattaagccatcattaaaataatagtgagtcataagttatcccaatagtgtgctaatgtttctaagcatggataagcaatcacatctaatatctagctgaaccaatatataaagctcaactagtcaagttataataacccaaggtatcaaggaataaagtaaccaagaacaaaagggctataacaaagaataggttaattccacccaatgacattcgaaaataaatgcaatagttgaatagaaacaatagctttaaacgggatcaacatgctcaaagggttgtttgggatctgtgtgacttgccttgctggccttggaactcttcaaactcttctcctgcgaaaacggactctccggaaacgacggaatctaaacagaaaagagcaaaatcaccaaaacagcacataaacaagcatgaacagtacatgtggatatttttaacatgtagatctcaattttagaaaaatttagagacttgaaccaactaaatcggagctaagatgaattagttatgaatttttgaagattaaatcggattaaaacacttgtattgattttaattgaattatgacgcaataatgaattatttttgaaaaggaaaaagagatttattgcgtcagcgggctagggtttcggtggaccgggcgcacggcggcggttcacacgaacggacggccgagatcgacttgatccaaaacggatggccgagattgaacggtccacgaccggctcacggggaagggcgacgatgacgtcggcgatgatgtcaccaccggcgacggcggctcggcggctcgggcgcgcatgctcgccggcgaacggctgcactacggcacgaacggagggcaccaacgggtagagggcgacgcggcgaactcaccggcgaccaaaaaggcggcggaagagcaacggacggcgacggcgacgaggttgaaacggcggcggagatcgggtcgacggtgacggcggtgctccggcggtcttcggcggcggcgaagcggcggacgaggacggcggcgacttgacgatcacgacggcgaccttcccgagcaacggcgacggctgaaacgacggcggcgcacggctggagcggcggcgacgacggcggctcgaagctacacggcgctagggcactacggacgacgagaggcgaaggcgaaggtggcgacgggtagaggagagctcggggaaccttttaaaggggctaggaggcgacggcgaaggcccacggcggctggcgacgggaaggaaagatcggggtttgaaggaaagagaccgatccgaatcgaacttgattccacgaacttccaaaacgaattagccgacgtttccaaaggggaaaaggtagaggagatcccaaagattgtttcccctcaatcaatttcaccggaaacggaaaggagcggccggattttggaaggaaacggcggcggcgcgaaactagggtttcgggcggcggcggccggaggttgacgacgaccctgacaggtgggccccacctgtcagcgggcggacgcgcgcgcgcggcggcggactgggccggactgggccgaggagagagagaagggttttgggccgactttcggcccaaagccaaaagaagactttttaaaacctttttcaatttaaattatttatgaaatgcaattccatttattaaaaatactttcttagctcaaataaatcccagaaaaatctaggaattatagaattaagcaaagtatttaatgaaattttatctggccccattttatattggaatttattaattaaaattagatcgtctcttctaggcttttaaaataaattctaaaaattccaattaaacaacaatttatatattttgaatttttagggtgtgacacatcggcgccggtaggagccggtccagtcgatgcggcgccagcggtagcgccgtcggcacgggtggcggtggtgcgaccgcgggcgggagccgggccggcggtccaggcggcggtggctcaagggcgcctggatcgagccgcggacctggagatgattccgccggtgacccaaaggggaaacggaaggtggcctattcccggccgccctctcccccacatggaggaggtgccgagcgtgcaacggatcgttcgccaatgggccacaagcgacctgccgggcccgaggctggtcggaaaaagaagcggctccggaagatagcacaaacggagccatgccggggggggggggggtttcatcgagcccccaaagtggaccttcaaccgccctccccgtaggtacgattattggcgctcactttggtgctcttacccaacccattttcttgttccttctttttcttttgttaacatgatctaggttctcttgtagcgagattccttctcagggaatctcagggtcagaccccccgcaagggacgaaatctgaacggttggggcagtccgagcccggccaaaccaaggccggggttttcgcagcctcgtggcgggacccagaggacacgcactgggcccgatcccgagcgaccctcaggcgggacccgtcctactgtgggtggcaggggtggcgacgctcctcccgggggcggctccgggaccagggtccacgcggagcaccaccaaggatcgggggatgagggaggtcgcggcctgggagccgaagccggaggtggtcccgagcttgaggttgaggctgggggcggtcccgaggctgaggccgaggctgaggccgggggcggtcccgagcccgagcccgaggccgaggctgaatccacccgaggacccgaagcggggggtgagagggacagccgttcccccttgcgcttggggcgccctcgaggctggtctcgcagaaggggggccgagagcagcccccagtctcgcgggggatccagcagtaccccgtcgtcccgggggcggaccgcggccttttcctccccaactccggcgagtatggagccacttctgcaggtgctcgccgccgccgactacactgtacgagaggggttgaacacccaagttcaagccctagcggaagagcgggcggccctggatgcagagtgggaacagctcgccgcggaccgcgcgcgagtcgacgaggggcgtcgcgccgtggacgacatggtaagggtgggggcgcaaaatgcatcaaacccaactagccaaaatccaggcgcgcgaggaggcactggactccgtcatgcgggaggcggaggaggagcggcaggcggcgctgatcgcctcgagcgtcctggatgaagcgcggggcgatatccgccttcagtacgaggctcacgccgaggacttggcgaagaggattagggacgcgcgcggcatcctcgacgcagccgctgcccacgagcggcgggcatcggaggccgacgcctcgctgcgggcgcggacgatggcactcgaggctgaacgcagggccttggatgatcgtgcccgctctgcacaggagtttgaagccacaatccgtcggcggatcgaggtcctcgatcgaaaccagcgcgagcaaaacgcgtgcggtgaagaacaggcacggcgggcccgggagctggaggagtgagcacgcctgctagatcagctggagtctaccttggccgcccatgaaagaacggcggcagaggtggaggcttcccttcgcctccgtgaagaagccgcggccgagcgtgaccggatcaccctcgccgcgaaagcttccgcggaccgccgcgcggaagagctacggctgcgggaagaggcatgccgggaacgggatgccgcactcgccgagcgcgaagccgaggtgaatcgccgcgaggtagccttgcgccggctaggcgagcaactcgcgaaacgagaggaggccgttgccgggcgcgaggctcgtcatctggagagcgcccgcgctgagcgtgcggcaatatcagcgaaggtctccgagctggaggcccgggagaaggacttggtagcaggcgggccgcccggcggcgcgggtttggcgagccagctcgccatggctcagagtaccctcgccgacttggaacgcctggtgcaggatcaggctggggaaattgcggccctccgcctcaccaacgagctcgggcccgggcaactctccgacaccgtcgactggctggagcacgcggggcgccgagtcggcatctctgtgcgtcgggacagcaaactcccgcccacacagccagcactcgcgcttcggctggacgggctggcggtggacctggaaaggctggaggaggaggtcggcgagaccataaagtcttcgtcagtttctttggcacgggctgcggtggagctggtcctcgcgagccaccaagcgcgcgaccccgaattcatgccgtggcatgcgctcgaggattttcccccgggtaccgaggcaagggcccgggagcaagtccgggaggcggctaacgcgattgtctcaagcttcgaggggtcggccccccggttcacctccgggcttaccgcggacgaggaaaacggaagcgggggtgacgacggcgatgacgactaggacgacatcgtcagtggcgctggcctcggggggccgggcactccgtgaccactcgcgcctttaattcctttttgctgtgtgcccgtagcaggcacttcttgtatttaggccattgtgccatcctatcttgttctgcaactgaaacttctttaacccctcttactcttttgctttttccattggatgcctgtgatataaagagaagaaaaaaccaggacaaaaggggattattagactgcctgcgattgatatgtcgttttgaccccccctctcgggcttgttctagcgagaagataaatccgcgctcggtccatggaatctaagtggtgaaaggcaagaccatcgccccgagggagccgcccagcaggactggccagaccgaggctgcgacgaccgggggtcggggacgaccgtgtgtaggcccttccgatcccccggggttcggcacaacccggggcgcggcccgcgctcgtgctccctttcggcggttttcaggccgtcttacggcacttagggtttagagtaaacgcggattatcccttgaaccgggacaagccagagaaaggggagaaaacggtctccacgaaaaccaaggggttgtgcgggggctggcccgtgctccaggaaagcaaaaaatctcgatgtcatggatagaaacgacaaaggtgctcgatattccaggggttgggcagctctgtgccgtcctccatggttaaccgaacggagcctagccagggcacttcgatcactttgtatggcccttcccacattggcgagagcttcctcagccccaggcgcgactgaacgcggcgtaggacgaggtcgctagcttgtagtgatcgggcccggacgtggcgctgatggtagcgtcgcaggctttgttgatagcgcgcggcacgcaaggccgctcgccttctccgttcttcaagataatcgagatcttcgcggcgaagggcatcttggttggcctcgttgtacaacgcgacacgaggcgacccgagggaaagctcgaagggtaggaccgcttcggcgccgtacaccaagaaaaatggtgtttcccctgtggcgcggcttggagtggtccgatttgcccacaacacggcgggcaactcctcgagccatgaatccccgtgcttcttcaggacgttgtacgtcttggtcttgagtcctttaaggatttcggcgttggctcgctcgacttggctgttgctcttggggtgggcgggtgaggcaaagcacaatttgatacccatgtcgtcacagtaatcgccaaacagctcactggggaactgggtgccgttgtctgtaatgatacggttgggcactccgaatcgagacgtgatgcccctgatgaacttaagagcagaatgcttgtcgattttgacaactgggtaggcctcgggccacttggtgaatttgtcgatggcgacgtacaagtgctgatacccgcctcgagccgccttgaatggcccaaggatgtccagcccccaaactgcgaaaggccaagatagtgggatgatctgtaaggcttgggccggctggtgggtccacttggcgtggaaccggcatgccttgcaccgctggacccattcttgggcatcttgtaatgcagtcggccaataaaaaccttgccggaaggcttttccgaccaaagttcgtaaggtcgaatgggctcggaactcaccctgatgggcgtcggctatgagctcgatgccctgctctcgagaaatacacttcaagagtatctcgttggcggtacgccggtatagggtcccttctacaaggacgtaccgtttggagatgcgcgcgagcttttcagcttctgcgcgatcctcaggatgagtattgccttcgagatatgcccggatgtcggtcatccacacgacctgacgaggggggtcagggttgaccccctcgggccccgaggggcacaggtcgcccggagtcgggtcggagggcgtgtcattggggtccctcaaagggctcggtcgtgccgatggttgcgcgagcctttcctcgaaggtccctgggggagtggggctcgtgccgacgcaacatgcgacaactcgtcagcaattgtgttgtcgcgtcggggcacgtgctggagcttaagtccgtcgaagtggcgttccatgcgccgtacctcgcggacgtacgcttccatttgcgggtcgttgcactgatactctttggatacttgatttacgatcagctgggagtcacccaagaccaggagacggtggatgcccattccggctgccgccctcaatcccgcgaggagcccttcatattctgccatgttgttcgtggctcggaagtcgagacgaacgacgtatttgaggacatccccgtttggcgaggtcagcgtgactccggcacttgcaccttgaaggttgagggagccgtcaaaatgcataacccagtgcccgtcgcgaatgtcggcgtttggatcctcttcttctccagggaggggaaaggggacattagacgaaacaggttcgtccaccggggttcattccgcgatgaagtcagccaggatttgacttttgatcgcgtgccgcggttcgaagtgcagattgaactcagccagctcgatggcccattttaccactcgtccagtaccctctcggttgtgcaaaatttggccaagagggtatgtcgtcactacggaaacccgatgcgcttggaagtaatgacgcaacttccttgaggccattaagacgtcataaagcattttctgggcctgcggataccgggttttcgcatctcgaagtgcctcgctaacaaagtagacgggccgctgcacctttcgacggggccagttcgtgttgtcaggggctgatgactcggagcgcgcctgttcggaggtcccggggggatcccagactgcctcgggatcataaggctcggggccacctgccaaagcctccgctcctcccttgggggcctcggggtcctcccgggggctggaagctttgggcgctaggccttcgggggacgaggggccatcgcaagccgaaggggcctcccgttcgccttcctcacgctcaactactagggcggcactcaccacatggggggtcgcggccaagtagagtagcaatggttcctccggtcccggggccaccaagacgggagggaagttaggtaagctttcagctgattgagagcttgctcagcttcctccgtccatacaaatggcccggagcgcttgaggagcttgaataggggcagcgccctctcacccagcctcgatataaatcgactcagggcggccatgcatccagtgacgcactgcacatccctaagcttgctaggggggcgcatcctctctatcgcgcatattttctcaggatttgcttctatgcctcgggaagagactagaaaaccgagaagtttgcccgccggcacgccgaacacacacttatcggggttcagctttacgcgcgtggacctaagactatcgaaagtttcggccaggtcctgtagcaacgtgtcttggtggtgcgtctttaccaccagatcatcgacatacgcctctacattgtgccctatctgattacttaaggtaatacgagtcatgcgctgaaaagtagggcctgcattcttcaatccaaaaggcatagttgtataacaaaaggtgcccacaggagtaataaaggcggttttttcctcatctttcctagccatacgaatttgatggtatccagagtatgcatctagaaaacacaaaaggtcgcaccccgcagtggagtcgactatttgatctatgtgtggtagagggaagggatctttggggcatgccttgttgaggtcggtgtagtcgatgcacatccgtagcttgccattggccttcgggacgaccaccgggtttgccagccactccggatggatcacctcgcgaatgaaatcagcctccaggagccgcgccacttcctccctgatgaaggcctgccgctccggggcttgacgccgcactttctgccggacaggtcgcgcatccggccgcacggcaaggcggtgctcgatcacctccctgaggaccccgggcatatctgacggcttccatgcgaaaacgtcagaattcgccagcaggaaggagacgagcgcgccttcttatttggcgtccaaggttctgccaatcttggcggtcttagatggatcgtcgccaagggggatttccttgacgggcacctcgtcagccgaggggaggcgcttcttggaagcgtgggacgcagaggcttctggggcctgcggctccgtggccaccgccaggttgtctgcgcgctgctccgcgcaggcgagggcgaccttgacatcaccaaggacggtgatgggaccagcaggacccggcatcttcatctagaggtaggcgtagtgggtggcgaccatgaacttcaccaacgcgggtctacccaaaaccgcattgtagggcagattgaggtccgccacatcgactggcccccccatccaccagcacatgcttcatcttgacgttgtggatggtcggggagaccaccagggccaactttccccccccccccccgagcgagcaccgtcggatggtcgctctggtcgaatgtgagcttcacctccgaccagcgcaccttccggaccacctcatgcgtgggaacaatggccagaagctcccacttcatagccttgaagcttcggcgagaggtgtgagcgcaagccccccccccccggtcgagcgtggcgacggtcccctgaggtatctggaaatccagatcctcaccgtctccgccatcatcggcgggggccttgtccttggcctcccctcgctggtcaccggttgaggtcgcgggggctttgccctcccgtcgaccctgccgcttttcctcatcagcctttcggaaccgctcggctaaattcttgaccgagcggcagtcggcgagactgtggcggtaagtgttgtgtaccgagcaccacttgtccgccgaccggccctcgccggagggaatggtagggctcggcctatcgacggtggcattttctttgcgcggggcccgcgtgggcccgtctgctgcaaggacatggccctcgtcatcggagcgggctggtttccttttgcctctcctatctcactgcttagagcgggaggcagattcgggggtagccgcagccgccgcaccggtgctgggagagttccaggcccatgcctccttcttctgggccaccttgtccgccagctcgaagagctcggcagtggtcttgagctccttggaggcgatcttctccagcatgcgattatgccgcacgctgttccggaatgcatacacaaccgcgtgggctgggatgcacggaatggtgttgcggacctgacagaagtgttgtatgtacgaacggagggactcatcatccttccgccgtacagcatgtaggtccacctcttcccccgggcggggatatgtgccctggaagttcgtaatgaactgctggcacagatcctcccaggagtgaatggagccggggggctgggtcatcaaccagccacgcgcctgacccttgagggccatgggaaagtaattcgccatgacccggtcgtcactccctgccgccacgataaccgtggtgtagatctggaggaactcggagggattgatgctaccatcatacttctccgtaaggttggggcgaaacttcgggggccaccggacattccggagactcgccacaaaggccctacaacccgtccccccaggggtgagtgtggggggagggccgcctcgtgaagaggagcgtggcgctccagatgaggaggcgccttcccccatacgggtagctcggcgctcgtctcggcgtcgctcgatgttgattcgagcgtcctgcgtcccgtagaggccgtcatggcacctccggctttccgaggcccctgacgatgttggaaccgtggaccgcctcgagatcgtggccgatcgacgagcccttctccttgccgacgaggagagggtgaccgaggtacgcgacgtaccagcggcagcggatcggccactcgtggctaactgccactgggtagtagtgaccaagttggccacgtcgtccaaccagcgctgaacaggagtctccagctccgggtttaccgggggatgccgcagaagggcgcctgctacctgaagcgtgccttggggcaaaccgccgtctccatagtcgagacggcagcgtgccccggcgcgtcgcggcctccctccgccagggggcggagagagagccgaatcacctgaacgagtgggatcctccctccgcgaaggttcgcggcggggaggagttggagaaccatggcgacggtgacgaggacctcggctctcgccggaatccccactcccggacagggtgggagtaaatgccaccgcctcctcctctactttcaggacctcgaccatggtcggctaaggcctggagaaaattgggacgaaagaaagcgacttcctctcggaatgcgcaaccgcccctacttggcgcgccagctgtcgaggagagatcctcaatagcggggaatcgtgagaccccccatttgtgagttcggccgggggcggaggctcatctcttggaaatcactcgctcgtccctaggattaccggcaagcttgcacgcagtcggattatacaggttcgggccgctatggagcgtaacaccctactcctgtatttgggattatggatgagttttacaaagatttcttcactctagaaagcgcactcgcttcctctcttctggagttcaggttttctgggcgtcctcctctatctcagtgggcagggtcctccttttatagctcaaggggataccacatgcgccgcctctacctaccctctatcggagggggatcccactccacttttcctgggctttaaaccgtgccttctcccggaagctaagcaacaaccggttctcgagtggaaccaggcgctgccccccgcctgacacgggggacagccctatcattccctcataaatgaacgatgacctgtgacagcccttcctcgagtgacgctcggacatgacgggtcatacccacccccactccgccgggtacaagggcgacgtgaggacatggttgccctatccatcggatgtgacggtgtcaggccggtcacatccgttggacagaggttagctaggcgcgccgcacgtctgcccttaccgcattaaatgcggtgagggacagttggggcgtcgcacttttatggctgttcagcctgtgctctcgctctctccctccgctgcgtggcagccgggtgagggcctcggggcgaatccgcgggatagcccgagggggtgacgccatgccccgagcccccccccctcccccccgcccccccgccgcttccacgactcgcgtgacgcgcgaatggggctaacttgcaaagtcacgtggccagagggaaagtaattcccctctacttcacatacccccgggtccatatctccgacacatatcatcagaaatcttgaggggatgtcccttgatgcacccatttctctccactatagtactagtttaataataatctagagtataatgataccatcactccacgaaatgaagtttaaaagccatattgtgagtacctgcacgttggaattttctcaactagatgtggagatgaacacgagggaacacggcgtgtaccgcgatttcattatgttattattatgagattgcatctagtaacaagaaaatgtatgtgttagacaataattatgaaactgacggactaaccatccataccgacaacatagtgtgtgccaccgctccttttcgatacgtacaatgccctactatacgttttaattttattcctcattagcatttacagagtacgttaccatgatcgatctaacaaaaactctacttaaggcgccgaagaattaactaattaaaaagtgattttacagttcttgatacgatactgaaagataccgtgttttttatgtaaaatttaatacctcgcgatatcttcaataataataataatagaagattaataccttcaataacagtagaagatatcaaatttacattaaaaatttttggtgtatctccgaaggattgtaaaatttctcgtgattaaatgatagtgtagcatctgaccacgatcgaatcatgccagtttcagagcaaggcggcgacggtgacgagcttctcgaactggcgcgcccggccgcttctgcgacgtcggggaggcgaacggcgtgggctggactttccgttagtgggcctcattcaggcccactgttatcaccgccgatccacatttccgtcaataaaccgacagttgactcagatgttagttcaaagcattggccagagtgagtatatttggatctgtaataacaatatttactttacttgcagtttattcacgtgagctaaaccaacaaaaagagagagggaaaaaaacgaagacgggatacagctggggaagaaattagggtactcaactctgaaaaatcaaaacgaaggctagctaactatgatcgcaaccagagaacgtacgtactgaagagggttaactagggggctctcttaattaagggataatcgctggataatccagtccagcgaactgaagtgaagaagcaagcatattcagtgcagccgatgaggagtaggaggagcaggaggagtagaacgaggaggaggaggaagcggtgacttcttcatcttgctgatgaagttgacggcgatcctcatcatcttctggaactggacgaggctgtgctccaggatgaccgccatgtcgccgttgagctccctgcagctgtacgtgcacatggtgacgtcgttgatggcgcgaagcacgagcgtcttggcgacctcgtcgtcgccggccttgagcgcggcggcggcgccgtggatctccttcatggcgctcgacaccgtcacgctgcagttgtcgaggcaggccttgaagtccggcacggacttgttgaacccggggagcttcccctcgaacaccgtcgccgccaccgcgccggactccgtggcggcctccatggcgacggcgaccagggacctgaagtccacctgccccggcgcgccggcgatggcggcgccgtggttcgacaccgacgtcagcaccgtctggatgtccagcaggcggtggcccaggtccttgacgcacagcttggagaacggccccgccgtgcacgccgccaccagcgggctagaccccggcgggaggcgcgcctgggcggccattgctgaggcgcacatcaggaccacgacgaacatcgccatggacaacaacgacgacgccatttaatttccttgtcgatcactctgctaatgaagcttttctagttgttattcaagatctgaattacagtaaaattcgatcaaacgcaataatatatataagctgaagagacagatctgttggtttgatcagtgagtggttcttctttgtgctctcagctcgtcgccgtagtcgctgaggctgggaggggttttctctggatggtgcgtgcatgcgcgccatgagtggtcgcgcgggagtgaactagcagaggaagcgggccagcttgtgcgagtttgccgcgctcttccctctcgccgtctcgcgtcgcgtacccgcgcccccgtacgtcaccgctgtcacggtgtcacattgacttttctagttgtgtggagtatgtttctgcagcgcttgtactctgtcagctgattgttgcgagaagaggtcggctaagccgtgtctcgtagactttgatcacatcccttttatatacagtgcaaagtagctcaaataatttcgcatgtaagtcccttttattttctattttactctttatattttgttgatttaggggaaaacttcaatattttacaatgaacacctcaaaaatcatgaacatttataaaatcacattccctcctctccaccggcaacttcctctactgaagcccctctctgccagcgccgctctccccccaccccttctgccgatgacactccccccaaaacactgatgatgctagcttccatccccatccgccttgtatggggccatgccatctcctaacgtgctgctcgagctgtgcctcggtccgccctgataaatcctaacgatgaacacatgttttaattgggctcagcagtattcactaaatatgggaaaggcggatgtggcatgaaatctctgatgtgtaaagctggggctaaacaacaactaggcacactgtgaaagccctaagggtactcacagtgcaagccacaggtatgaggagcctggactaggtcacaagttagaaatctctatctcacagtgaaaagtggctctaggatgacttaatttatcatgtgctcccttgtaattttttactttaatactcatatactttttaaaatttagagagtagtctagcaatttgcatagaacaccctaaaaatcagagaaaaaaaaatctactccctaacctcttccccgccacccacccgtcactttcatgttcccctcgcttcaccggctttaccactcacatcgtcggtgatgagctcctcagtggcgccatttctcccctctctcttcccggtgccacctctatccggacggccgtcgagtatattgaaacagcaaaaaggccgaaggcaactccgacggcgcgtcaaggaagccacgaatgggtcaaggcggccgccaatgccgtctcgtcgagctccgccttccgtcctctctttcttctccggtaggtggcggcagaggtgacggcatgaatctggcgaccctcaacggcgtggagtgagacaacacggatgtggcggtgggccttgatagcagaggactccaaggcaagttaatggctgacggctccgtggagtggccctctacagcggaggaccccgaggtgggccttggcggtggacctcgacggcagaggactccaatgcaggctgacggctccgtggtgcggtggagtggccttggcgggggctgcagatctggccgtagcgatgaggttccgcaacggctcgccgtcggccagtctgccgccaccaggttcttcctttctccagtcctcatctcctccccagctcgctggcgatttatggcgatcacggaagccacttaaggcgaggctacagttgtaatctccacaatgcgggtcgcgcccatctatcctcatgccgcacgccctcgatcggatcaaagaacctttggctcattttggctacgcatagtttgtttggtcactataggagcgaacgtggagtctaatctactacgtggaaggtcgaggggcgaacgacatgtcgacgcactatgaacgccctaacattgcagcacattgatatctgatattttgtctatcgggcttaggttgatggacagtagcagcagttgatcatatattgcacttgtttattgagttgcgcgtttactcgtgtaacgagattagaagtatggttaactttgtgtttatcacgcgttctcattggatgttatgcatagtatatctaccgttgacaactagagaccttttacagggtctgtattccaaaaaaagtagaaatccaacgctccataatgaaaggtaccctgtaaaaggtatttgagtattggcataggcacttaggtaccaagggtaaaaagataaatttgctagtagagaggaaaggaaagagttgtccgtaaattcagatcggtaccgcgtcggtaccagttaagttgcatggtactagcattaaagttctcatttacgtggttttctctagatttacatttttgtttccaaggacatggtagaactcttcccattaattctccattacgttatttgcatagttattttgatatttatattttgttcccaagaacattaaaatatcactcaaggtttacgttttaagttttacattttatttgtggaaaaaagaaaattgtagataaaatattcctaatgattgcgtccatctgaacatgctatgttaggttaaccaacaatatcagagcttctctcttgaccctatcttcttacaggttcacctattcaaaccctagaagaagaacatatgagaatatctcattttagtcccttatatgaaggaatttgttaactatgtaaataacgaatcaatcgtgcaaataagtataggagcagaggagatctttcccgatgcgcttgcacctagccgtcgatcggcccatcttgaaccctcaactgtgccgatatttctctggaccaattcaaaccctagaacaagaacgaagccggggtcaaagaaatgaggcgttgatctttttttttcccggtgcagaactgcagatcgatcgatgcattaaattgttcgaaagatttactttgttttctacctaacaattctggtgattgcacccaggtattcgattcactcaaaatgctccaggtattcgattcactcaaaatgctcattttttagtagttaattactccattgctactagttatgaaaattttattccatacttgcccctcttttaatcaatggttcacattgttctacctctcaataccttcaagtacctcgcaaacaccgtaaaaggtctctgacaactattataccagttgtgccgctgaaacccgacttgaaacccggctgtgtgtgttgtcaggcagcaagaaagataagacattacttacaaatcaccgacggcatgtgcgtacaatagacacattcaaacatatatactgcatctatttgatgcaatgcaaagatttatgaatgaattgagagggaaagttagaattgtctaataaccgtcatccagtttatttttatgtcttccaactagctcttggtatgcaatgttaccatacatctgagaagtagtaagatattatgcgcggtgatactactatgctcttaaaatcggtttctaaggttattaaaaagttattaaaaatttgaaggtatattgcttcagttccatgcctccttttgaatgaatgaatatttcaggagaattttgagaggaaattaacgtttcttgtaaaattcttgttttcaatatgagaatttctagcatcatctttttttcgtcgggacaatacatgaaagaaggcggtccgaatttcactagagtttaaaggagtttactacataaaagctcgttaaaccagttttgctgatgaaagtcgtattctcggcgcttacaagttacaacgctaaaaactacactttactacaatcgtgttgctagattagactagcatcctgccaaattaaccacttgtgtctgtgatccacaggccaacaggcggagtttcacagatgcacagaaaatacgaaaaggtggtccggtccgtcgtgagacagtcagagtttaaaaaaaccgtacggttattttgattatcatgtatagtaacctagctttaattttttttcctgcaacttaacaaaagagtagaaattccggtctgtggcatggaatgaccgttcaacggcgcatgattaaagggttggcgtgtcagcgcatttcagcacacactgtcgaatttctggagtattccttcttattggaaatatatgggccggccggcaatatatattttgtaagaaaaacatcaaaacaatcaactgtacacaccctcgcgcgatctcctttacggttctactaccacatataagcatgcgtgtacacacataatatgcaccatgcatgcatataatcacatgagtaattttatagttcttgagaaggtatcatgaggtatcatttttttctatcgtagatttgatatctcttggtatctaaatactaggaggtaccaaaaatttaatgtaaaatttggtaccttatgataccttctcaaggaccgtagaattgttctaatcacataaaaactgctcagtacatagttcttcacaaggccggccgaatacgagaggtgatcgatcgacgattcgaagctagctagcgtcccatgtgttgcacggcgggcgcggcggcggcggcggcgcggcgctccatgttgaggtgccacccaagcttggggtcgtagccgcgcgcggcgagctccctgtactcctggatgagcgcgcatggctcgcaccagcagtggatgcagcagtcgccgcagggctcgccggagaggccgtactgggcgcgcatcttgccgcggtaggtgcaggtacatccactggaacccggtgatcacggccagaaacacgtagagcgcgccgctgtggccgcacgacgtcgaccccctgtccacgatctccgccaccctcccgaacgtgatgcacggacaccaccatgtcatgcaacctgcagatcaaaatacatgtttgtttaggattaattgattaattctctgtaatccatacactacttgagaactgatctttactgcttggtcgaccgaaaaccacaatagtcccaacactgaaaatgttttttttcccggtttataactccaacagaaataaatgatctttagttctaaatatcatatttagttctgattcaccttctaacagggcctttcaggggctgggatctttcgtcccggcctatgcatgcttgccatggtatggtgtggccggaggcgcgcgccgcggcggcgagaacgtacgtacataggccgtagtcgtcgaagcagtcgcagaggccagacgaccagggagcggagccgacggggacgccgggcgctggcccggccgttggcttgtctggctgcatctcctccttaattcggttgcccctgctagctgcaagttcttgtgatcgacttgttgtttgcgctgggaaactgagcacaagctagctagcgggcgggacgatgctcatatatagcacgcgacaagttgcattggccccggtgtgatctggacatatctggttcggttaaaccaattagtcattgaggagaagacgaaggaaattccatgggacggggcctaaacctcgtcctctgtagtcgtccctgttacgattttgacatgcagaggacgacgtttaggcatatcgccttttagacgatatgatatgacatgatatatgcatcaagattacattgattagtcaccatcctgtccgttgcacggattattattgactaggcaaatggtggcagctgtttcattggcatccgggagaagtagtgtgtttgtcgataacggcagatccagtgcaattaaagagtatttagatgcatatccagttcaattcaagagtatttagatgcatatcgaatacagtatgtcatacgtatgtttataaaataaaaataaataaaaataaaaactgaacatgtttccgatgctttaatatgtcgtccgtatttgagtttgtttttaagttcgttcatttttaaaagtacataagaagtcgtataagaaacccttttaaaaatctcgcatgctaatttagaactaaagtcggacttctaattgctttacaattctcaccagaccgtaagaaagcaacgtgcaagatatgatcatcatcccaatgaggtttctggattagatatcaatactatcaaaataaaaatcccatatatactttttagaaaaaaaattaacaacaatacgattaaaatagtcttcacccgttgtaacgcacatgcatttttttcttaaaaaaaaaggaaaagagaacgtattcgacctaagaagcaaatgactttccgttttcggccatttgctatttttgatatatcctttttcggcccaaccacacacgatcaatccggcccattaccaaatttggccacacgttttcagactttcttttttttgtaattttcctgtggtctttattactccctccgtttcatactataagtcgtttgactttttttttctaagtttatagaaaaatatagtactagtatttttaacaaaaaaatatattataaaaatatattcaatgctagatttaatgaaactaaattgatattttagatgttcctaaatttttctatagatttgatcaaacttaacaaattttaattaggaaaaaagttaaatgacttataactagcatggtggcccacgcagattgcgcggctagcatcattatattttctcttatataatagcatatatgttttctcattatattattcaaatatattaaaatgacattataattttaaattttgcaataactatacgaaactacaaatgtgtaatattcatattgtattttatatacgtgttagttattaattatttttaatatcaaattttagttatttgtaaattatatatattcctatatgtactctagactcgtcttttaatatatttttttaattccgaattttttgtaaattgtatttctatatagactctaggctcttctttcaatattatttattttttatttttgattttttattatttctaattatatttatatgtggactctaaactcatctctcaatattctttaattttgaatttcagttacttctaaattatattcctatattgactttaaactcttcttcccatgtttttcttaattttgaattttagttatttgtaaattgtatttttatacagactcaaaactctacttttaattttattatgtttattctgaattttagttaattttaaattcctatatggactctatactctacttctaatattccttattttttaactctgaatttcttttttttcttaattgtatttctatatggactctatgctctacttctaatatttcttatttttaattccgaatttctattatttcctattcgtatttctatatggactctatactctacttctaatattccttatttttaattccgaattttagttattttctaattgtatttctatatggactctagtctcctcttctaatattccttatttttagtttcaaatttcaactatttctaaattgtatttctatatggactctagtctcctcttctaatattccttattttttaattccgaatttcagctatttctaaattgtatttctatatggactctaccttttctttttctccgattaatgtgagagtttctaggccatgagagcgaacgtggaggctccttttctattcctttaataatataataatagatatgtaacagagggagtatttaacaggccggcctaattcatccattcagaccgaattgggctttttctcttttacacacatgcatataaagtttgtacttagtccctcatattcagccatgtgtataaaatttgtatacgtatgcatatacttagaattcatacatataaactttgtattgtacccaatacaaagtatatacatgtgtatatacgaatagagcggagactagaagcccaatttggcgaccgcggcgagggctcaggaaggcgacggcgaggacgggagctcatcaggaggcaggagctcaggaagtcgatggggccggcatattttaagttcacttacttcaaaacagtcattcaaaaccaagtttattaaacatatgtggccggccggcagctaatttgaagcaaatacaacagatatataagaaatgggctgaagaacagactcgacgaggcactcatcttaagtagaccacccgtactattagcgtcgcatcggcgggttgtgcttgggcgggacgtgctggttgtttccgagccagccaagcgagggtttgtagccgaggctcttgaggtgcctgtactcctggcacagcgcgcactgcaggcagagggcgtggacgcagcagtcgcagcatgggtcctcggggaggtggaagctgtcgcgcatcttgccgcggtagcagcaggagtagaggcagtggcagtgggcgaagaagccgagcagcacgcacatcacgcccgccgcgcagcacgtcctctcccccctcgacacgatctccgcgctccgcccgaacgtgatgcacgggcacaccgtcgtcaagcaacctgcatatatataattagtttgtgtcacataaagacgtgaatattaaggaatgatctaatatggtaccaaatgttatatggtaaaattactcaatcaatatatatattccgggaaataagcttaaattagcttagaattaatagatggtctatacaataaatgcaatatatataatctggtgaaggacgatcgatagaatcatcgcaagtagtatagtactgatcgacaatatggaagtaatatatacgcacaaacttcgcagtcattgaagcaggcgaagagtccggatgaccagtcattgtgttgcggcctcgccatctcctccgatcctctccttcgctagtgcgaccactgaccagctgctgctgttgtgatcggcaggcttgctagctaggagcgatgagcatgagcttagctaggagcgtggctcttatatagcagtagcacgatcggtatgcatgcatgtttactgaaactttaaaacgatgatttttaattatatatattagcccgatctaactagcgtttggttgacccaattaacttagttgactccaccagaaccgaccggcaacactagtcaatgaggcagtgaatacctcggacatgacctagatcaggtctcacgagtcatacaatgtcgctggcagtggcagtagtacttcctcctccgttaaaaaaacaaaaaaaactaacataataataatataataataatataggatgggacatatcctaatacaacaaatcaatgtctatattcgtgtttgggttttttttttatggatgtagtaagtagtaccaactattatatattcatgccttagaaaccatgtttattttgattatcatcttaattagcgtgtggcataccaactatgtgcttgacagttgggagcttgggggatttcacaataactatgtacgttcacttctttttcgcgtatattgaagttccggtcagttaattagccaaccggccgccggaatttcgactccttcccaatggctatttcctgaccaatcttttcatactctatttttttattaaatggtgtctcctaatatttttttaatctcaaatgattaagaatttctttcaacgaggaaaatgtcaatcgatcaagatcaatatatcagttgcaagttgtcaggaaaatgagtaaaagagacaggttctgttcggcttgtttacacttacctacttcttggatcggtactacaacattagaacattataactagctagttactaacttaattagtaccagagttaggttaagatagtaccattagtaacatatttgtgcattgattgctggcaacagctaagctaggcacaaatgtactaggattctaggaactcatgacatttctgtgctgtcgttgcctgaaaaatgatccgttgatttggtcttagaaacctaccccacgagatcgatcttgagctcgaaaacatgagcccaatcagctcattacatatgtgctactgctactgaaagggctttgttgagaaaactgtgtgcttgaaacagccaaacataggcaggatcacgcctgatctgataggccattataagggcatactcagactgatgacgttttcaaccataatatcattatttgttaaaattgataattatgtggctacatttagtttgttattaaatattggcaatgtatatggaattttggcaacattttaaagccaatcctatcaaaattttgacaatgttatcaatttgttaaaattttggtatattgccaagttttggtaatatttattttggcactaatctgaacaaactctaacttgtaagtactgtacaaacaagacttccgagggtctgtactgcaggtcaaaattcatgcaagagaatacttgccatgcgaaagcctttcgttatatattggtatagtagcttcactgcttatgactcactcgattagttaagcacaataattaattgttgagaagaaatggagcaagggagaggaaattctatttgggacttgggcatattgttttggaactgaatattactacgagtagtaatgagagttttaggccccgttcgcttcaggtggcgtgcaaaatgtgatacataattagcagtaattaattatgtattaaacttcgatataatatttttttaaaaaaaagtacaagggagcaaaatgttgctcactacaagtagctcatccaatgagataaccggacaggactccagtgtatccggatattgggccgagagcccagatagcccatctggcgacatgccctccttgggccggatggtccatcaggagagcagctaaagataaaatatgggccgcatgctcatcgctaagcgaaccagaagggcccacccaattttgtcgtgcggtaagggtgaggaatttttttatttttaattttttttattaaaagttttacaaaaataattttccattttaaaaattgacg

SEQ ID NO: 5714 - DNA, 9864 bp, Oryza sativa
  unsure (1)..(9864): unsure at all n locations
atagatcgtttttttggccatcttttttagtggaggagatcaattgatcagacggaacctagcgaaggctagaagtattcaaggttgaacagatagatacttcatccatccctctgaaaatatacctaatataaggtataatcattttttatccatgtctcgttatatataactctccaatcatattactttcatattatttgcatacatcgaggtgaccttactgaagagacgattaatttctttttttttaatttatgtgttagtagtgttgtgcgttatattttgggatagagggattatctatagctgctttaaaaagaaaaacagagaaaaatgggttaatttgatccatgcaactgcaagagtaaattgcaccgctagtgtatcaacttgataagtgggtgcaatatggtgtaagaacttgataaatgagcaatctagtgcaacaatttggtaggtaggtgcaatttagtataagaactttataagtgatcacataaatacaacaactttgtaaggtaggtacgattttgatacaataaattaagaagttatgtggcaactttattattgggtgcatatttatattggtatcataataactagtaactgaaaatcaattaaactgaatgtataaattattatatttagttgatatttgagaaggtgaagaaaacaaaaaattcttaaaaggtaattggatgtaaattatatgtgcaatataattcttaaagattacattcaatactataaggtaatatccgtaggattatgtaatgttatattgacatcgtgaaaaaaaaatcacctagcatatgcttagccaagttaatgcaccaaaatactacttcctccgttttatgttgtaagactttctagtattgcccatattatgtctagattcattaacatctatatgaatgtggacaatgctagaaagtcttacaatatggaacggagggagtaaattatcaagttcttgtattagaacgcacccacttatcaagttgttgcactcggacgttcaattctcaacttcttgcactatatcgcacccacttgccaagttggtgtaccatgggtgcaatttactccaattgcaaatatgtccatttcaaatatatgccattacaattcgtctattcgtaaccatgctaatgaaattatacaaaattgaaatcgtgccactgccgtcacattttccatcaatctcttttttcccgttttgtttcttctttctttcgtcttcttaccacaccaacgcatggcgggacctcggcggcccggcacgcacgaatccaatccgatgagtggcgggacctcggtggctcgacacgcacgccgtccaatgcaccgtggtctcaaccacatgctcgtggacgcggttgtccatcacgatgacgatctacaaggaaggggatacggggagaagggcatagaggaagcggggcaggcggggcagaggaggtgagttatgcggcaatggaagagtttccctgtcattgatcccgccagggctccatcgctggtggtgtcacctcgcctaaactctacccatatcttatgatagagagagcccccggctttaacagtggaggcggcggcaacgtaaagaaagaagnccaaagaaatggtnngtacgaacncngnccnccttcncttnttncccgggnttttggggcccccccccgggcccctttttcccggggccccgcgagacagtgggaggcgccagccctcttccctcgtcgcggtggcctgaagggctgcgcgagccttctcacgcacggtacggagcaaaacaatgatttttttaagtttaatagaatggttcacttttagtttttgagaaataaatctaggttttctcttgaaaatattagttttttcacttcctattttcggtttagaaaactcaaaaatagaaatttagaggtggattatacacttttgttggtgatgctcttacgctattagggtgtgtttggataatgggaaagagggtgggattagaattgagaaatgaatgaaaggttatgattaaatggaagagggtgaatgaacggttagaatttaaagatatcttttggtaggtgaaaaattatttcccattagccaaacgctgccttaggtattacagttctaaccgctcatatgctctatactatatgtctatatccaacggccctccccgatttccccgaaacgctactacccctccgccacagcgtccacacccgcgccgccgccgccctcaccctcgccgccgcgcatcccgcggtcccaccgtcgccgattccaccgctgccacggacaaccccgccgcccctttccttcctcgccgtgggagcgccccccccctccaggttggctagcagctagctccgccggccgcccttccccgatgggggcagcggcgtaggcgccgccatcagccgccgtacgtatgtgagcggcgcctgcgcacgcctccagctggtccgcgcgaggtaactgtgtggggtaaaattcctctctagtcttcgctttcgccatatcgcattttcgagaatacctaatgccgtagtaagccatacgggggtcgttttattgcttttatgcttaagtcacacacttcgagcaagtctattgaatctatactcgggtagaagtaatgcgcgctcatctccaacgcctattttgcaaaagaagaagaagaagcagaagagagaaacagtggcttttgtactactcttgcacatagaaccccttctcgacttgctatcaacagttggtttgaaacttagcatttctttgttatgcgcagttttgctgaaccagatgccgatgcagtgacgattcgttggccgaggatcgcgttcttataggcccgatttgcaaaggtactactgcagtggcggagcttgagagagattctagatggggccagctattatagagtggaaatgttggtaatggcagaagtagaatttgtagaagggctattcatattgtaaaataatttccaagcatgtttttgttaagaaaaaatatatgttatacctaagtatagctgttaaacaggtggaaaaggatcactcaagttataaaagacaacatatcaaagttattgtaaattaacaggttttaagagagctattttattaagataaaaatgtttgtcatccataggaggaaaatgatttagtaagcaattaaactgaagaaaaagaatggacttctcaggatttgaacaccaaacttccaagaaagcatctgccctcttcacttgctaatcaattgagcagaaaataaattttcttactagatacttgttaagtatatatgtgtttgctgccaaagctgagggggcaacacccaggttggcctccatgaagctccacctctgtactattagctgttgttggaactatattggtcgcatcaagcttccgccaatgtttgcagggttaaaatacttggtggtctgtcatgctgtatgttgatgttatgcattgcttttggtacaaccgagttcctttttcctgactggttccatggttggttgagatatggatgctatgtattgttctttaatgttacactttagcaaaattttcccagattacgtaagcaactactccatccattttatattataagtcgttttgatttttttcctagtcaaactttttttaagttggaccaagtttatagaaaaacataatagtattttaaacacattatattatcaaaatatattcaatgttagatttaatgaaactaatttggtgttttagatgttgctaattttttctaacttataatatgaaacggagggagtattgattacaaacatgatggctacttcatttgattttatttagcattagctgtttcaatcttggcaatttaccatttccatctgttgtgtggttttatttatgtaggagtgcttgtaaatccaatcataccatttcgattttcatttgaccaaggataggcaagaataggaggaaaaaggagagtggcatataatgacgggtggatcaggtgttgtggtgctagacaatgggggtggtcttctgaaggctggatttggtggggacatgaatccgactgctgttgtccccaactgtatggccaagccccctggttccaagaaatggctagttgctgaccagctgcaggcacaagatgttgatgttactggcatgacattgaggcgtcctattgatcgtggctatctcatcaatcaagaagtgcaacgggaggtgtgggagcgggttatacgcaacctactgcaggtggatcctaacaactcatcgttgctactggtggaaccacagttcaaccctccagcactgcagcatgcaaccgatgagcttgtttttgaggagcttggtttcaaatctctttgtgttgcagatgccccttcccttgttcacctttatgaggctagccgccagccatcgctgtttcgagctcaatgtagccttgttgttgactgtggcttctctttcactcatgcatctcccgtgcttcaaaactttacactgaattatgctgtgcggcgcatggaccttggtggaaaggccctcacaaactatctcaaagagctcatttcatatcgctcccttaatgtcatggatgaaacactcctcattgatgatgcaaaggaaaaactatgctttgtatcccttgatgtccctggtgatcttcgtcttgccaggtctgttgccattctcatcccaccacatatggatacatgcttgcctattgtttagggttcaaatttaacctgatttcaagtttatcttcaaggtcaaatggtccttcacacagaaagtcctgctaagaatgttttgcttgtgtaaccagcttaatgagatgtagatagcttagtatcttatctttggaacttagtgctgtagttgacaaaggtggctttgtgtttcatatgtatgtatgaagggttggtatttcctttattagaagctagattttgaaactttgaattgcacttctgggacagcacaatcactgattgagatggtaatagtttttcattaaataattagttggtccacgtgttgaatacagttgaggtttttatccatctaagtttcaattctaaatagtttttgtagtgtctttcctagtatctaagttacaaacatgctatgcaattatttgcaggttatcatctaatgacaacccttttagatgctcctacattctccctgatggtataacatacaagaaagggtttgtgaaggacttggatgaggcatgcagatacagctctctgcctgctaatggagaatcggttagaaaggatagttctgacagcgataggagcaagtttgaggataagaaaaagcctgaacttagtcaaaatgtaacatctcgagctataattacatgcttaatattatttggcatcatctaactgggttgttcctattcaggaatttgtgttgaccaatgagaggttcctagtgccagagatgcttttccatccaattgatctgggtcagcagatctactaaaatgtcatgtgtactttgagctgttcattgttgctctgttaatctcactactgtgcatgttcataggtatgaatcaagctgggcttgctgagtgcatagttcgtgctatacaagcttgccacccacatcttcaacctgtgctttttgagaggtatcatttatttattgtctgaattctgaacctatcttgacatttgaatatacatccatgttactatgtgttggtttgtttccactctccagaattatcctgacaggaggaagcacgctattccctcgattcaccgaaagattgtaagttgatctttttattatttttgtacatcagaaataccatctcaaggggtgtgggatttattgtttgctattcacagggaaaaggaacttcgtcctcttgtgcctgatgactaccaagtaaagataattgctcaggaggagtatgtaccactctatctcttttgcacacgtgcgctgttggacatgtatagtcaccaacttaccattaacatcctgttgctttgtctagcccaattcttggtgcctggagaggtggatctcttttggcgcacaggcctgattttgaatcaatgtgcattacaaaatcagagtatgaagagatgggttcaatgcggtgccgtcgtagattctttcactgaaagttgtgtgccagcagctcagtagaagtgcaatttgtaagtatgattcagcactatctagttcaggtcttgaagaaatactcattaattaggcaaacgagaagtttggttctagaaggtaatgatgcacaattttaacacgtggtcatttttttacataggaattagaagctattactccatgtatctggtcccccttattactggcaaccaattctttcagccttcctaccagctaaatatgcagatatagtccttaccagggaaaacctttgtggtctaacaccctcggaacacagttgctctgagataaatggtgaattttgcttttctgctcggtgaaaagttttcttaatttttttccgagtaaacagcgtgcatggaaatattttattagtcatttactctggcaatacctgacctgtgtacgccacacagagctttagtttagaaacaacagtatgcatgatcgtcttttagaagcataaatattagtatgttagtttgtatattcagtctctggaattttcgagtcttctgtccacctttgagctgaaaatgaccttgctgatcgtgtgattggcttgaatggtatattaactattgctagtacgctgagcctatgagatatgcacctattcacttgtgagatatcctctaaaaatgtctttgttcaaaaaaaaaaatcctctagtgtttactgaaatgcacttatgtcatcaaaattttacgagcaacattgctggcacttcacgtagcaaactagcaatgatttccagataagagtcacaaaggaacaacacacacacacacacacacacacacactccgactgctgatacagaatcttacagatgtcaccagcaagagttcagccacaagaacagaaccactagtacgtagataacaagtgcagcgacatgcatggtaacaattgaattgccaactctcagataacaccaggactcccctcaggcaaccatggttaccttcttcatccctcatccctcaaccttgtcgcaggtgtctctcaggcgtatcttcggacctcaggatccagtacttctccatgggatgatgggaatgacctcctgagccttcagaattttgtgcaatgttcctaggatagaagtcggatgtattccttaccatcgaaactgcacagtttatgaaaccaaaattacatgtcttttctagataatcgattaattagcgtataaaactcgaatacatgtagaactgattggtgcataaaagagggtcagttatgtacatacccagtcgctagcaatgtatcagctggacaattcagagtccatctccattggtcgatctcccctgtaaactctcggcttgttaggatgcttcttgcacacagctaccatgctctccaccacggagtcgacgatgacatggccaaagaactcaacctccttgagccttgggagcttgtcaatgccggagatgccatctgcaggctccttgaggacggcgagcgtgagcctctcaagctcgggggcgcctccttggaagctaagctcatcaaggttgggcatattgtccacgatcagctgcttgagcctcgggaatagcttctcccggaagtggagctctctccccatatatgactggtagtagagcttgagggagaggaggctagggagcttgcctagctgctcgatgacctccttgccatcaaggaagttctctcggagcgagaggtcgaccagattgccgaggtgtgagacccaaggaggcaacatgctaagcttgccccagaggaagaacttctcgaggaagatgggtggcgagtctagatctaggagttcctcgaggccagcgtcctcatttaaccagtggaggatagacaagctgcggagggagtagctgagtttgttgagggacacaatgaatggcttccatttgttaggccccttttcacagttcatgacgcagagcttggttaggctaggtaggtcacccaactcgcccatggcgatgccgctcgacgtgacgttggcatgggcaatggtttggagggactccatggcgctcaagccaggtggtattgtcatggcctcaaatggctcaaagagcttgacacggtggctccttgtgtagtatctgtacctgcctgatagaagatgcctcatgtgtcctagccgggtgatcgtctccggcaactccctcacatcggtttccctgacgtccagtgtcatgagctgtttcagtctcccgaccgaccgtggcagccgctgcacgcctgtgtccctaaggcttaggtacctcaagagggagagcttgcagatgtcgtccaattcacggctgcttagccaacgacaaccttcgagatccagcaccctgaggagctttaggcgcttgaagctaattgatggcagtggtttctcgatgcaccggagcatcaacagcgagcgggcgcaagacaagtctacggacgacaagacgtcgtcctgaccctcgccctcgcccttcttccttctcctcctaaacctaaagatatcctcatcaccaccaccactcctagattgttgcccctgcggcatgtgggagccatggacagatagccgccggatcttgtcatgcccagtcgtcgtagccgcggtatgttggtgacgcccgtagctggtcacgctccccaacaaggagatgaagttctcctccacgcacttggccgtcatcacctccagcatgatgtcgtgcaccttacaacacctaaccacgccattggtggcgacccgagtgggtgtgacgatgctcctgccaacgaactcgtctatgtacttgccggcggcctcctcgggggtccactcccgcccaccgccaacgaacccctcggcggcccatcgccgcaccaggggcccccgcttgatctcgtacccctcgcggaagacgctgaggtagaggaagcaagccttgaggtggtagggcaggtcgtggtagctcagcgacagtatccgcctcatccccctcaccgccgcgctcgtgctcagcccggagcccagcttgccgcacaccttcgtccactccaccggcgtcttgttctccgcctgggccagcattcctcccacactgactatggccagcggcaggccgccgcatttggtcaagatgtcaccggagatgccctccaggcttcggtactccgacgggcaatgctccttctggaacaccgtcttgaagaacagctctctggactgatcgtttggcagaacatccatgaagtgaacgcgatcgccgggaagcgagcagcagctctcagcaacctgacggttccttgtagtgattattattcgactatgcttgtcattgtcgggaaaggctggcttcaagcttgcccagtcctccagactccataagtcgtcaacaacaataaagtatctgcacatgaaaaggaatgcattacatattcatacttaatacttataatattgtgatttttacggtttctgaagagatcctgaaaggcaccttctttgtctgatgttagttaatttatagcacctccagatttcttaacactagcaagataccgatggaaaccaaatctacactaggaattgtgtgatatctcctactagttgctcatggatagtaaaagattctcaaaatatttgacaaagttctgacatcccctaagtgattagaatccaacc

SEQ ID NO: 5715 - DNA, 28994 bp, Oryza sativa
acaccattttgctgctgttctgccaaggcttatgcttaattatatttacctgtatgaatcgttgtcaaaccttatgctggttaacatcgaaggagcacaagggagcaattacagaaccaagttggacaacatcggtgtcaaaattgcaggatcctaaatggaatttcccttttcacgtactggactaatttaaattttttgaagaaaaacattaatccgtttgaatttgtttctcatatataaattccagtatgaccacatcttgtcgacggcaagcactcttacatcgaaacaaatgaatcattcaaacaaccaacaaaaaaaaattacagatcgaacagttccaatccgactcgcacaacaatcgcattcgaatcatcatcgattcaaggtgagaaggccagatcagatcgccgggcgaaggcgccaccaacttctacgcggtgggcttgtagagcttctcgaccatcttcctgaactcgtcctggttaggccagagggcggcggcctgggtgttgaggggggagtcgttgttgggctcgccgaggaggctctggatggagaggaggatggtgcggacgtcgtaggcggaggaccacttgtcctggaggatgtcgaggcagatgttgccgtgggcgtccacgtttgggtggaagcagggggtttcgaacctcaccttgggcggcttgtacgggtactcgccggggaaggcgagagaggcggtaggaggtgccctcgtacgccgtcgcggcggacccggcgatggtgcccacccagctgaagatgttgtccccctccgggaacgcggacacgcccgggtcgccgcccatatcagcgccatcagctccgactgcagccgccgcaccaccgactgcccctccgcccccgccccccgcgcctgctgcttcccggacgcggcgccgtccccgccgccgtggacgcggcggtggcgggaggaggcacgttgccgctgccgtgcgcgccggtgttgttctcgcccctcgccatcctcctccctccttgcctggatcgagagaattcgagatcggtggaggcgcttcgagaagagagagagagagagagagggaggaggaggaggaggcggcgcggtggggagtatataagggattggtttagtgaccgttgctgcagggttgcgtggatggggcagctttccggcgcggcgcggcggcggccccccaacggctagtttccggagaagcggggcgcgttcacacttgggggtggggaggcggaggtgtggggcccacgtgacaggttgcgtacggtgggccgcggcggggggcggcctggtccgcgcattggcccgctcgccagtgagtccgtgataggctgatgggttgatgaaattcatgcggattttacgctctatgtcatttttggtctaaaattattttaaaaattatgaaattcgatattattaggattaattttaggggtttctttattgttttcattgttagagcatcaccttacatagtctcaaaatagatcctaaacccaaaattgagggtttttcttttaaagaaaagatcaaatcgaatagtcgacctggttagatgtccaatgtttggaattcccaactttggttttttttttccgttctccacatatagatttgatagacctccagatactctacctatctttctctattttttatttttttagcgaaacacaatacaaatgaacttgtgtttcgctaaaaaaaataaaaaaaatacaaaaagataggtagagtatagatagatactaccagggtttccaaactgtttttttgggtggttaccgccaccctacggtttggcggttgccgcgagatataccatagttttaaaaactgaaaagataaccgtacacgataacagtggtaaccatacggttaccgcatgtttttttaaaccatgaatactgttgaatggttatcctacttctataaatttcacacaatcgctagaatacgaggtaacagttctataacaaaacttagggttcatctattataaaagaattaaagtcttacatattttttcaacatcaattttttttaccttcgagcaaatttatccatatcagattatttgtgaacgaaagaaaataacatgtagaagaccctattcgaacgaacctgatgaagaagaatattacttcctccttttcacaatgtaagtcattctagcattttccatattcatatctagattcattaacatcgatatgaatgtgagaaatgctagaatggtttacattgtgaaacagagggagtaagtaagaacacgtacacaagaaagtcattatcatatgcttatttgagttttaatctttacaaatttgatgaaaggaagatttatttgatattttaaagtaactttcatttagaaattttttatacaaaacatattagcagtttgaaaaataacaacagagggcgaaagaaatttgaaatcctgaacgactcctactcggctactccgacctcgcggaagtcggtttgacgccaccgtttctactcacccaagccgccaccgcacttcgcacccgaagaagaacaaaccgcctccaaaaatctagggtttccacccgcgcgcgacgcgattcaggtgggcgccgctccctctcccgctcgatccctcctattcctcttcctcctcctcctcccgcgcgcacgattgcacgaatcgctcacgatttccgatccgttcggccgcgtccttgcaggtgtagcagcagcggcagagggtgatggcggcggcggcgccggcggacgcgaaggcggaggcggccaagatggacctcctcgaggacgacgacgagttcgaggagtttgagatcgaccaaggtatgcgcggcccgcggctccctcctatgacctatccctcccccaacctatcgtcgagtcgaatcgccgtggtactgtttgcgttctctagggtgggggaagcgacgccgattcgccgcaggttgcgttcgtggccgagaccttcggtttgggcgagttggtttggttggtcaggagaccgtgcggcctgctatctcgtgcgatctggtggattctattactttttttggggaaaatctgtgctcttttagtttcgcataatgcaatgtatgttctaagttggtttgcttttggtattgttgttttccttatcgagttaattcatgctcgcttgcttgcgacaattgtgacctgtgccttgtgtgctttcgtatctgtaccggtttcttcctctcactggcatatagtgtaaagattcacatattagaatgtagaaatttagaatgataaacccctaagatttttaagtgtaggggcatatgaccgaaaatgtttccattggtgctgcctgttgaggtgaatcataacaattgtgagcagttgatgaaattttgtgttcttttgcaagtccattgaacaataatttgtagtttagtttttagaccaaaattttgtctttaaaccttttcatgataggcatcccaatttatttttgtaattatcctagtccatacctgctcccttcctcctctaggaacacatgatatcttctctctctcttcgaggcaactagtccatgaattgtgatggaggccattacattaccaaggttggttccagtcctgttgccacctgcaaatgggggtggcagtgttggagccagctattgcacccctaccactaccagtacgcttgggcactagcctgcaaagaagctgttctgaaagcacgctctatgttgtcctagcctcttagggtctatagtgatttaacggatagaagattttatcgctttttgtccatggtttatcgagtagagaaaaggagatatgtactcaacatatgaatgagataaggacttctagcttgtgctactattaatggttttatttttaagcgaaatggaaatgtacagactaccttccccttactgggaactgctcttcttgttaccttattatcatggcttttcttccattaaaacccttcttgtgatttgtgcttatgggcctgtttagatccatttggaatggcaaatggcaaaagatttggcatggagttggtgtttagatgcatcctagagttttgccattttagcactagagagagagagcgtggtcccggagcacttcttggcaaaatttgctaccttgggctagcaaatgacaaatgccaaattgccaacttttgctactagtgtttggatccaaaatggcaaaactaaacaggccctatgtatgatttagtggctaccaaacaacgtagaggtttccacttcttttgtcatttatgtgttggattttttatgcacattgtactatatgtggtgtgttttcttctatttaaaatgagcagataacctaatattttgtgacatcacggggttatatgatttggcacaaacttattgtttggtgcttcttccatgtattgagctataacatctcatattgggcaactgtctgtatggttcacagggaaaaaaaaacttctatagttttaggatgtttctattggcttcctctctatatggtggtaatagctactttcttgaagttgagtttagcattttgatttattctttacagtgccttatggtcagcaagttgtgcttcacactttgatttttggcatgcggctgtcacttctgtgttgcaatctgtttcccccattttgtacattcttctgcaagcaatatgcgatcctagggtgaagttgtggatctggtgctacaatgttattatgtaaggcttgcacttacccattcttcctgctttcttatattttgtagaatgggatgacaaggaggatggtgatgaggccatccagcaatgggaggatgattgggatgatgacgacgtcaatgacgacttctcgcttcagctgaggaaggagctggaggaatgcaacacccagaagatctgaactacttttttttcccagttatgtttagctgtagcacctatgctgggtcaggcacttttgtaccctttgtgccccattgctttctcaacctgcaatgttcctactatactcctacttgtgtgctgaaacctgcgatcaaatttaatttgtgaaagggttaaaaccaagttggtggaaaaaatatggttctctattgttggtaacttcgagttcgaaaatcggggctaataagcgttgtccctgttggtcaaatccaggtcgtctgatgcaagatgggattttttttttttggcctgttgtgttgagactgtttgagtcgagaagatgtttcttggtgcaacagttattaccggcaactctaagagctcgtctacctggcatatgtttggttttggtttagggatgaagagctcgtttacctggcatatgttttggttttggtttagggatgaagagctcgtttacctggcatatgtttggtttagggatgaagttatattttttgggatgatcccatatagatgtttgctgctggcatatgtttggttttggtttagggatgaagagcacgtttacctggcatatgtttggtttagggatgaagttatattttttgggatgatcccatataggtatttgctgggcgatgtctaagggggtatttgtccacattcgctgatgtctaagggggtatttgtccacattcgctgcaaaattgagtgggcccttatttgttacaagagtgggccttcaaaattgagtgggccctcatttgttacaagagtgggccttcatttgttacactctagatctgtaccagattatatatgaccctgctgggacctgcgtaagtttatcgattaagacagtgcgctctggggcacaatgcacatgtgatcagaggtgatattttttttgattcacggtatcatgcaatttctgatttttattccacgcaagttgatatgaatagggaggacacgagctatactacaagtatacaaacagtactaaagaacaatggaaaaaaaaaccaatccaagcttgagagtaaacaaacacgcaatcatatccgacattaataatgtatatccgacattaataatgcgcggcattccacactagctagattaatcaaattaagaacaatcatgtatcgatgaactcagaggctatctggtcgatgtcacgctcggcgtaccactacggactaacacatgtcggctagctagtcgtgcccggctatctgtcttgctcgccgccggcgccggcgagcatcccatggtgcaccctgtcgatgaacttggaggccctccgatcgatgtcacgctcagcgtaccattaccgcccgtagtagttgttgtcgtcgtagtgcgccggcgagcatccttcggtgtacctgttgatgaactcggaggccttccggtcgatgtcacgctcggcgtaccactacggactaacacatgccggccagctagccgcggccggctatccgtcttgctcaccgccggtgtcggcgagcatcccgcggtgcaccctgtcgatgaactcagaggccctccggttgatgtcacgctcggcgtaccactaccgtccgtagtagttgtcgtcatcgtagtcgctcggccgcactttcgtcgtcgtcctcccccgttcctgctgctggtggccgtagtacctctgctgctccctctccgccaccgccgccagctagccgtggccggctatccgtcttgctcaccgctggcgtcggtgagcatcccgcggtgcaccctgtcgatgaactcggaggcccggtcgatgtcacgcttggcgtaccactacagccccgtagtagttggcgtcatcgtagtcgcttgaccgtaccttcgtcgtcgttctccctcttcctgctgctggtggtcgtagtacttcctgttgttggtggccgtagtacctctactgctacctctccgctgtcgttgcttctgaacaaaggtattttgaaagcaaacactgacttctctctccccatcacaggcacaactagctcacaaacaagatttgtttggttggttgtgaggggacatggcctatagcctagccaaccacatgcacgcgcgggcatttgtccacattcgttgccattgctcttaaacccaaaggtctttggaagcaaacaccgaacttccctctcccccatcacctctgctgctccctcttcgccgccgccgcctcatccttccttacaccattgctgctaccgttgctcttgaaccaaaggtttttggaagcaaacaccgacttccctctccccatcacaggtatagctagctcaatcttgatcagaaaccagatttgtttggttggttgcgaggcgacacagcgaggccatacgtatttatagcctagctgaccacacgcacgcacgggcatttgtccacattcgctgccattgctcttgaacccaaagtaagcaaacaccgacttccctctctattataggcacattccataagcacattcgctgccgttgctcttgaacccaaaggaagcactccatcataggcacattccataagcacattcgctgccgttgctcttttaacccaaaggaagcaaaactgacttccctctccctatcacaggcgctcatcacaggcacattcgctgccattgctcttaaacccaaaggaagcaaatgctgactttcctctccccatcataggcctcttaaacccaaaggaagcaaaactgatttccctctccctatcacaggcgctcatcacaggcacattcgactcttgaacccaaaggaagcaaacactaacttccctctccccatcgcagacacagttgtttggtgggttgcgaggactcaatcttggttgcgagggaactcaatctttgatgtttggttggttgcgagggaacatggtgagcatcacagacacagttagctcaatcttgataaaaaacaagatttgtttggttggttgcgagggaacacggtgaggccatggcgtatttatagcctagctgaccacatgcacgcgcgggcatttgtccacattcgctgcaaaattaaatagggcccaggcccctactggtgatctctataatcactactacccttttacgaactagagcgtagtgattcgtataatcactactatgcgaagaagtgccaaaaacatcccttcaaaaaaaaaaagaaaaaaaaagacacattcgctgcaaagttaagtgggggctaggccccctactggttatctctatatagttttctaaggtgcttgggaggcatggcggccgttaagtgggggcctaggcccccctactggttatgtctagagatttctaaggtgcttgggaggcatgacagccgttgattactttcaatatgacgatagataagagaatctatcgtcaaaaccaacatggaggtatttaaaaatgtgggccaggtattaacttgaacataaaaatgaaaggttagatagtaatttgtagtagtaccacaatcaatggcgcatgctaataataaaaatctatgtttctcctaattgaatctgctccataatctcatcaagcagtagactaagcaatgctgccatcacagccatggtccgcgcaaatcaactgtcgatgctctagtacgtagttacttatagatgacaaagcacgcaggtgaagaaatacgacatgagaaagacgatgcgaggaagctaacctggcaacgtttgatgggcagaagtaacttgctatcacgatggttgatcatgagttataatgttcagtaaagatatcaataaaatttggttgtgcaccggtggctccacgtacctaagccatggttgatcatgagttataacgttcagtaaaaatataaataaaatgatatcaataaaatttggttgtacaccggtggctccacgtacctaagccatgattatggaggagaataatgtggtcctctcagttagtaattcaattttagatgagaatcagttgtggaggagaataatgtggtccgattagatgagaatcagttggggaacctaagccatgattatggaggagaataatgtggtcctctcagttagtaatataattttagatgagaatcagttggggaagaagatattagtttgatgagaatcagttgatattagtttgctaagtgatgagaatcagttgatattagatagtaatttatatatatatatatatatatatatatatatatatatatatatatatatatatatgtcgcagaattcacaaagttagcgacaaccatagttattaggaccgccggtcctaccggaaaaaatcggaaccaggggctcagccggtccggtccagtttaaaggtccgaccggaaaaaaaccggaactaggggctcagccggtctggtccagtttaaagatcggccatgcaatcaacctgggaaaaaccgattgaaccgctagtccggtctagtttaaagatcagccatgcaatcaacccgggaaaaaccgattgaaccgccggtttttagccagaaccggtgaaaaaccgagcagataaaccgctaaagaccggccacacgtgggtgagaaagtgccagtgcaggctgaaaccatgggggagcgtggggggatggaagaaaataggagaaaaatatgggcagaggggttcgaaacctcccctttagactcaagaaaccccaccactgagctatgcatgcttgtgtgattggactatatatctcagtttatttaaaccgtcttgggccggcggttgaaccaatcaaaccgtgaaccgaggtttcgaccggttcgatgtccggtccggtcctaataactacggcgacaactagcgacagatggctatgtaaagattatgtggagagaaaaaaaacagttaggagagaagtttctccagttgataattgataaaaaaatttaacaattactaaactaccatgtaatgttaatttctatctctataaactaccctttaacagatcaatggtggatgtttaatagcaggggaggtacttaggatacctccaagcactgtaaaagctctcatctctataatcactaagagttacgaaaaaaaatccctttcagaaaaagaaaaaaaaaagagaagaagaagagatacgaaaaagaaaataaaaatcttgtgcagttcgagatattagcgtcgtgtcgccgtctcaccgcgcctcgtaactcgccgccgccctcaccgcgcggctgctctccgaccgatccaccggagccatgagctgcgcggcggtctgggtcccttccccctgctcgccctcccccgtgccgccgcggcaccggcgggggcgatggcggcgggggagcgcctcctcctcgtcgtcctccgccttccgggcctgcgcgggcggggacgcgtccggcgaccgcggccgccgagggcggccggcgcggatggtgctgcacgactcgctcgagggggcgggggtgtcgaccgagcacgcgagggcggcgagggaggggttcgcgaagcaggtcgggaggctgacgcggctggacgccgagaccagcatcgccatcagccgcggcgcggacctcgcccgcgccgcgctctgcgtcgccgccgaggacgactcgctcgtctcccactcctccgtgccgctccccgtcgaggccttcgtctcccgcctcgacgacctctccaccggcttcctcgccgacggctacctcccgcccgccggcgcgccgccccaggtcttcctcgaccacctcgaccgctacctctacgtccacaaggtacaaatcatttcgcacaagcacatattcttcttgaggtcttttagtgtgcttgagaggtaccatgggtacctccctttctagtaaatacgcaccgttgattcaatgataatattttgtaaataaaattataaaaacatgggtagtttagtaatagctcttagccataactgccatctacttttcaggcatccgttgctcacctaaattaaattaacctgcatctccggctcatggatgaaattgatcgttaatttgttcccatttcgagtgagcataaggcatgacaaattgatatgagaatattttctttatctgggaacaatactagaatctgatcgtatagattgaagggaaatacacaattattgattaattacttagtttatcattaattatgcatgatcagtgtattaaatacgttgttcttttctttacaataataaaatacgcatcaaccaacttgtgtttcctataaaacaacaatttagtattgtttgactatactagataatcaactggtatttatcgcccgttacacaatctacatgtgttcaccttttttttttttcttgtgaaagttttaagcattcacacgtttaagtgcacttttcccccacaatcaacggacgtgaaattttggaatgtagtggcacaacatagtatagcatactatcaaaagaaaaaaatacatacaccgtgatttgccttctctcagttatctaatttaatttgataagaggcacacaattacctatttaaccttccacctaatctacaaattaagtacctgtcccacttttttgctacctttcctaacgtacctttgtttgtataccgttagattttaattgatcaatggactagataacttccaagcaccggagaatctctcattcttctttcaatcgtttgacttcaggctcactctgttagttcgattccttgatataaaatcctgaagaatttcttgctgtaccctctaatcgtacagtgaattgatgtgctaaatacgttattatgtgactttcgattcaggggtttcggagaaaaaatggatcgtcagatgggcgggcaatatatcttcactcggtaaagccttactgtaccttgtccgtgttgtatgtgtattctcttctgacttacttgtatgtgattcatctaaatttgtgttgatttgtacggtggccaggttctgacgtgccggttgggatcagctctaatgctctcgttgatatactccgagatactgaagatgctacgattgtatggcttactggaattcaatgtggagattttctttccacatgatctcaacagtctgcctaggggttatgacaaacacaaaagcaagttgggcgatgaaccgcatattatgacatcaaagtcacttttggttgaggtgtgtattttttctatcctcagtacccatgttccatttttaactgtaaatatgttttttgtctgctacatgctatttgtatatctggtagcatttaccaccaattaccaattcataggagcacgccagccatagtggcaatctcaacaactttcctacagcagggaattttcatgttgttctagcttgcttcaggggaaccatttcctcaagtacctttaccagcaaaaagattgtttgcatttatgcatcagattactgaacaagacttgaattggattcctgcttgaaaatttccatatgcaatttcctgtcaattatttttgaacgaatttcctactaatttccataagtacagacatgaatttatggtcatttgtttatacatacaagtacaacacttatgaacaggcctaaaaccttttataattgttctttggttgtctgtataagtcctttcagaaataaagaagggagttttgtagtttatagcttttcaggtggttgccataagtacttccatgggtttgtgcatgctttgtacacggtacacttgtcaattacttcttgtcctccgggaatttgtttctccctgccatgcttgagaccttacagttcagtgtacaccttcttggtcatcaagtagtcctaagtaccggagcataacgattttggaagtgccacctgatccaagcataattcaacatctctgcaagtcaacttgtaattttatctggaactaaaccaaaatatcttggatttggagttgtataggtagatatatactgttgaaggtttcatctgcactttagaatgtagcattaatagtttccttctttttgtcagacatgtcgctcctgctctttatattagttaatgtttttggtctgtgttctgttgaaggtggtgctatgagacttcgaccgttaattttttctgatgagaaaacatttttcgcttactttgacttatccttttcagattttgaaaactctgaagaatacattttggcctttccagtccaaccagtctggtagcttatttttaaatgctgtttctgcaaaccaacatggccctggtaatgtaggtgataatcaaacaacgccacatggcaatataaggtttgttctaaacatgacttgcatagcaaagtattttttgttgttgtcatatattatctggagtgcatgataacagtgacatgcaaccattgacagtaccatagagatggctgctgcaaaagctgctcaacataggttgatgcgtggagtatggactaatgtccggtttggtgatatgcggcgtgctttagcaggtagaacaccttttttctgttttaatagtgaacagttggttattttacatatgatgcactaccatagcatctcctaaatgagaagtttaatgtttcaaccataatctgggagttgtatataacacactgcaagtcattcgcgattttggttacaagtcacctatctattttttggcacctcatccacttcctaaatgtgtgatccttctcctttaaggccgtaataatttgggtaccatataattggtcattgttttgcctaacgttgttttgcactaactctgtgttcctgcaattcctgcaaaatacttgcttggcatttcagcagttcctaaccagagattcgtacctttcatcttcatggcagcatgtgaacgacttatcctactgaaccacgatccccgtgaactgagggattatgccgcccttctctaccactgtgggtactatgaagactgcctgcaatacttggcatcataccaaaccgcagtggtataatacatcttcaaatgcggtacgttcgatcgatcattgttgaaatcacagcacctctaaatgtcgctctatttgtttcactccaaggctgggcagcattggaacaatccgctggagatcatggaggacgaagcggtgaacaccctgagagcgcgggtaagcttgattttagcagaggatggctggagcagccgcagatcacctgccacgagttactggacgaagaactccgagccgtggtagaattagataggacgatgcgttacatgtgtatacggttttactgaaacaacacgagcttgtacatataatttcgatggcattttcgcaatcatttgtactggatgaagtgagctcatgaatcatgatgatgctaccatctcttccctctaatggttataatgctttctaaattcgctccgcaattgtaaatgaattacagaaggtggtaataatcaaactggagtaccaactatgatcaacagatgcaaactggctgccgcatttcgtgcaccaggcccaccgacgtgtttccacgagcccgtacctggttgcaatccatgaaaatttatgcaaacaggaggatttaggttgaatcacacgaatggaaaaacatggacgaaaaaaatagagaaatagaaaaaagatatgattctaatagaaatgtaaatgtaaaatagatgattgcaaaatacaaatgttattttatagaaataaccgtttaattgaataacaggaaaaacacagaaatcgaataaaagagatggactcaaaagaaatttttcaagagattgaagctctagctaagtttcctctaaaatatacagataacgagccattcgatatgaatttatatgatttgaaaaacttcaatctttatatcaaatgaccaaaaaagaaaatttcttataggatttaaatcctacgaaactcagggccctagcatggattgcagcattcagattttgcctgaaaactgtaaaagttcctgagtactttttttttacgcgtgtccgcgtgtgtgcctggagatgaaccgctcctagtattacgggcttgcatttcatgggccatccaacgtaacggcagtcaaagtgtcaaaaccacgtcgtcaccccacttcctccaatcaaactccgccacgtggccacgtctccccgactttccccaccctcccccaacccccgaagcgcgcccccgcggtcaaacaaatttaattaaccgcggcaaacaaattattactactactaattaccccacgacccgcatcttatatatataaaccccaccccctcacccgcacacacacacacacatcgctctgcagtttcaacctcacctcaccacccaagcgtcgctcgatcgatcgtgccatccatggcgccgccgatgatggcgacggcagcaaggcctcgcgacgaccagccgcggcggcggcaggctctgctcctcgccgcctccgccctcctcttcctcctctgcggcggcggcgctcctggcgctggcggcgtcgtcgtggcggtcgcggcgacggcgtcggcgacggcgacgccggggctggtgttccacgtcggcgggccgcgcgggtggcgcgtcccggacgccaacaccagctacacgtggtgggcgatgaacaaccgcttccacgtcggcgactcgctctgtgagtagctttgcttccactcgtctcgccattgccgccgcctgcggacctcgccgctgtctgttgcaggatgtggatgatggattcacggcgagttcttggatccgtgtgcttgcagacttcaggtacggcggcggcgactcggtgctcgtcgtcgaccgggaggcgttcgacggctgcaacgcgacggagccggtggccaggttcgccggcggcgccaccaccgtgccgctcggccgcccgggcttcttctgcttcatcagcggcgcgccggggcactgcgacggcggccagaggctcatcgtgcgcgtcatggtgcacccggcgcctggagccccggcccccgcgccgtcggccgcggcggcggcgacctcgcatcctggcgcctctgcctccggccccggcgcgtcgtccggagccgccgcggttgccgccggcggcgccggcgccgccgtcgccgcggcggcgatgggtgttctcgccggcctcgtcctgctgcttcagtgatcagttcgcttgcaagtagttcattggctaatcttcatttaggctgcttggtttgatgtttatctgtcgttagtaacaacttgattaattagattgtgtccagcatttaagtaggtattattactgcttaatcatgccgtgtaagacaaatataattgtttgcattgtgtattcctttcgctggttgcctctttgatcctctccaagggaagggatacagaggatgcgtgttttagcagtatctaattctaatgttatttgttcaagttggtttgatacattcgtcataaatggatcaatctacgtgatttgaactcacccggagcatgatttgaattttgcaaaaagtttagccaatatgcatggattgttctaaagtaactgtgttggatctaatccactggacggttcagatccacataaaggcagttcatcttctgacctcttcagtcccgatggacttcgttgtcgccctagccaactaaacttctttttgtgtgtgtgaaatagagattttcgatttaacctaaatccaataaaaatctttcaaaaaatagagatcaggccattcgaatgtccaatgtaaacgcgaccaacgtatgaacgtatgatctacgaaggaatgctcctatcagtccagatgcacacaagcatgtgtcttggagtcatcgagttaaaatagaattcggacacaagtcacaagcggcaaccaaaaacaataagcaatatgtgtggctcattcaggcaatttgcaaagttattttgcaaaacgaacgactaaaccattgtattttattgacattatataggcgatatttaactttggcattcgcaaacattgtttgcatgccaataagctacagttcactatttacacagcggtatagttcgaacaaacaattggacaacagatcaacatatgctcagtaactctatagagatgtcagaggtgcaatcaccattttactggcataactatactttaggtgtttatactagtagcatttcgatataatttcatcaaaaaaacttttgggctgctatcttgttttctttctgtaagtatactgggaaaactatcgatttctatcatttatggtgtattgcccctgaatagagaggaatggggcagctatcagaatgagtaatcactaatcagcaacatttgtcgtcatagtctatcttccatcatcccaccctggaaggtttgcggtagcctcgtttaccatctttacaagtgtaacctgcattaagaaaatatataggttatggctaaaaataaaagcatgaaacctgaattctcagagacttttcgcaaacaggataatggtacaatttcacaagcatgatattaacccttgttagtgcaacaccattttagctattcttttttataggaacaacgccagctactgggagtagcatttgtaaattcaagaatatcaactaaaaaatctgagccagaaacccaacttgaccatggaataaatcaaacaaatgtcagcagacaacttagaaaaattaaaaaaatgcatgaagcatctattttctggatattttctatcagaatccgcagaacatcttaaacaactaaaagatatgtacattttgcagttttgctgcggaacatatattgcattcctttggaacacttctcatcttcgcccagtttaataaaggtgaatttcggaagctgcaccagtagcacattttctgtagaccctgggacacattcatttggcatacacagtttttgcagggccttgtatttaattgtcagtgccagacaggatctggtacgaatggggtaaactggggttttgagggtgctgctgagaagttttcttagtatattggatactcatctttgcagtgtttgaattgtatcatgaatttatgtaggagtactaaagttagacatcgattgactctaatgcatagataacttccctaccatattttcctacatcctagattatgtataacattattcaggtaagccatatggccagtccaatagttatcattatgcacttctcctattgttctgttcacacaattattcaggattggcataaataaagtaatgctaacaacaatttgttaggtaaaaggacaattccaagccacatgaacccaccgtacatgaaaaaaacacatggttcatatgtgatatactaatactccttatgtaacaatttactagctgggtactgttgtgctttaaaatttgtgcagtactcagatgtaagcatataagctaagaaatctagctaacaagtagttaatgatcatgttggaaaggaagagagaaaattgggtgatgaacttgacacgggaatcacatagtttagtatttgctgatgatggcaatgtgccagcattgtgtaagcaacttaattatgtattcaaacttccagagtggatgccaccatcaatggactcaaagtggcacttgaaaggaaaaagatggcaaaccactctgacttctaagcccaagcaaaaggacaatttatgccaagaccatcatgcaatcaatcatataaatcaaaattatgccaattacaatatcttacaaataattgggttaaggaggaaattatacagataacaattgagttatataataaaacagtgccagtgaagcattgctctagtgtattaacatggcatctgaattaatttaaatgagaaaaaatatttttctgtctagcaaaaataaaacgttgtgttttgtactagcaagactatattatactaaaaaatacaagacactaataacaccttaacatcttaaaggttacaatatttcttttacgacataatgaaaattttgtattttacaaattaatttgctagtaaacataccacactttctggtactcctggagggggcaatgtaagatttcgtggcggtggcctgtcttggtatgctctcttgtcaaatctccattcaccaatttttccataggttagtacaccctgaaatcatttgccagtgtaatgtcaattacattatgttagcaaaacaaaaacaatagtgacttctttactttatcgcctcagaaattttagcttccgatgaatatttatatctgtagaaaaacatcacagatctgggatttcaataccttgagtgtatagtcacatccgtaagtgaagtggataataaatgtatcccaagtttggtatcaaaaggtggctgcaaatttttactggaccatcaatagcactctcatcatgaaactcaacacaactactctgagtcgggcaagtctgttgtcaagcattgacaaaaaaacataaacaagtagagcacctgaatcatgaaatcttttcgaaggatatgttgaaccccatggagtgcactagcaacagcatatgcatacctagaagtcaagtaaaaacaagaacctggaatcataacaatgtaacaagcaagtaaatgcattatgaaaatatacacaagcgtaattctcacatttccaagacccatccaaaagctttatctgtctcctgatcttctttcatttgaatcgatacattcatccatgtaggggcaatcttctcaagttgtatctaaaagtttcctcagatgataagggatagagttaaaaattgaagctcatcaattcaaaacattaataactagcaactggcatgtaagtaatgtaaaaataaaatccaaggaaatactcctcatgcatgagacttcaaggtataccacgtcaattctgcaatatgtgttaccttcttaatgattacaggggaattcccaatagggtcgatatttgtgacagggcctctttctttaggataatatttcctgagaacactttcatgttctgatggtgtaatgtaaaagaaagggaatgctgctggatcatcgcgggctaaatttggtaaaggtctcacaaatatatgatctggttctgccatcaatatgtatctgccatgtttcaacaaaacagaaaattgaaaacacatcagaacatccacattattttagcacaaataaattaccaacgccaacaatgttcttcatctcaaaacccaacaccaagaaaataattaagctattcacatgttgttaaatcatgcatgttgggattctagatatgcgtccaagtgtccatcagagtaaggttaaatgtcaaaaccacaaataaagtaactcaacgaaatggcagataaattttaactcactcttcttcaatctttgctttctccagccactgtacaaatgcccagggcctatttagtacgacatagccctgcaaacaattcaaaacaaaaaaaaaagtttggtcagttaccaaattgactgatcatgtatgtatactctgcaaagtgatttcggcgcaaatagttgcgtacaaaagtaaaacacgccacaaatcctcataaaacacacacacacaaacacaacaagcaaattcaatgtacaaccgaacagagaatagtacccacatgggaaggcaagaaaaggaggcataagttcagacaagtgggtcagaaaactgaagaaaaccttcagttatgatattattgttctgtgaagtaccattgaaaagtaagccatgactgttcacttctcacgcaatcttcttgccgaaattcacagacactatctatccggaagctgttctcaaatcataatgttgtaaaaaagaacattcggtttgtcattaagagttgcatagaagcggtcattttcatccaaaaaatgaaggggaaaaaaaaacttagtcccgtctaaaattcacaagcacatgtgttcttctgaacacctgctggaccacaatgccactgcccccacattgcgcaacagacaaaactgatgaaacgagagagagagagagaatttggtttgatcgcttgcgtacatggtccttgccggcggggagggggtcgacgacgaaggtggggatctcgcccatgagggcgtcgggcttcccggagtggagcacgcgggtgaagcctcccatgtcggcgccctccggccgcgcctgcatccgcttgtaccagtagtacatcacccggcactgccaccggctgtacgcggcgtcggtcgccgtgagcgccacgtggaacggccgccgccgccccccgcccgccgacccagccgcccgcatccaccccggcatcgccaccaccgggtccctctccctccccgccccggtggccgcgccgccgccaccccggagcacgatggccaggaggttgtaggagatcaggaacgcccccaccgctaccaccaccagcaccgccgccggcagccgcgccgcggcggcggccttccgcgccgccgcgttcatctctctgggaattttgggggtttggattcgaggggcggcgcgtctcctcctccctaacgagggaagcgaataattaacaggagaagaaaaatgggtattacgtgtaataatacattaatactcctcctaattagtaattaatacgcgtggattttaacgagtgagacacgatgcacacacttacaggttacagcgcgggcctaccatgtgtggggccgagttgtcagtgggatttagaagcggggtcgtgagggggtcgccggtgagaatgttggggggatgggagtcaacgggattttgtttgtacctaaccagtggcgtgtggtagcgtttgacgcagctgcgtgctgccaccgtgcaccagttgacttggcccactgagcaatgtcgagtttattattattattttttttttggaggggggagggttggtggtgggggcttcgatttttttagctgccggatgtgttttaagattattttttcaacaaccggatgtgttttaagattagtggtagggagggacaaaatttgttagatgcgtgaaactcataacaagggaacacaagcgcttaacgctaatccgtgcgctagtacgtgtttttaaggtattcatataagttactatatagaagttacattatacgacaagcaagatggataaaggagccaacgagcttctcgatccaatcatatttcctgctacgccacctagcctacatcgacatgccacctctctcctaccttctttttcttcctcctccctccctttgctctcttgccacaaacgaggggaagacaggatcaatgacgagcttgactaggggcccatccgtttgactgagctcgagagaagtggggcaacaacaagcttgattggagcctgacctcttggctaaggtcggataggatttttgagtggccgcaagcagatgaggaactggacatggatcagagctttgtggacatggacatggtgcggatcagccctccatgccatctagatttgtcgatggctgcttgtgatctaggagtctttccttccaaatgccacaagccaagttgcaatgcttcaatgctctcctccacgaggcctttgtcatcgtctcctacccaagctttgctaccacagcgagccggccccgagcttcgctatgacactcctatccaatattcgtcggtgccgctctccacatcaagctcgaggaggtcagctttcattggtaagctcaatcaatggtgaattgtgaagtgacattgattgattctaaatatcggcatgtgtgatagcattccattatgggcaggactttgtaatgggccatggcccccctctagttttctcaaatggataaaaaaaggtccatttggcctccatcaactatatgctgagtttaatttgtgttctttaaccgcaaatctggctatagaagaacctcaactatttaaaccaggttcttcactttaataggatctactagtttctacatgcaaagccttagagcaagtacaatagcaggctacaagttagctataagcataaatggaataaataagagatgagagagaaaaaaacgggctatagttttatagccagctgcaatatggattccaaaatatatgagaggtgggaccatatattaatggtgtattatatatttataactaattattatatcaataagctatttgattgactatagacgatttgaatctattagttggctgtttaataaacttgctcttacgcgtttgggttttggtttaacagcatgcatgtcaacacgtgtagcagttcttctcacaaattgcctttggtttagctttctccaacaaaaaaaaatttgggccgtattgccttcacgtacgtgcgtactcgtgcccgaccggagctagacctacagtggttagcttgtgtgtcgtggttgagtccgactcctgttgctgcgtgcactaaaagccacgacggtaacaaactagaatcgagcgctgggtgctcctggaataaaaacgaagttggcgatcccgtctacaccgaatcgaattgctcggggagtcgtacgtcctcgtgccacagcttgagctcgccgcctaaagcctaccggtgagttgaattgctcgatcgttccggtgcagagggtgatgaatcatcagtcacgccgcggagatacatcgtacgtgttgccctctagcaacgcgcccaggcggctcgagttccgcatccttaagcgcggcctccgcaactagtggcggacgcaggatttcgagaatggagtagaagttaagaaaataaatatcactcaaaaataataataaagtcctatgtaaatatagtgtacattaaattattaaaattacaaaatacttaataaaattaaaattatactcgatcggaacttttttttttgaaaaatgggacattatgtttttacaatgaatatgtagaaaaaaaagttgttttcaaagaatttaactaactaattattcaagtttttttatgtaagttatatttcttatttattttatatagaattagttgcaatattctgggtacaaaatataaaagcccatggacaaatcatcacaataacatttagatggttcaacatattaaactttttcagaaaatttaattctttgaaggctccatagataaaatattcagcaattttaaaggttctataacctaaagtcacatttagcctataaatttcttgttgccttgtagttgtcatggccattggttcgtgccagtgattaagtgcaggatggactatggagggtgaggtattaattggactgaagtactaatttaggtgcagatatattcattttaacccacttttggtatatgtatgaaatataccatatgtatattgttctttttgcaaaaaaaatttgggggtacagctgtaccccatgtccctatacagtgtccgcccctgtccgcaaccacaccggcagggtgagccgccacctgacatgtaggggcggagctagaacaaaataaaagagaatgtcaatggcttaatttactctattttagatcaagtttaagctgatgtgggtgtctcagtttgtattgagagggtgcacaaatgatgaaaatcggtaaggtataactaaaaatttttcttgactgggttcctgggcaccccctccaatactctacctccgcccctgctaacacgtagctgcttcggcgtgcggtcagtcgtccacaaccgctacgtccagaagacgcgctactaccactactgcgagctagtcatgtcaattaggctgtgttcggcagccctttttctcaacccctcttccttgttttccacatgcacacattttgaattgctaaacgatgtattttttgcaaaaagtttctatacgaaagttgcttaaaaaatcaaattaatccatttttttaaaaaaattagctaatacttaattaatcacacgctaatggaccactccgttttccgtgcggagggaatgagttcccatccggtagatgctaacacagcctcacagctggttgaggcagacatgatggggatagaacggtggccggggaaactgttttaaacactcgagtggacgttcacccatcttttgcatgtcaattaaatgattatgtaaaaatttcaaaaaaattgacaagatgtattaatatgtaatatatcacttcacaaatatacaattccaaattcaacttctataagttgtaacaaaaataataaatttaatcgtgaatatttttttagataatggtttttcattaatccagcctctatatccacgagggatatacacagccaaaaggatagaagagtacttagactcacacctcaataaagaggagaaaacacaaccaaaaaaatgaaaaacctacaacctcgacacatccctacatcctgacatcgtcctctcctgaaacggccacaaccgacaagagggagtcgtctagtgccactgcccctagtgtgttatcgttgcgaatctccactaagtgccatcttcatcagcttcaagtgaagtaatgccactcgctgccgggtagcccaccttcatccatcatcatctggtcagaactagatgaccagacactagctgaaagcatttgcttatgcttcgccagattcctaagccccgccgcccatagggccgccgtcgacgtcggaatcctcctccgctcttggactaccagcccaccgccatctctgctggagttagaggactagcctccgtctctgcccaactccgttgtcgcccaccaagtccgtcggtgacaaaggaggggatagaggactcgctccatctccacccagcaacgctgaccaccaagtccgcagcaccgtcgtgataaaggaagggatagggggctagcccccatcatcgcagcccatcgagtcatccagtgatggaggaagggacggaggactagcccctgtcttcacccaacgccgccgctgctaaccacgtccggcattcgctgatcggagcgcccggctgatcggcaacctcctccgctatcacggtgtcaccaccctcggccaaccggcaccataaccaccgttgcaccatcctgccttgccgccgctaccaccttcaacatcaccaccgctatgctgcttaccggagccaggcgagacccaccatgccgcccatctctaggaaggggactgaggaggaagcctcgtcgccaacccagcggacctgcaccctccggtgacctactccggcggtggcaaggttgaaaagcggtgacgatggtgaggatttaccagattggcaacaagccaactgcttgggactggatctgagaagaaaaggtggaaaagggagaagagagaaagggaaaaggtgaaagggggaggaggaaacagggaggaggtgggtggggacagcgccagcaccaccgccgatggtgccgatggtggcgaggggagaagcgccggggtcaggtcatcctcctcccgggtggccccagagagtgacacgggagtcaaggaggcgtgtcaatttttagagtttaatttatcttgtcattttttttgaaatttttgcataatcatttagttgacatgcaaaaatgggtggaggtccacccaagaaattagaatccatcttctggtggccggggtacgtggaggcgaggccattgtgccagagggtcagcgacatctacttggcgctcaatccggcggcacacaaggcgtgcatgctactagagcgctaccggaggatacaagcgcggcgcagggcggcaatggaacgctatcggaggatgcgagtgcaacgcagagttgatgttgtgcagtggcggcgaaaaaagaggttggtgaagcgcgcactcatcttcgtcttgccggccttggagacggccatgcttgggctcaccctcctcaggaacacgctcgtgttggattcgtacaccacatgatggaacttgtgcgcgtgcctctcgtatgttgcatgggtctattgctttcgcttatttgtgtgcatgacaagtaaactttttgtattattgattgttgattgattctagatacagcatcatgcagtaagcatggtcttcttcagagaaatatggaattactacatttcttcggtttgaattcaagctgagattatcagttctcttctcccaaatggaatcgaccaattggctgcacattaaatatcagaatattgacatctatcctcataattattttttaggaaagggcaggagctctgccaatttcaattaagtagggggagaaaacacaatttttacaacatatagcctcaaggctttggggggtcccctggagagaccaattgaggagggagaggggaggaggcacataagttaagaaaatgcaaagcaactaataacaagatgcgctggaaactcatccaagttacttggctgcattgaactccttgcacatgtctatgatggaatcaacaacctaaggcacaatattgtatttcccattaaagattataccattcctttgcatccagatgccccaagccgtgtagatgaaaacgccatcgaagttacgcctttggtcttttatcatttctcttctgcatgtttcccaccaacctagcatatttcctgagaaaaggaaaggggaagggcggaaggcatgtggaggccaagtttgctctatatgctgctccagacttgtcttgcaagggaacaatccatgaggagtggtgggcagtctcaggttctataccacagagggggcaaatctcactcttatcccatccccgaatctggagtttgtctgcagtaaggattttcctgtgtatcaatgtatcatgagctagccgaagaatttgcaaaatcctgttatcctcatattttctaaaatgtaaaaagataatgatactgtacactacacaattatgtcagctatggttcgatctgctatggttctcttattagtagggttgaaagtgattcggaccttttttcggattcggatagtttcggttggacatatatgaaaattttcgaattcagaaatgaattcggatatttttttcagaaataaaaacgaatatgatataggtgatatccgtcgaaaatcggataacgatcggatactatccggtatttttccatcggatatccggaattcttatgcaaaaacatgttttacttttctctacttaggtggaacaaaacaaaccatatgaataagatacaaggaatagcaattaacatacaaacaaatggaaaaattcaattctgaaaaataaccactcaaattttcaaaaactttcaattcaattatgaaaattttaaaaacttttaattcaaaaattgaaaagtttcagttcgaattcaaaactctcaactcagatttaaaaaattcaactcaaattctagaacgtttaattcaattttgaaattctcaactccaattgaaatgttcaacccaaaatttaaaatattcaaccaattttcaaaaatttcaatgtgcctgtgaaaatttcagtggtacacactaatttatttgtttcatggtaacataaatttgtatggaaaataaacacaacattttctatctcccccttgcccttacaaatagagataaaatttgaaaatattaatgtgttgtttttgaaaactaatggctacatctcttcctcgatttaagaagcttactttgaggggtcttgatatttcgataattattcgttaccgtatttgtttcgattcgtatttgctccgtaactatattcaataatattcgattccgttttcatatccgggtttccgattccgatttcgattccaagaaaaaaaatatgaaaatgaatatgatagagctagtttccgaccgtattcgatccgttttcatccctacttattagtggtgtgcatagattctccccatgcattgccaaaaaggcaagaacacacagggttaaagctggaactttgacatggctgtatttggtcaagatacaagacaaaattccataaatattgctgcagtgctatgctgcatcttcatatttcaggaacaagaaaaagagcacacattgatagatagcgcttttgacacattg

SEQ ID NO: 5716 - DNA, 3200 bp, Oryza sativa
atttgctcttttctaggattgaatcaaactttgtaatcctgataaccattttctaaatatatgtataatctgcttatactacaaaagaaataatatgtaaatctttcaatttttaaaaacactataattcggataaaacaaacacttatgtcggtgttgtagtcttatttcatatctaaacatcatgatgctcaaaatcgtacaagaaaaattaaatattttgtatgttaataatgtggtttttaaagaccaaatacataggctaatcagctggcgcgctaaccaacgcgttgatttttctacttaaaaacaaaacatggaccactagaatttttataaagatatggaggagaaataaaaaaacagggacattgagtatatggaggagaaccatagagaattttatgtgggtatggaggagaactaaaaacaaagggcaactgaattttaggatgatataaaagacaatcatgtagaaaacacaagtaatgaacattaaagaatgagtacaaacagtacatttaagtcttggggtagatatgtacaagttatcaatcttacaaatatatcaaacggttgttggcaaccgcgtatctatccatgcatgcaagtgtgttacaagaaggagaccaaacgattaaacagaagtaataatctttcgtaaaacactcgaactgaactaacgaatctcaacaaaatctcacaaaattaccacacaaacagaagaagaaacgagataagcactagaccgattgtcccattaatcatcaatcagttaacgagaatgataaaatgtctataattaagatccaaaagaactgacacagccgattgaaacatatacaattcacagtctacattctgcaacgcaaaattaaattaagacatacatgcaaattcatgatgcctcctagacctacgataattacttgtgaactcatgacgaagaactccttcatggccttttgccaggagcattcgttagcatgatcattttagaagccatggctggaagaaatacctctcgtaatgtctcacgttggatctatccaataacatgttctctaacatatgcacattatcgatttggtatcttcataccatgatccataatacatgatcatctatcaatatatgtgctgatcatctaatcacatttgtttcatatgtgatatttgattagggaatctttgaataaatagtaacatacaacataaagagtttcatgaatgaatcacatatttattaatcaataataataaaaaatacctgcagtctgagctgacattgatgcggctagcatgcctatggctaccaccacgccgaagaccacaacggcaacggcgatgagcacaagaaaaggatgcttcgcttctggcgtgcagagcgtgcacaacagcagggcgacatgtctatctcatgttttgcaaaacgtaaaaaccagtggtattgtacactttatagtcatttgtatccacaaacgaagtatacgcaagtgcactacaatgtaactagagatgaaaacggagcggatacggacggataatgcatataccatattcattttcatatttttttccaaatacgaaaacgaatacgtatagctcgaatacgaaaacaaatacggattatctcgaatataaataagaatcgaattgatcggactcgaatacgaaaacatttttttctcggaacacgaaaaccaaactcaacttctaatataaacaaatatcaacatatataattagatccttttatataaaatgtagtatactttataattttttaaaaaaacttaaataatattaatagtgtagactagtgttaagaaataaactactattaaaatctaaaaaggtatattgaaggtcatagagttataaagaaatggagtatgtctcatggcttctgcagatatcctaatagcactgttcaccggatatccgaattgttatccgtattcgacggaaaccccgataccatattgtcagggttacgaataacgcctaccctccatccttggatatacgatgtatactgatatggtatacccgcgcatatacgggtgtttcctgtatacgttaaggaaatctatcacgtaacataaacaaagtccacaattggaaggagtcctactcggacggaactgggtcgttaccatatcgtgtggggtccgatatctccgagttctacttggagatcgactaacccgcgatataaaaggaaccccccgggaggacctaaggcatcgaatcttaccgccaacacatccaccacagcctacgaagccagagcctacatgagccaagtcgctgggtgatctagtcgagccaactcgactacgatctcgtcggtatcgccgaatttcattattccctttgtaatatgtggtttccactatataatcccatatcaactggactagggctattacctaccaaggagcctgaaccagtataatcctcgtcttctgtttgcttgatgttgtattacgtaatcctcgtaccagcgtaccccaataccctctatatccggtctgcgggtatcccccgtcgacacatatttgtattcgtatctgggaaaaaatatccgtattcgtatccgtatctgaactatccaatccgaaaggtatccgttttttgtttttctccggagcggacggaaactatccgctccgttttcatccctaaatgtaactgcaactgaatgtataacacattcgatttgctatagtagtgcagcagtgggagagtagattattttaaacactctcgagagaattcttctcattatttgcatgtcgcttaaatagttaaaatattaaaaaaattgagaaaatatattagtatgtgatatatatatatatatatatatatatatatatatatatatatatatatatatatatatatatatatatatatatatatatcattctataaacattaagttaaaattcaaattttacaagtaaaaataataaattacattacaactaattaacttacatttatagtcaaatttatttttttctttcaacatgtagaagttaaattttgccttgcatatttgtgtagtaatttatcacatattagtctaccttgttggtattttttaaaaaaaaacataattatttgagagtgacatgcaacaacgagagtacataccctcgggagtttatagaatagtggtgtgcaaaa

SEQ ID NO: 5717 - DNA, 9505 bp, Oryza sativa
tgaatatgatagagctagtttccgaccgtattcgatccgttttcatccctacttattagtggtgtgcatagattctccccatgcattgccaaaaaggcaagaacacacagggttaaagctggaactttgacatggctgtatttggtcaagatacaagacaaaattccataaatattgctgcagttgctatgctgcatcttcatatttcaggaacaagaaaaagagcacacattgatagatagcgcttttgacacattgcgctttacacatgctttggtaatggctacaaaaagaatcttacagagcgctttcaaaagaccggcagcctaatccacttaaaaggtgaatggtaaaaactaatggagatcacaagttaaatagattattctattcagcaaaaaatgtcctaataggtggaaccttgagcctactgtcttttataactttacagtattttgaatctgataatcaaaataattccatatattaacacaaactgggttgtagttggtcaagtattatactagcatctgatcaattaacagaattccatgtgatcaatggggaaaatacaacacaggtggaaactattagaattcacgttgtcaacaatcgaacaagcacacacgaacacacggacacgaaagtggagggcaatcaactttattgatgtttctctctctgttacaagtattactttgccctcaacctcactattgtatttatacccacaataggatgtcctatatggatacatacatatatatttgatataagcctacttcattaataaggaaacagaagaatagaaggaggaggtaccgtgatcctcacgatcatagtcctacaaatccgactccttcgggagatcggtttcataacactcccccttgggcgaataccgcgctatacatatgcctcatcgaaactccttccaaaaacccaatgggagaaaaatgaataggagaaagagtacatagtacacgctacttatattgcactgttgcctcattaaaaacctaaatgtgagaaacttcaaagaaaactcactaaagggaaaaagagtacaaccataagctaatctactggataactctatcattcttcaagaatgatgtactaatctgcatgatcaatatcaacggaacacagtcagggaagtgctccccctgatttgttcatatctctcatcctactcataccgatgccatgcacaagcttctcaaaaacactagttggcaaagacttagtaaataaatctgcgagattttcactagtcttggtgagagtcaccttgatttcttctttcttttacaattcatgcatatagaagaatttaggtgatatatgttttgtgagactcgtcttcacataacccgtttgtatttgtgcaacacaagctgaattatcttcataaataatggttggagttggtgtgatattcagcccacatgtattctgtacatgttgtatcaccctcctcaaccacatgcattccttgctcgcttcaaataattctataatctccgagtgatttgttgatgtcgcgaccatcgtctgcttcgttgacttccatgagatggctgtaccaccacagagaaacacatacccaatctgtgacaatgctttatgagggtctgacaaatatccagcatcagcatatcccgtcatggtcaaatcttgataattttctaaagaataaaccgagatcttgtgtgccacgtaaataacggaagattttcttaacgccattccaatgccgtttggtaggagccgaactgaaccttgcaagtaggttaacagcaaatgcaatatcgggcctggtaccattcgcgagatacattaaagctccaatagcgcttaaatatggacattcagggcccaataattcctggttattttcctgtggtctaaatgggtcactctctactgctagagatcttactaccatgggggttctcgttggatatgaatcctttatattaaatttctccaatatcttctggatatatgcagactggtgtaacaataccccttcatgagtgtgctcaagctgcagacctaagcaatatttagtcttacctaattctttcatctcgaactccgtctttaggtaagaactagcttccttaatcacctgtgtggtcccgatgatattcagatcatccacatatacagaaataatacaaaatccatgttctgatttttttgataaacacacaggaatcatcattcttgatgaatccttttccttctaggaattcactgagccggttgtaccacatcctactggattgttttaacccatacaatgatctttgcaatttaacactgtatatgttgcgttttgtttcttcaggaacttgaatcccatcgggaactttcatatagatttcagaatccaatgacccatataaatatgcggtcactacatccatcaattgcatttctaagttcaaattgactgccatagatattaagaaccggaatgtaattccatccattacaggtgaataggtttcatcgaaatcgatgccaggtctctgcttaaacccttgtgctactaatctcgctttataccgaaccacctggttgttctcgtcccgttttcggacgaacacccatttatatcctacaggggatatccctacgggggtacgatcaacaggaccgaatacttttcttttattgagcgagattaactctgcctttattgcttctttccatttgacccagtctgaacgctttttgcattctgccatggactttggttctggatccagatcaatgatcttagcgatcttttcggcaaagtatatgtcgacaatagtagtctctctattgtatgtttcacctgtatccacataactggtggatatttcctctattctttcacattcctgatcttcattgtttcccgcaatgtttaagtcaggaatttccggtctcccagtgctagtagtaattgcgcgcgcattctcactgggttcattgccatccgggcatatcactgcaggtggctcatctacctggtgagctccttcactattctctggtgctgtggtattctgtccaatctgttgtttcgtaggacgtctcctagaaactttagtttggttgtgtgcaaccggtggtctccccctcttcctagaagttggggtagatgtagaaattaatttgaaaaccggttcctttgcgtcatgaggtatttctactctttccggtgcattcacagcaggtatatgagatttcatgatcccctttgggttagtgaaggcttctggcagattatttgcaattctttgcaaatcaattatggtctgaacttcctggtcagattccttagtacgtggatctaaatgtaggagatttttagtttcccactcaatttcgcggcattcgaccttctgtaggtactttcctccccctaatgccgggaaatgatcttcattaaatatacaatcagcgtattgacccgtatgtaggtctcctatcaatggttctaaaaatttaacgatagacggagattcaaatcctacatagattcccaattttctatgaggacccattgacgtacacttaggtggcggtatagggacgtatacagcacatccaaatttgtgcagatgggaaatatttggtgcatatccacgtgtaagctgcataggggatacaacattgtatgcagtaggtctgatttgaagtaacgccgctgcatgccaaacagcgtgtccccaacatgtagttggtaggttgctatgcagtagcaatggcctagcgataagcttaatcctcttaattaatgattcggcgagaccattctgagtgtggacgtgtggtacagaatgttccactttaattcccaaagccatgcaatattcattaaataccttagaggtaaactccccggcattgtccattgtaatggattgtatccggttatccgggaaactggctctcaaccggattatttgggaaataccggaatgatccagacatgggattaattggtccacatatgtttccctgtattcgttgcaagaatactggtgattctgcgttcacctttagattagagggtctaacgattaatttcgctgttgcacaatcagtgcaaacaaaatcttcttggtttgggaaatcgttagttcgtaaattatggccatttgaagttgagatgattcttgtcatcatccctagacctggatgtcctaacctatcatgccatattctgtatgactcaggatttttaaatattgttttcagtgcaacattttcgggttttatatgagtgtagtacaggccagatttcaaggaagggagtttttcaacaacagtcttacgatttccgtttaatttcgttatgagaagaaatttgagtttattctcatctttggtttctacatgataaccattagcacggatatctttaaagcttagtagagtacgactggactctggatataatagagcatcatttataatgatcttggtaccatgtgggagaactactgttgctcgtcccactccgacgatgtgtgcattgcttccggcaatagtagcaatttgaccagtctttttctttaaagtctggaaatacgtggtatctcaaaagatagtattggtggtacaacagtctaccagacacatctcctcttccattgccatagtacgtaacactattcttatcataaagcatttaaatataatcaattcatgaccatatagcaaaaattaacactttaagatagaaaaataaaaatctgggaaatatattaaactaaaagagttcactcaattattaagataaccattgctctgaaggagcttacagaaactatagttctgctaggaacacaaactaaatgcacacttgaaaaatcacctaactttagtctattacatagtctaaaatttaaagtaacttataatgtaggaagctaagatacaaattggaagacttaaatgtccccatataactgatcagagtccatgagatcatctgagagctttagctctgcgtctgctgcattctgttccatcttatcatcgatgtgcattgcaaccactgccttctcgtcgacctgcttgtcgatattcatggcagccatcttctcctctgagtgctggatctcaacagtgaagtgtgactcatgctccgacttcttcttcccatgcttctcttgataaagctcaatgagatgcttaggggtgcggcaaatgcgagaccagtgtcccctagtgccacacttgaagcatacctgatcttgttttccatattcaccactagtagagcccttcttagacttactgttctgatttcctttcttcttgaaagacatcttgttaactttgccaccatttttccagaaattcttccctttgttctggttattctggttattctggtttttccccttcttaaaggagctagcatttgcttcgggtgctgctgaacttccagtggggcgagacgtatgattttcagcaagtgtctcatcttctccttgcgcttccatgagcacggagactagtttagaatacttctcgtatttatcctggcggtattgcctctgaatattcacatgattggcatggaaggtggacaaagttttgtctatcatgtcagcatcagtgattttctctccacatagcttaagacaagtgacaatgcggtgaagaactgagttatattgctccacatatttgtaatcctggaaacgtaagtgaagccactcacgttttgcttttgggagcaaagcctttacttgatggccatagcgatccttcaatgagtcccaaaggacattcggatcttcctcagtcatatactcattcttgagagtagtattcaaatggtgcctcaggaaatgcagtgcctgatttttctcggctgaagttggtaaattattaactcctccagctgatgttgcaatagttgggtcctgaatgcagttcaggagtttcttagcaccaagcatgattttggcatctagtgcccatatcaggtaattctagctgctgactgctagttcagcaaaatctctcttagcaatatcagtcattttcctacactagtcatgcaaaattcaataagtactgcaagtaagagcatgacaagtgtgcaaatagtaaattgtctggttatccaaatttagtactgtgtcaatatattcccataattctcccaacatttctcagaattgttgtactatttatttaggtaccaaagtaattactgaattactaacccattaaatagtatcctgaaaaaaaaataaaacagctaggaaaataaaccataaatatgatgctctctcgtgtgtactaaatttcaaattatgagagctcatttcctaaaaaccatgtctctaggattctatggttgattcaaaaattaactaataaacagttaatatacagaaaattgaaagtacggaataacaaaaaaaaaagtgatattctctgtaatttctatgatcccgagggactattccgctaaaattccaaatccgcgtgtatcctgaaaattcaaggacatattcagaagtttgcctttttcgggccaaatttcgattcgagcccgactccttttataggcctaatttatactcggcccacctctatgtaccggctattcaaaggttaaccggcccgtcgggaccgtcgtcctgctaatggccttggcccatatgcggcccaacaagggcgccgcaccttatccaatcgggtggctagggttgaaaccctagcccctaattccaccgattcgatggcggcggcgggtatcccggtggctcatgcgggcgaggcggcgaggttgacggggctcgtcatcacggcggggtcgacggagctcgtcggcgcggcggggtcgatgatagaggcggagcggcggtgaggctacaagcagcaccgacgccggcgtggttggctacgggccgtatccggcgtccggcaaacgcagctccttgctgtgcgccggtggaatttggctcggcatgcgggtcggcgaggcggacggctatcggcggcgggaggccgcggcggcttcgacccccatcccagttgcgtgcggtagcgcgggaggcgtgccgtgcgtgccggcgggggggggggggatgcgggcgcggtctcctcagcgtctctgcgggcggcggccgttgacggcgagtgcgggcggtcgattgaagacccgtcgactggcttttcaagggcgaaccgacgacggaaagccgatggcacgattctgcggccatcggtgaagcgggtggccggcgacgcgtgctggcggcggcgagggcacgacggcgcatgctggcgtcatcgactcggtttcgtcgtcgtcaacttcaggaggacggcggcgctggcatgaggatttgggccgattcgttcggaatcggcaatcacgttagccaggtacgcgattcttcttatgtgcatcgcgattacaccctgaacatagcgtcgcccttcgaggcatcactagttctaaaccgtcgttcttgcagcggcttgtctgatccgttcgtgcgtctagggcatacggtatccgtgtatttgtttgcaagaaaagaaacccagcgcaaaggctgggaacagatctaatcggactatagcgataaccgcttctcgttcgatagatcggttgtacaagggataaccccatacgcctgtcgcgcatggggtggagagccgcaaactctcctgctacgtgcgccataagggacaaatccacatagtacaacccatcgatcaaacgattagcggagaaataaaaataacagaaaacgatctagcaagtttatcgttatccctatagaacgagattaggacagatcgatgttgacaatataccttggctgaagagcacctcgtgctgataacgtattaggattcacgttgtcaacaatcgaacaagcacacacgaacacacggacacgaaagtggagggcaatcaactttattgatgtttctctctctgttacaagtattactttgccctcaacctcactattgtatttatacccacaataggatgtcctatatggatacatacatatatatttggtataagcccactttattaataagaaaacagaagaatagaaggaggaggtaccgtgatcctcacgatcacagtcctacaaatccgactccttcgggagatcggtttcataacagaaaccatgtgatcaatggggaaaatacaacacaggtggaaacaacctcttgcacagtgcacacttttacaataatatcccaccctgatctatcttttttaaagctagctcatctcgagtaattttattgggccacatggcagtgttaaattttgagataaatctaagaaaattaagcataagaagaaatagccaaaagaaaaagaaaatacacaaatccaatttctagaggcttcccagtgatccatccttttgagataaatctagagaatatccataagaaaagaaataccgagaagcaaacaaaaggcacaacatctagattctagaggcttcccaaaatatatttcccctttgtaatctatctcgtgctggttggtttcgtgccagttgattggctgccctcaccaagagcgacacgtggcgagatacaagcggtggaaagagtgtcgggtaagaaacgctctctataaaactggcaagcgctcaagttatgacgttgaattgaaaaaaagagagaagaagagccactccatacgcgtagcttaggccacacagcaccacaacccaatagtatgtgattggaccagtgcaaacacgtaaaagagagggaaaaagaaaaaggaaaaaaaggaaaaaaatactttgtaaaattctttgcacattattcggggcatgtatcgtgatcatatatactatgtttcgagaaactaaaaacaataaatagaaaaactaaatgacataaacaatttgctcttttctaggattgaatcaaactttgtaatcctgataaccattttctaaatatatgtataatctgcttatactacaaaagaaataatatgtaaatctttcaatttttaaaaacactataattcggataaaacaaacacttatgtcggtgttgtagtcttatttcatatctaaacatcatgatgctcaaaatcgtacaagaaaaattaaatattttgtatgttaataatgtggtttttaaagaccaaatacataggctaatcagctggcgcgctaaccaacgcgttgatttttctacttaaaaacaaaacatggaccactagaatttttataaagatatggaggagaaataaaaaaacagggacattgagtatatggaggagaaccatagagaattttatgtgggtatggaggagaactaaaaacaaagggcaactgaattttaggatgatataaaagacaatcatgtagaaaacacaagtaatgaacattaaagaatgagtacaaacagtacatttaagtcttggggtagatatgtacaagttatcaatcttacaaatatatca

SEQ ID NO: 5718 - DNA, 21804 bp, Oryza sativa
tcgcgccgtcgacactcttcgccgtctgccgccgccgccccgcggtagcgccgccgtacgccattgctgccgggccggcttgagctgcccgtgcgcgccagtcgcgcgctccccgccgccgtccgatctaccctcgggtagatctcggggccatcggttcagctgcccgcgtggctgccacgtggctgccacgtgtgtgccacgtcgcgccacgtcagcgccacgtggtgcactgctccctccccggtccgtggacctggttcatcgtggaccgccacccgagtcactgccatgtggggcccgcatgttgacgccgcccctctctctccccgggattttatttattgcgcaataaatcaattaaggatttttctgtttatagtaaaaacacagtgaatcttctaaaattcatagaaaattcatctgagctccgtttaagcccattcaagtctcagtaaatcaagaaaaatgcatagaatccattaaaaatggttttgttctctgtttcagtagtcttttggcctgtttgtattgtttgctttgtatgtcgcttagattccggctctcccggtgctccggtgtactttgaaatagtcgccgaggttcctccagcagcagagcaatgcaagtcatacttatcacttgaacatgttgatcctatattgcaaatgctctattgttttcccttaaatactgcattgttttataatgttactatgggatgtatatctactgtacaaccatgctatttttgtactatgctcctttgttagcttgggatataacatgactagatattgcactagggattgcttagccatgtttagttcaactagcacacaatgggagaatcacattaatgcatagacttcaggttctagtgttggtgttggattaaagcctccgtcctggtgttagtcaattaaaatgcattaaatggtgggctatgggtgcatggttttgatggtcgcgtccatggcacttaaggaccggttcgcaggatgccctggaagaacttatcgtacttaccacaagccagcgtgggcaacggctgggcttgtagtgtagctttcctctagttgacgcatcgaggcaagggtgggcgtgatggagcggggcgggccctacgacggcctctgtcgcttccggattcacctaggcacgagaggggactgcccgttgcccgctggggacgggggtgaaacctgaggtgtggtgtgcttggctagagggggttatgtgaaaggtcctgtcacagcctctttccggtatgtcgtggtggcatgtcggcgcacggtaacgtgtcatggggctgtgtcttgtgggtacagttgtacacctctgatcagagtaaaactattcaaatagtcgtgcccgcggttatgggtggtcaaccagattcaccgtgattagtctcaccctagtctagtctaatggaattggttagttcaggtgaatggttgggcctgttgcaacgtggtgtagcgttggacagtggatgattaatattgattagttactaccactgttttactgctttgaactactgtttttaaatgctcgctttatgcaaatgaaccgctctacctatcctttggttatatcctgcatcatacccctattccggtatgacttgctgagtatagtgggtagtactcagtcttgctctattttcccccaaaccctagagtttgagtacatgtcagatggtggcttctccgaggagtaggcttcgtccgtgccgtcgaggatgcctatggagtggtgttcccgctgcagtccaagtcaaggcttagctccagttatcttttaatcttccactgcatttatgtaagacttttatgatgtttgtaagacgtggatctgtatgtcaactttgtcgtttgtgtaccccggccggtcctggacgggggttttaatgcgcattctgcttggaattctattcgggaatttctgggcgtgacaggcagggacgccgcgcgccggtcagctgtcggcaggagcgccgccgtaggtgcaatgaggtaggtcgctggatccggctggggccgagaccgtgagtagagatggcttgctgttgattttgcaatgtggtaggctgtatgtatcctgtatggtttgtttgagccttagttttttaatcttgttgtgtacatatcactacagcctataaccttattgagttattgttgtgcacaattgaaaatgttgcgggtgcgggtatgggggaatttctcacccgcgagcgggtgtgggttttttagtgggcagatttagtttcaatgggtgtgggtacggggagtggaaacccgtcgggtccatacccgttgccatctctagtcgggccactcgtggaccatcaggcagcggcgtcgctgaaggaggacgtcgccaaggaggcgtctgatgccgctgctgctgtggccacaacgagcggcgtcaacgttccaaaaaaggggaggaaattctcctccgtgctcgggaatcgtcggaagacacccaccccctcggtaagctctcctgtctgtccattgcgtagtcggaaagcttccatctcacatcatgctcgttatacttcaggcctcagatgcatctcccccgcctccgcgacggcaacggcttgtaacgcttggcgagaagtaagtggatgaatttgaggttttgtcgcttcatcgaactcttgcagtctgtcctgattgtagtctttcacagggcggcgcgggctaaggcggcgcaggacagatctggagggaactccagcgcgtctcccgtggtggcctcgacggatgtcgtggtcatgaccaggagccgtgaggcgacgcccaacggccctgtcggcgatcttgtgcctactcaaggctctcctgctgacatccttacctgggaggagctccaagtcgagatggggcgcatcctccaggccggagctcgcggcataagacatgagattgcggaggcaagggcggcggcggcatcgtcggcgaacgagcgcgccgacaagctggcgcgtgacttggcggaggttcgagaggacctccagaaaatgagggagctggtggccggcaacgagcggcaacggcaggggctcaagaaccgcatgtcagaactcgagaacaatctgtcggagatccgcggttcgctgcgggtcacttacaccggcctacactagctcgccagggagtgtggtgtcacgactaccatcccggcgaatcccgacgagttcttgctgacgacttcgctcgcggaactggcaacggcgatggaggtgatcccctccaagcatgcggccaggatcggggaggagacgtcaagcgggatctacaccgggacgtgcaacgtccttgcgtgtgtgaagttggcgcaccctgaacttgatctccagaagatcttgtatcagggggcggctagcaatgcgcgcaaggatgtgatggaagaaatcggcgacatgggggaatccattctcccactttttgaagagtagggccaccgctcctctgtaccccttaaccaatagcgttttgtaaaacttttgtcggttccgactacctttgtgtatgcaatcatcaccttagttttctttggcgttttgattccgggtactttgtttgttgtttgtagagatgtcgatgtcgaggatgtccagcagcgcgggcagcccaaattgccggtagtcgttccggcacttgagctcgagccgtatgtgccgcgggacggcatagaccaggatctgcccgaggagacggacgtggcgtcgactcctttaggttggttcttgtcgtttctatttcctttaccttgtctgtcttaattagcttgacttaggtgtttgcatgttaagcagacctcgacagtgcgcttgttgatcgcgaccgtcgcatccagtactggaggacgaagttcgaggtcgccgaacctgagaggactatattggaagtgaagagggaccgggctgtggaggcgctccgaggtcgcgaggtatggttcaactcgtacctcaggagttgctgcacaaccatggccattatctgcagagagctccgagtacctcacggggatcccgaggagttagcggctggctacatctcgtggttgaacggggcttgtgctcaccttgaaggcatcagggggcgtatcgacgaggccctgaagcaggagtgtcgtcgatcgagccgatacgccggagggcacgtgctggcgtgtatacgggatcatcgtccgcagttgcacctcgagttccttcacgaagggttttcccgttctcggaggaatcctgcggagatagacaacctagcaaagtcgatggctccgctagcggagaagatcatccagtcaatggattggcgttggccttcctggtagtgcttgcatatctgtgacaaacatcttaggaaaattgtaatatattttggaattctttgcgatctgtaagaaatgcttgtgaaatagaaaggaaatctatctaactaagctttcttactctggatgcggtgtgcacgagtgtcttctcacttcgcgacttcgatcagtcacttgagttatacactctcccgagcccccagccttgtcgtcggagaactcttctcggaagataaggctcttggaccttcgacttgccttagttgaacaagcactgatcctagcccctagccatgaagttggaaaaatccatttccgattacacggcttggttaatacgcacggcgagaactcttacacgaccagatcttacatggtctttcatctctgaaggatccgacaaggccttatcagctctgggcatccccagccgaagttcccttaggttcctcggaggccttgtcaagacggcgtaaagggacatgatgataggtttcaacgctaggtgtcgtatgggtaagggatcatcgggaaggggcactgtgattgaaatctgtgccttaaaacagactttgaagttgtaagatgtcttacaaatatggacactattgacttatacatagaatttacgcaattggtcaatgttccacgaatttgctaactcacgactatcgccgtctgcaatcttgaatgcgcccggccgcaagacttgtgtgatcgtgtacggtccttcccatttgggcgagagtttgtttcgccctgcttggctttgaactcgtcggaggacgtagtcgccgaacgaaagtatgcgtgctcggatgcgtttctcgtgatatcggcgtagggcctgttggtagctagctgctctgagggcaacccgttctcgatgttcttcgagtaggttcacgtcgtcgtttcgctgttcctcctgatcctcgtcggagtacttctgtactcgtgtactctgatgtcgtaacacggtagggagcatggcctccgagccgtacacgaggaagaagggtgtctccttgttggacgttgttggtgtggtgcgcacggcccatagtacagaggggagttcttcgacccacttcttatcatgtgacatgagccagtcgtagacaccagtcttaatcccttgtagtactataccgtttgctctctcgacctatccgttactctgagggtgagaaaccgaagcgaagcatatcttgactcccagtccgatgcagtagtcttggaaatcggcgctgatgaattgggagccgttatccattatgatgcggtgaggcaatccatatcggcaaaatatccccttaataaatttgatggcgttgtcggccttgatttcccccgtgggtgttgcctgtgttgcctcgatccatttggtgaatttgtcgatcgccacgaacaggaatttgtagccgtcctatcctcgtgggaatggaccgagtatgtcgagcccccagcacgagaacggccaagtgagagggatggtttgtagtgcttgcgctggtagctttgtgtgtttgctatgaaattgacaagcttcacaccgttgtaccatgtcgcaagcgtctttgagggtggttcgctagaaaaatccttgtcgaaaagcttttccgactagtgtacgaccggaggcatgtgaccctgacggagcgtggggctcctcaccgggagaccgcgctggcccccctttgccggttcggccggggaccctgggtgagactctaagctcccaatctgtggaaggttcgcgagacaggaagcacacaagacgccggcgatgtatacaggttcgggccgctgagaagcgtaataccctactcctgtgttttgggagatctgtgtatgaaggagctacaaagtatgagccagcctctccctcgttctaggttcccaatctggaaaagtccaaaaaatcctccatctaagtgggcaaggtcctccttttatatcttaaggggataccacatgcaccatttccctcttttttgtggggacttcccccaccttttcatacgagccactcggtccgcgagctgaaaaagctccgcggtagtctggggctctttggaggcgatcttttcgagcatgcggttgtgccgcacaccccccctgaacgcgtaaatcaccgcgtgtgtagggatgcatggtatggtgttgcggacttgacagaaccgctgaatgtacgagcgaagtgactcatcatcccttcgctgtactgcgtgcaagtccgcttcctcacctgggcgcggatatgtgccttgaaatttcatggtgaactgttggcacaaatcctcccaagagtggacagatgcgggtggcaagttcattagccagccccgcgcctgtcctttcagggccatgggaaagaaattcgccatgaccctgtcgtcacccccggcggcctcgatcccggtcgtgtagacctggagaaactcggcggggttgacgctcccgtcatatttttcggcgatggtgggccggaaccttgggggccaacggacattccgaagactcgccacaaaggctctacagccgacaccaccaaccgggggcacggagggctgattcctgcgtccgtgttgaggtgacactctggacgaggaagcgccctccgttgcgtgggtagcacgtcggccattacgccgccgctcgatgctagtgcgggcgtccggccccccacgcagatcttcccgggtcgaaggagtcgacgaaggagtggtggccgaatggcgaacggcagctgccgctcgccgcgcccttcgtctcgacgacgcggagccggtggtagcagcaccagaggccttggtggcggaggaccgcccaccagcatctaggcgctgccttgcagtcatgaccaatttggccacatcgtccagccaacgttgggctggagactccgggtcatgggcgacaggcgggtgacgtaggagcgcgcctgcagcttggagcgcgccctggggcgtgctgccgtcgccgtagacgaggaggcgacgctccccatctcgccgcccttctccacctcctgtggatgtcgaagtcgcggatccttcagccctctcgagcgccttctcccgcctaggactttggcgtggagggggcggtggagtacgagctcgacggcgtgggtttggctccccgtcgtcaccgctcatactcggggagaggtcgtgcgcctttgctggctcggccattgggctgaacaggaaaagcttggcgcacacgaaggagtgcgagagctcagaagatcactcgcagagccccctacctggcgcgccagatgacggagcgtggggctcctcaccgggagaccgcgctggcccccctttgccggttcggccggggaccctgggtgagactctaagctcccaatctgtggaaggttcgcgagacaggaagcacacaagacgccggcgatgtatacaggttcgggccgctgagaagcgtaataccctactcctgtgttttgggagatctgtgtatgaaggagctacaaagtatgagccagcctctccctcgttctaggttcccaatctggaaaagtccaaaaaaatctccctcatctaagtgggcaaggtcctccttttatatcttaaggggataccacatgcaccatttccctcttttttgtggggacttcccccaccttttcataaatggacggagatttgtatcgttgccgtccgagtcaccttctgatgggacggcccacaactacctccactttcaccgggagcagatgcgacgtggaatcgtggccgcctgctgacgacatgaccggagtcagaccagtcacgtcggtcattcttgtccaccacatgtcagcttagcaatctacatgttcgcccttcttcacacaacatcttgcttgtaatggttaggatgaagcctggcatatatctgatcaggactaacgtgccatctctgggaggtaacacgctagctccagctggggacgagcgcctagaagccctcgtcctgacgggatggggtgaggcgtgcgtcagaccgcctgtcgccacctaacccgcgatctgaccggtctgtgactggtcacagaccgaataaatgagtgcactgcactgcgttacatgcggcgtgacacgctcacccaaaccgcaataaatgtggttaggtgagcccggctgtgcttacctaacccatacacgctgagcgaaaacccacgaggggtcggggcgcctcggccctcggggccgaggcgggtgcggcccgaccccctcggggggactaagaggagggcgaacacatcaccctcgggcccgacgtcccccgagggtgccaggccacgtgggcgtttgtgtctgcctcaaacctctagtcatgatactcctgatcccatgtcaccgacagacccgcagaccccttcgtgtatgtcgaggaggaggtgtttgtcgtcgtcggacgagacacatttaagaagtacctcgtttggcgccttcttgtatagatcgttgccgatcatatagtagatttttgcttgacgagttattttctcggcttctgcgtcgtcctcgggcaactcgtcactgcttatgaatttgatgagtggggtccgccagtcatccatggtctcgatgtcggcaacggcgcgctctgcctctgtagcccccgagcttatgtcgggggtgactgggctatcttcgtcgtttgcctctttcactgatggttttgtcaggatgtccagaaaggtgccgggttcgagtggctctcgtctggacgcacgccgtgctacatcgtctgattcgatgttgtccttgcgatatacgtgtcggacctcgatcccatcaaatcttttttccagcttcctgacttctgcgagatacttggacagctcagggctagagcatttgtaatctttgtgcacctggtttgcgactagttcggaatcccctttcacgatcagtcgcttgactccaagtgcagctgcagctctcatcccagcgagtagtccttcgtacttggctgtgttgttggtcaccctgaagttaaggtgaattgcatgcttgaaatgatctcccgaaggtgatgtcaagatgaaccctgcacctgctccttggctgttgagcgcgccatcgaacgccattgtccatgtttcgttgtcggtctggctgtctaacctgttttcaggcatagtccaatcggctacgaaatcggcgagaacctgggacttgatggttgttcgtggtacaaagtggacgtcaaactggcttagctcgactacccatttcgcaatgcggccgacaacgtctttgtttctcacgacttcaccaagggggaaggcggagacaactgtgaccctgtgggcttgtaagtagtggcgtagctttcttgacatcatgattactgcgtagagcagtttttggatctgtgggtaccttgtctttgcgtcgtgtagggcctcactgacataatagactggtctctgcaccttttccctttcgacaacaatgacagtactcacagagtagggcgtggcggcaatatagaggaacaactcttcattaggttggggagcaacaagtacagggggatttgacaagtagcgtttgagtgcgatgaacgcctcttcggcttcctgtgtccatacaaatttgtcttgcttttttagcagtgcgaagaagggttgtcctcgttctcccatcctagcgacgaacctacttagcgccgccatgcatccggttagcttctgtacttccttgagtcttgtgggcgacttcatgttctcgattgccttgatcttctcgggatttgcttctattcctctgccagaaacgaggaatccgagcagtttgcccgacggtaccccgaacgtgcacttctcagggttgagcatgaggcgatatcgtctgaggttgtcgaaagtttcccgtagatcgtcaatcaacaagtcgcctgtcttggttttgacaacgatgtcgtcgacgtaggcctcaacattgttacccagctgatcgctaagtgccccttggaccgtatgctggaaagtgttccctgcggttatgagtccaaacggcattttaacgtaacagaatacaccgaatggtgtgatgaatgatgtcttctcctcgtcctcttttgccatgctgatttggtggtagccggagtaagcatcaaggaagcttaacagctcgcaaccagctgttgagtccactagttggtctattcgagggagagagaagtgatccttggggcactacttgtttaggtcggtgaagtcgacgcacattcctcacttcccgttagacttccgcaccatgattgggttggctagccactctggatggagtacctctctgatgaaaccagccttaagaagtctatcgagctcttctcgtatggcctgtttccgatctggtgcaaatctccgcagtttttgctttactggcttggcatcgggtcgcaccatgagtttgtgctcaatcacctccctggggacccccggcatgtcggacggataccaagcgaatacgtccgcattgtcgcggaggaaggtgatgagcgcgagttcctatttctcattcagtgatgccccaatcttgaccgtcttgtcggggttggcactgcagagtgggacgattttgattgcgccgtctggtttcggcgtcttagtcgttttgatcactttcttgggtggctcggctgtggcgggtgggctgggagtgtgctcgaccatgtcaaggctccgcttgttgcattggaccgccagctttgcgttcccttggatagtgattgttcccttcgggccgggcatcttgagcacctgatacgcgtagtgagatgcggccatgaacttcgcgagtgccgttcttccgatgatggtgttgtatgctgtgtcgatctcagcaacatcaaatattatctgctccgttcggaagttgctcgcttggccgaaagtcaccggaagtgtgatcttgcccaatggcttggacgaagattgaggggtgattccatggaagtgttgatcggtaggtgtcaactcgcttcgtgggattcccattgcgtccaaagtgctagcgaagagaagattgatggagctgccgccatcgacgaggactcgcgctaccttgatattccgaatagtgggttcgaccacgatcggatatcgtcctggtataacagcagccttggggtagtcttcatctaagaactcgatcttctgttcagaccacttcattttgggtgcagccccctgccatgtcgaacaaacctcacgctccacttttttgtattctcgctttgaagagtacgctgtgggacctccgaagatgtgcgagacatgaagatcggaatctgggtacgcggagtctgagtcctgagtggttgcctcagttgccttctcgactacacgtactcgcttgcctttctccaatgccagctgcctttccaacgattttttgaagatgaggcactcctccagagaatgtctgtccgacttgtgtatggggcaccatattctctttgtatcactgccttgtgggtctgggtgtttgggcgggcgctcgtattcagatgcaaggacttctgcttgagctttcctattcccactcttgtcgcttttcttcttgcttgattcgggtgcgtccttggctggcttcttctctcctcccacctttggtttgtcgtttttgcgtctcagcgcgtcgtctgcatgggcacatcgatcgacaacctcgaacaaccttcgagtagtagtgattcgccttgttgccaaatcctgggtagtatagcaatctctgacaccggttttgaaagcgcggatcacagaggcatcagtgatattggggatcgtatttctgcactcattaaagcgccggacatagtccctcaaagattcaccctgattctgtgttaacgcgtgtaaatcgttttcgatcgcgtggcgcttgtaagttccctggaagttcgcgatgaattgttgccataaatctgcccatgaagagatcgagtaaggtgggaggtgcatcagccatgaacgcgcagaacctttcaacgttgttggcaaatagtgcgctaatgcgttgtcgtctgccccagcagcgtatagtaccgtggagtagacctggaggaatttttcagggtcagtacttccatcgtacttctctattgcttcgggtcggaatctctcgggccatcggacatcacgtagagaacggttgaaagctctacacccagcgctgggggcagtgggttgtcggcgatcatgtgtcctccatggacgtctatcggatgacgaagacaaagattatgatgatgatgatgatgacgatggctcactcggctctggcgtgcgattccgagggcgacgttcaggttctcaagaattctgtcgccgtccaccattgttgtcctggcgccggtcaccattatcatcaccttaatgctgacgcccccgaccgtcatcgtctggtgtccgctgcttgcggttatcgcgatcgcggcggttgtgacgatcacggtgatgttggtcctcgttcgagcggcctcctcgctcctcgttctcgtgacgtcgtgaagaaacacgatgtcgggaacgattctcgttgtctcgcgcgcgtcgtgcttctcggcggccattcagatggtcgcggagatcgccggtgccgcgaggtggaggggtagctcgtgcgggcgacgtccgctgctccggtggttcactgtcggcaccgccagctgtcggtcgttccggttgtgctctggtagcagctttctcgaacgcgttactgagattggctacagattcccatagtcgttccgtccatcgtgcgagatcatcattaagcacaggtcatagggagcttctctcagtattgcgttgacggtgccgagatgttgggctggcgtggccgtctgattctccgcctctgcgttagcctgtgcagacgtgctagtcccaccaatggcaaacatgtcacgtggtgtactggaagatgacgagccatagtcttcgagcaagtgtaggactgatggttcacggggattgatgtcgattactccaatgaatcgatctgaggttatcgtcgctccttgttccttgtttgtatcctcgagagaggttcctgactgctggaccttaggaggtgtcgtcttcatggcgcggaaaaagaccttgcagcttgagaagtcgtgattcttcgtcttgtgaataggacaatagacatcacgagttggagaagtacgctggattccacgctctttgcaagcacggatttcagcttgtacattgagaaaaacccagcaagcttgcaagttgtgcttcctggacttgtggatatgacaccaggacttggtgacctcggaagttgtcctcctcggctcgcagtccttgtcaaaaggacaaggctcggccgcactaggaatcttctcgagctcgtatgacgtcgatgttccgttctccgccacggtgggaggatccttcgacatgggaccgtccgggtttataaccacggcgttctcgtttccggttattgatggactagccgagattggcaccgtggtgtaaaccaggaagacgatttcgccgacttgagtccacaccagcattgttgaagcagggattccttggatggggccggtgtcgactctgttgtcgacgaagctcgatgtcatagtagtagaaccttgagcaccaagtgctcctacctggcgtgccactgtcgacggtgggtacccgtagaccggatatagagggtattgggtacgctggtacgaggatctacgtagtatgacatcaaggaaataagagacaaagattatactggttcaggccccttaacaggtaatagccctaatcaagttgatatgggattatatggaaataaccacatattacaaagggaataatagaactcggtggtaccgacgatatcgtagtcgagttgattcgactagatcacccggcgacttggctcctgtagtcttcagcttcgtaggctgtggtcgttgtgtaggttatgagattcgatcccttaggtccctcgggtgtcccttttatatcgcaggtcaggcggtctccaagtaggacttggagacatcggaccctacacgatataataacgacacagtcttatacgggtaggaatctttccattggcggacttcgtgatggatttccttagcgtgttcagagaacgtccgtatatgcaccgctataccgtatttccatatagcatacatcaaagggtagagggtataccttatccgtaaccctaacaattttgtccacatagctcctctaaatactccctccttccctaaatgtttgacgccgttgacttttttaaacatgtttgaccgttcgtcttattcaaaaacttttgtgaaatgtgtaaaactatatgtagacgtaaaagtatacttaataataaatcaaatgataggaaaagaattaataattacttcaattttttgaataagatgaacggtcaaatattttttaaaaaatcaacggcgtcaaatattttgggatggagggagtatttgttttgtcttgaaattatccttggaccctcttaatatgccatatggctatttctagtcaatatttctattaaaaaaatatcttttttgcccttaatttgtatacaactatatactagaaaagagaaagtcaacatgaataaacaacattacaacattacatatgtacttcccattgtttcaacatgtgcacatgaaacttaagcaattgctatcgtatacacttgctggtacataatttattttggttttacataatatactatgtattatctataaaaaattcaagcatgcaatttttctcttatatatgtgaatgataaggggtataagtgtcatttatgaagagagttgttggttcaaggataagtttgaaataaaataaaaacttgaaggactaatatggatagattgaaacatcaaggactaaactgagccttaggtgaaacttggaggatcactttagctattcaccctttaaaaaacttaaatcaacatggagaagaacaatggcacaacacaggaaatctgaagtagtaccattttccttcaaattcaaacatatttagaatttcggggaaatcatcgcgtttgaatttgggtggtggaacgatcgagcgaacatgtgggccgtgggctctaccatcagggcccatcaccaatggcgaaagcccagcccactcggctaaaccccaacacgcacacttcgcttccttctcccccattccccttcctcatctccgcctcgcctccaccggccgtgatctcgccgccggcgccgccccgccgcccctgaggcctactagtagcgacctacaagtaccctgttttgtaccatcctaggagcgaatcctccccctgcggcagcggtagcagatcgcgatggccgcctcggcgcctcctccggccgagccgccgccgccgccggcggcggcggcggcggcggcgacgaatccaccggcttcgaccgcgcccacggtctgtatcgatccctcgtgcgtattcgtctggcgcccgagttctgacgtggttgggtgtgggcgatgatgcaggaggacggggaggtggaggagggtgccacgccaccgagaacttctgcgttggggacggcgaactggggtaccgccaccctcgtcggcgtcttcgccgggctgctctacggcgggagcaaggaggccagcgcctctgtcgtaagttgctactctactctatccgcctcctgctttctatcattggctctgtatgataaattgcgtgaaattaaaaacaatttgaacaaatgaatggccaccagatggaagatatgtggttgcatcgactgataactattttattggtcttttgatcacagctcacagatcatttagacctgaaattgtagagctagagcagaattgagaaatttcctttttatcgaaacaagctaccaatctatataaccaagtgggtactaaccattaaggtctcctttagaactgggattctagaattttgattaagataattaaccatgtccctattttgaggtgaacatttatatccttttttcctgaactccttacaccaaataaaatgaaatgtcttcagttacaacattattgtgctgtattttacagagcaaagacgctgaagtgatgttgaagatggggagcaccacagacaagcgtgagcagtatagattgatgagagatgcaatggagaaaagattcatccgggttgccaaaggatcgctagttggtggtgttcgccttgggatgtttactgcaactttctttggcatacagaaccttcttattgagaaacgtggggtgcatgatgtatttaatatagctggagctggctcggctactgcagctgcatttggacttatatgtatgtatctcttcatgtccagtttatacttttgtttagatggtggaaattttggtcacctcaaataatttgaagtgagcttatgaaatatgtttgtgatactgtgaagcctgaattgcattcaaatattcaattactgattgtaatagaataagaatagccccagtcatgttttgaaagaaaaatgacatatttttgaagaaaacgaggttatcatgtacccgtaatatgtatgtaattcagtatagacaatcttgtgtcgtaagtactattattttggggaaagtcgtctgttgtagtcatctaccagaggttctgaaggttagtaggttatattacttgtcttcctctataaggtttgcttcctttataggccttctaccgctgtgagcttctaggtcctagccatatgatacctgaaaatctgattggtggaatagacttgctaagatatatagccctacttggatttttctgtcaccatgatgtgctcgattttttcccctgtaccttgaaggatgtagattaatgtaagaagctcttaaaataggttccttgaatatctaataaatcctgttatctttgactttggttttcaatctgtgtgctcagaaattattactacctgtcagggttaattgtgatctcattgccacatgatatgatgagataaatcattgttttatgatattgtttgtattttagttctgattctgctgtgcaaatagttggttaacttcattaactaaggtagccctcagcatccttagtttatcttaactgatgatcgttcatcttcagtgccaggttcaccaatgtggcgtgcaaggaatgtattggttggatcagctcttggtgctggagtctgctttccccttggtattactctactttctattcaccaatgaaaaatggtcattttagttcactcgaacatgcacatcacttgattgaatatggtcctgataagctgaataactgatatttagtgtgttccctggtagtactagattgaatcatgtgaactcaatctatgctttaacaactttgagagtacatttaattgcaggactcttggacatagttgcatttcatgttgggcaggatgcatttccaaattggtagttcttcagcttatattgcctactgatggattaccatcgcttagccctgttcatcttcagcgcaagggtgctcgatctttctataaacttatgaacagtctcaatgaggtttgattgggatttgggacttgggaatcatttgccaagccatttgcatataagaagtgcatttagcatttgcatataagagctactactagcacactgtcatcaattgccaagccaacaactttatgcttacacgatgaccgtgctgtgctgacacattctaggatgctggtagcttgattttttgttcaataagtcagccttaaggaattcttttacaggttggatacagttgaagctggcagagaaagccaatcttgagatggcaagttcgaaaccaacagatttggtggaggaacaaggtaatcaaagcggcgttggtgccgctatagaacgacttgggcgcagcctaaagaagtaaaaatttggaccatcgaaggaccttttttttttctcataatctgtgtgcgttcctgaagaccgcaggaggaacctgtttcatgggctgcactacttcaattttttcttctttcatgtgcctcacgctgtagtgctgtcaaactttgaagcagtaacagcaagggccacacggagcctccgttgtgggggaaaaaagagcatttttgataaaaatatcgtattcgttggatgtgatgatgcttgtgccattacagtttgtgctgaatttaccctcggtaattcttcagttcacgaatactattttgtacgatgtattccttctcatatgatagatcagccaattctcatgatagaaatatgatagagcataatttaaccacagaaatatgatcgatcagctaattttcatatagtcagaataaaaggagcaacaaaattatttaagtttaaaattccaatcaacaagtttacaacaccagttttatcaggaacatgattcttgtatttgctgttccagaaaccatcttataggttcctacttcgttgcggacttttgtcgtccatctggaatagcgaaaaggacaattggtttggaagaccggataaatggagcatcacacctgtaataccctttcctttcaagctgtatgatttctccttgtttgagattccgcatgtttgcgtctccaagagccggaaactcttggcaagtgcatggattaagattgtcaaggaaattatcatcttcttccagctgcaaaaatgccacagcaatatttaaaatactagcagatgatgctactcaatcatggaaggaaaacatcgatggattcatggaagcgaaaactcagagacatcatccaatatgtaaagaaattaataaagaaactaaatctcttctagatcgtgctccaagaacaagtatattgaccattccttcacaagcctagcttttctgatactgtgatacactagtattgggtttcatacactatctattgaagaagtctaaggtgaacatagtcaaacttaacagactaagggcctcctctgggattttgaaacataggaaagtctcaaaactatcgtttgattagcatacaggaaaaacgcaagaaacttagacacatgaagagaaaaacatgaggtgaaacctcatgcttattttccttcaaaattactctaggaaggtccatttcataggaatttcaaaggaattgataggaaacaatcctttgtttcaaaaggactagataggattattttccatatgataaaatcctctaaaattcctatggtttttcctttgattcaaagagggcctaattaggtattaatactacaaaattatagcaaaagcagtagagtaccaattgttcagtactataagaactctgtttctcatgtggtattgcatctgtacgatactagcctactacttaataaaggaacttcaatttaacgtgttacctttttctttttgattaggtagtcaaactctaccaacgagagagatacaagatcttcaatatctggcagccacgttagctttaactttgtcatcttaactgacccctcaagatggagttccccaagcagttcagttataattccattctgtgtcttgatttctttgatgatagcatttccccagtccatcagagtaacttcctcaccgatgctaataactgatgcatcagcactctccaaccaaattttgtttgtgaaggttgtagccttctttccagcaccttcgtatttcttgtgcctgggtaagactcggatgaatggttcctctggaccattagtaagagtgaaaagcacacgctggtctttcagaacggcagtatgccttccacacactggatcaattatcttcttgttgattgtccagagtttatcccactccataagatttagatttttagaggcacccttgagaaataaaaggtcaaagaacaaatgaattacgaagacaccattaaatatagctatgaaatcacaaacggtaactcattagaacattacctgctcaagtataaattgtaccaaagcttcaaccttcaagccacgacgtactatgccttgtacagtggggaagcgtggatcagtccagtcctccacctttttgttttgtacaaaccagagaagcttgcgtttgctaagaaccgtgtaaaccatattcaacctgctgaactcatagatttctaccctccttaaccccatttcttgaaggatacgatagtactgtgcattccgatcatggtattcacttgagcggagagcatgagtcactccttccaatgcgtcgacaaatggacaagcaaagtcataagttggatagaccttgtattttgagccaatacgatgatggggatcagtgttgcaacggtagtatacaggatctcgaagtgatttgttagggtcctgcatgtcaagtttaccccgtacacaacactgcatacccctttcagttccattgatcatctctttccacaatgacaaattatcctgaacagtattatttctacatttagattccacaccatccattctctcactcctcatttgctcctttggtgtatcatcaacataagccttcccttgcttaatcaaattttcagccatttccattaactgcggaaaataatctgatgtgtaagtaactatatcatattttattcccagtgtttctacatccttcaggacgttctcaacaaattcattgctttctttcgaagggtttgtgtcatcaaatcgaactatcaggcgccctttatatctctcagcaaagtacttgttcaaaagtccagcctttgcatgaccaatgtgaagatacccactaggctcgggggcaaagcgaacgcagacctccccaacttttgcacctgggagatctacttcagggattgagatattctgctttgaatcaggtaatttctctttcaggcttggtgcaggagactttcctatccccctttttccaacataagcagagacaacttcatctagtgtgtctgaatagtctgctatgctgttgaaccagcgaacaaggttttgatatttcttggacctccttagactttcccatcgttggcctgtccctaaataaaggggtgccactccaaagtaagtaatataaacatatagaatgataaaatatagattataaaagaaaccagacaattacctgcaagatttgaccatactacaatgtcagcaattgacaagccataactaaccaaaaaggttcgtgatgctaggtatccatctagaaatgagcaagcagcttcaaattcagatcctgaaagaatgactggggcgtagtcgagccattgatcaacctaaacatgcataataacaggaactatgaatactcagacaatcaataaattcactgagtagcaccagcgatagcaaatagtcaaccagaacatacatatgctgcctgaatagcatcctgaccatagaaactggt

SEQ ID NO: 5719 - DNA, 12690 bp, Oryza sativa
  unsure (1)..(12690): unsure at all n locations
atgcgaccaatatagttccaacaacagctaatagtacagaggtggagcttcatggaggccaacctgggtgttgccccctcagctttggcagcaaacacatatatacttaacaagtatctagtaagaaaatttattttctgctcaattgattagcaagtgaagagggcagatgctttcttggaagtttggtgttcaaatcctgagaagtccattctttttcttcagtttaattgcttactaaatcattttcctcctatggatgacaaacatttttatcttaataaaatagctctcttaaaacctgttaatttacaataactttgatatgttgtcttttataacttgagtgatccttttccacctgtttaacagctatacttaggtataacatatattttttcttaacaaaaacatgcttggaaattattttacaatatgaatagcccttctacaaattctacttctgccattaccaacatttccactctataatagctggccccatctagaatctctctcaagctccgccactgcagtagtacctttgcaaatcgggcctataagaacgcgatcctcggccaacgaatcgtcactgcatcggcatctggttcagcaaaactgcgcataacaaagaaatgctaagtttcaaaccaactgttgatagcaagtcgagaaggggttctatgtgcaagagtagtacaaaagccactgtttctctcttctgcttcttcttcttcttttgcaaaataggcgttggagatgagcgcgcattacttctacccgagtatagattcaatagacttgctcgaagtgtgtgacttaagcataaaagcaataaaacgacccccgtatggcttactacggcattaggtattctcgaaaatgcgatatggcgaaagcgaagactagagaggaattttaccccacacagttacctcgcgcggaccagctggaggcgtgcgcaggcgccgctcacatacgtacggcggctgatggcggcgcctacgccgctgcccccatcggggaagggcggccggcggagctagctgctagccaacctggagggggggggcgctcccacggcgaggaaggaaaggggcggcggggttgtccgtggcagcggtggaatcggcgacggtgggaccgcgggatgcgcggcggcgagggtgagggcggcggcggcgcgggtgtggacgctgtggcggaggggtagtagcgtttcggggaaatcggggagggccgttggatatagacatatagtatagagcatatgagcgttagaactgtaatacctaaggcagcgtttggctaatgggaaataatttttcacctaccaaaagatatctttaaattctaaccgttcattcaccctcttccatttaatcataacctttcattcatttctcaattctaatcccaccctctttcccattatccaaacacaccctaatagcgtaagagcatcaccaacaaaagtgtataatccacctctaaatttttatttttgagttttctaaaccgaaaataggaagtgaaaaaactaatattttcaagagaaaacctaaatttatttttcaaaaactaaaagtgaaccattctattaaacttaaaaaaatcattgttttgctccgtaccgtgcgtgagaaggctcgcgcagcccttcaggccaaccgcgacgagggagagaggggctggcgcctacccactgtctcgcgagcggcacgaagaggcggtcgtacaccatctttgctcttctttacgttgccgccgcctccactgttaaagccgggggctctctctatcataagatatgggtagagtttaggcgaggtgacaccaccagcgatggagccctggcgggatcaatgacagggaaactcttccattgccgcataactcacctcctctgccccgcctgccccgcttcctctatgcccttctccccgtatccccttccttgtagatcgtcatcgtgatggacaaccgcgtccacgagcatgtggttgagaccacggtgcattggacggcgtgcgtgtcgagccaccgaggtcccgccactcatcggattggattcgtgcgtgccgggccgccgaggtcccgccatgcgttggtgtggtaagaagacgaaagaaagaagaaacaaaacgggaaaaaagagattgatggaaaatgtgacggcagtggcacgatttcaattttgtataatttcattagcatggttacgaatagacgaattgtaatggcatatatttgaaatggacatatttgcaattggagtaaattgcacccatggtacaccaacttggcaagtgggtgcgatatagtgcaagaagttgagaattgaacgtccgagtgcaacaacttgataagtgggtgcgttctaatacaagaacttgataatttactccctccgttccatattgtaagactttctagcattgtccacattcatatagatgttaatgaatctagacataatatgggcaatactagaaagtcttacaacataaaacggaggaagtagtattttggtgcattaacttggctaagcatatgctaggtgatttttttttcacgatgtcaatataacattacataatcctacggatattaccttatagtattgaatgtaatctttaagaattatattgcacatataatttacatccaattaccttttaagaattttttgttttcttcaccttctcaaatatcaactaaatataataatttatacattcagtttaattgattttcagttactagttattatgataccaatataaatatgcacccaataataaagttgccacataacttcttaatttattgtatcaaaatcgtacctaccttacaaagttgttgtatttatgtgatcacttataaagttcttatactaaattgcacctacctaccaaattgttgcactagattgctcatttatcaagttcttacaccatattgcacccacttatcaagttgatacactagcggtgcaatttactcttgcagttgcatggatcaaattaacccatttttctctgtttttctttttaaagcagctatagataatccctctatcccaaaatataacgcacaacactactaacacataaattaaaaaaaaagaaattaatcgtctcttcagtaaggtcacctcgatgtatgcaaataatatgaaagtaatatgattggagagttatatataacgagacatggataaaaaatgattataccttatattaggtatattttcagagggatggatgaagtatctatctgttcaaccttgaatacttctagccttcgctaggttccgtctgatcaattgatctcctccactaaaaaagatgggaaaaaaaacgatctataatggagacagcagacaggacatgaagcagaaatcagcagccccaaactcccttgctttggcatgtttctctacatagtagttaaaatgcagaaaaaaatcggatccctaacccgaatatctgcagagatccgacggtataacatgttgaatattcatgcaagtacatttggcatgttaagcaaccaaagagtggtgacttgagaagtatcaacataggatttcacattcacaagctgtatggcatagacccacggttcccttgagaagttacacgaccagtatcgtattatcacactaagagcaacaggaacaaaaggatagtgtagtgtcttcttttcatcgatgttaggaacaagttccagcctatgtcccgatagaaacggaagggtgcatgttcactgttttcttattgaacacaaactacataactacagcttaatgtggcaaggttcactggctgctcgattcatcatgctcttgttgcatctggttcagtacaaatgccccttcaaggttcttgtggacctcggctttgaacttctcctccttgtttcccctcttaagtttcatcagaatgtcaaactttgcgaagtcttcaacaacctgattgataaccatatcagaaataagggtgtgtttgaggagaaggggattgaggagattaagaagatacgtaaaacgaggtgagctattagctcatgattaattgagtattaactattttaaatttcaaaactggattaatatgattttttaaagcaactttcctatagaaaatttttgcaaaaaacgcaccgtttagtagcttgggaaacgtgcgcgcggaaaacgaaacaaacaaactcactctctcaccctctcgaacgctgcctaagtgaactataagctcagcattactaaattagatacaaaaaagaaaagataatctttggatggatgaattcacaatagctgacctctgcctttgcacgaacgatctcgagaagttcatatggaaacagggagtttgacctctgctggattgatttcacagcatggtctgcagcatctttgactacaggatcatgtactggaacatcacgccacccaggctcatgtccacctgaaatttcattgagttcaatatcaggtttagaagttataacaatatctcatatacagcacaagtgtgtgatcaactttcaacatccatgaattggcacatgaagaaactatcacattctaattagccactttgtatcatatgtgttgacattgacatctgccacgtttcactgaaaggaaaacatattcaaataggtagaaggatgcatagtgtgccttggggtgctcaaccctctttaaactggtagaaggaaaaccaggcaccaggcttgcatggcatcatgtcagcatttgatatatgcatggatagtgtgtaattatgcccatttgttcacagtttagcatgattatggtaattacactcttacaaatacaatataattagaccatgtctttactacctgtagatgctgggcacacctcttccctccctcaaaaatattatggaatgcaaattcttatgaacaaatatgccagaaggggaggaacttcttttgctttaacccctgtggcacaggtgtaacattctgctgtctgaaactagcttatgaagaactgacataaacatatagacgtacagcaaaacttctaacactcaaacaaataattagtgtgagaatccttgagcactctttctagctggtgtggtgatctgattggaattcaaaatgcactatataaatataagcatgtaatgctactgctatccatgctacaaatgagattatgcccagtccgctgcagctcacatgaatgcaaaacaaacattatcacaggtaccctataatagaattctacaagcaataaaacaggagaatgcactaactagacactgtatgttgtgaatattattttctcatgaaattttacatctacataagttcttctaaatataccagtaccacccaatgatacattaggtgataatgcaatattgaaacataatagtgggattatgatgcagacatacagggtgtgtgtggtgataggcaagcaaatgtaatcaaatcgtcatgcactcatgctcatgcagtgaggtgttgcatcaatctgatgggattcatgtaatagtttgttcagacagacaaggtggtaaagcatgaacatacacatgccgccatgattgggcggctgttcaagcagcatagcagagtgaatatagagatcaggcaggagcatgtcatgccaaaatagaaatcgagcaggggtatgtcaccagaatatagatcgagcatggcatgccaaagttttagaaggacatattagcagggatcagcttacgcaggatgttcaaatatataactacgcaacccagcagcataaaattgatctaccaagttatacccaccaaacataagaagaactttttcaaaaaaatataagaagaagaaaactaaggtttggactaattaccttttaagttcaacagggcacatataacaaactcaactagacatgaatgtgtaactaacaaacaaaataagaaactaaacaaaaacataaaggttgagcttcacacgttacaacttgtgctctctgtatgtagaatcaaatgcttggtaacaacaactcagatcactattaactaaatggagtcaacagcaaaccattaaccatgccacagctatctaaattcagtaaaagaggtttttaacagaggatgacaagaatacagtcacctgccgctgtgagttgtcaaattccaagctatcacagaatccaaccgtcacttattcccagtagaaatgtatttcaagctatacatgtagaaatgttgtataattgtcaacatttatatgattgtggaaatgttggcaattccttgtgcaagaaattgagaacccaaccgtcactcattcccagtcgatgatctcgactctacactgtcgtttttttttccaacgaaactattccatagatgactaggcatttctacatacacctcgtcatcaccacccatgcccaatcccctcccttcgcagaatcacaagctagcgtgcgagcaagcacgcaatatctcaaaacaagcaaagattagaggcaggcgacaggcgagatcagtgggagcgaaaacctttcttggcgccgaggtcggcgttggtgaaggtggttgcatccccagtgttgcggaactcctggagctccttgaaatcgagccacggcttgacccagaccttggcctcgtacaccttcttcctccccgcctcgagggcctcgagcgtgaggtggtgcagcgtgccggccaccacctgctccttcgcctccaccacccgcacgaactccagcagcgcgttctgcaagcaccacacccagagaaccctcacaagttcagtacccacaaaatcgccactggggaggaagcgagagagagggaggggggaggggggggggagggggcttcaccgcncgcttgggtgctcgtcgacggcgaacgcggcgagcgcgtgggtctggacgctgttggcggcggagggggcgtcgtgcgcgccgccgaggacgtggccggccatggcgagggacgcggagccgacgaggaacagggcggcggcggcggcggcgacggcgaggaggaggaagagggggagcggagcggcggcggaggaggaggcgggccgcgtcgtcgcagcaacgcgcatcccaaactttcccttcgttacggtttcgctcttggggcttgcggttgcggcttctttgcttcgtgcggggggtttctctctttgcgacgaacggggatgacggtttggctgttgaggcgagtcgatctagaaagagagagttgagagcggtggcggaacacgtggcggggaaggtgcaggctacgcctacgcggcgtcgattcggacggtggggcgtggggcccaccaccatacttgggccggaactggatctccgaccgacgtgcggcccacatgtattgggccattcggtatcgcggcctcactgtggcccatatatgaatgcggcctagggagtacctatacatctttcgaaagatttttataatcgtatcacacagatttttaatctttggattaaaatccgatagatataataaaaagcaaaagacaattaagaaacaccataatggacactaaattaccatatcctcaagaaaaagaccaaatccaatacaaaatttaaaatttacgtgcgaagattcaaaaattacagtgtaacttacaaaagttacagtgtaagtttcataaattacactgtaacttacaagaaaatgcaatgtaaaattgagagagaaaatcgagtgatagataagaaaaaaaatctttcgagtgagatatagcaaaatcgcttttaaataagtagattcgcgggtcgacgtactatgtgcggccgataaatgttgggctggaatggaaatgaggcctacatgtgaccgagaaatgttgggccgtaacggtatagcgtccaacgtgcggcccatattgttggcacgggacaggatcgccgcctacctctgggccattagtattgggccgaaacaagatcgtgcactaacataaggcctataagcattggggttgcaatgggctcgggatgaacggcccagattagcttgttttgttttttttttaattttgacacattttagctggttttggttgctagtttgctaccgcttgtcgaagccgacaattagcgggacgagcttgtgagttgtgcctactcaaatcaaccgctgatcgcaaagatacattaactatagtattaactatgtgtatgcacattctttctcaaaaaaatgaagatcaaacatgtgtgggttctcctcaaaaggaagaagaggacaaaaacaacaggagccatggctaaatgattgagtcaccgtcgtcatcaaccatcgatctccctccaaaagttcacgtggcgccgatcagttattcgataatcatgcatcaccgacaagcactgacagtgcatctgggctcatccaactattcaactccagatctctgcgccttaatcaaccaatgatgtgttagcttagctgcattgcagagccgcaggggcataaagcaccgggctgcaagcagcctcgtgctaattccaagatgtttaggttcgatccatcatctaccttgatctccatgtcgtcgccaagacagcacgacgtactgtgtagtacatacacctcgatcgatctctgattaatctggatcgcctcctgcctaatataatccgatattcctaaatgcatgatgatgcatcattagctttacgtcgacccaatcagaggacaatccatgtatatatgctctgtcaaccataagtactacctaccttcgccctactaaacaccaccaagcaacgtcatgccccacacctgaatcatctcatctctgtagaacattaatccatctctgtttagttagcttgtcctcgatcgaaacaggggggcaaaatccgtattacgaatgttaacagagcttagccagaatggaaatgccaacccgatgtactcttttcagaagccccttgcacgtctaaacaatcagtgtcattaatacttaaccttatcgccgatttcccggccatgttcaccttgttctctcccttgttttactcactaatcctacgtgccgctaatgactataattaacctgtcgtctccatcggattccttccttgctccacgtaggacgacgggcacctgtcacgcaaactgcaaagctagcttggcaggcagcgtgcagagatccatggagcccaaccatattctgctccctaatctctcactctcacactgtcacacacagacacacagtctcgctcactacatggctacaggccgtatagtaccacgtactactactgcacatgtgttctcctcgtctcatgtcatgtgccgcatgatccttcttctggctctctgcaatggcctccaatcaagaaacagttcagtcacgtactaatcccttagtcccaaaatacgatcatctttactctttccgtctaaaaaaatctaacctgaaaaagaatgtgaccctcttagtacaatgaatcaggacgaatggttgtcctaagttgggtttttttggacggagtgagtagttcgtaaaaaaacaccgttgatgagtgtattggtaaggatattaaagaaataaaattcatcgatttgttgaccgggataggttgagaaaagaaaagtgaatttattttggaacaaatgatataacccaaaaatgaatttgttttgagatggagtactttctcccgtttcctaaatataagtatctctagaatttaagtttttacacacatcatagttatttttagataacgattcaaatgtacaggagtctaaagcatttccagccaatcagatgtttaagaggaggattctaaccaatttgaaatctagctaagatggttgaatggaaatttccgttaatcaatctagagattctcataattaggaacaaagaggtacacagtttagcaccactagttaatcatggaggcgacagcaagtaaggcagccagtgccggatgcatggctccatgtccatgagggtgtgtagttaattatattagtacctaatccggggtctaattagtcgtcctagctacaattagtccctggaatcttgaccagttgtgtgtacctctgctctgtcctatgcattagcacgacggggacaccgtcaccatatgcgtgctgcaagcctgcagtatacggtccaagttgtgttcaaaccaagcaatctctgaactttttcaggaacaagctagctactactcctactagttgctaatgtgtacatgcagtgtgagctaagatggatggatggatagatccagcttggttagctgactaattattaatggcaactgctgtctggtggagcatgcactggatataatgatatctatatgatacgtatcacacaatgtagctaggaccagagtaatttagataaactaaagtgcttcggccattagtcctagccgacgagctggattagctagcttgacgtgtgccttgacctttatttgattccctcggagaggagttccattcttgtctcttgccctctcttcctaaattctaaagacttagaatagagtagaacgttgtgttggtcgtaagggtcgagttttggatgatcacacctatgttactttgttgacttagcaacggtcggtcacgcttagcggcggtcggtccagtgctaactttctcctgaatatgtgttggcgctgtcggtgtgtaggtagtgatatattttttcagttttcatggttacggccttccagggttataagcttatagtttgtaaaaaaaataattgatcccctcgtgctctagcttgatcgcgcggctacgcgaactacgtactgacgtacatatacagggtatatcaagctaattacgaggagtaggtgagaccacctaggtaacttgcatgtatagcttaaaaacgaaatgggctctctgtaaaaaaaaaatcaacaccgactgtaaacctactaaatatacatgtgtccaagtttataattaggattaaactttttatggaacaggatgtaatcccttgccatgccaaatttatattcttacggtaaaacttttctcataatctccgtctaaattcacatcaagactataagactaagtagctatataatctagaaaatgagctaatagactattttatattctcaaccactagatacttattagttgttgtcttagaatattgagctcccttaaacatgatcgcaatagaaagtgcgattggaaatattatggtgtcttaggttttttttacttctagaaaatcaagaatttttgtttaaatttctccaaaatcttgtgctaaaattatacgaacttgtatatctcaattagtactttactactaatttattttcctgaaatccgaaatcaataattaacaagttgtacttaactgcttagactcttcttttaattaatctaaccattataactaaaaaaagccatatatttacaatatgattaaaattataatatttataatagtttatacaacatagggattggtgactagtactccttctgagtccaactttaattgtccgtcttgtttgattttttttatgattagcatttatgttattagatgataattgataaaacatgaataatattttatacatgtcttatatttttttattttttttaaaaaaataaataatacggatgatcaaagataggcatagaaatttataaccccgcttacaaagggaccgagggagtaattagttcatgcaatacagggattgatgactagtaataatttattatcaaccgcgccagaacacatgtgaaatggcgattaattagtctagtaatgtagtatatatatatatatactccctccgtcccaaaataacttaacctatatattaacctatatagtgagatgtgacacatataagaacaataaatctggacaacacatcctagaacaacgattgtccatatttgttgtcctaggctaagtcctaggttgagttattttgggacggagggactagaccaatacaagtgactagctctctttgatgatatatacttcctccatcacataaaaaatcaacttaatagtattaagggcttgttcactttgctaccatttttaaccttatcttttttttggtaaagttaaaaaaaaaggaaaaagtatgaattacacccccgaactatcgtggttgtccgaattaccccctgaaccacaaaaccggacattcttcacccccaactatgcaaactggacgaattaccccccttggttcaatccacggtggttttggtctacgtggcgtacgcgtagcagtccagtcagcattgtatttataaaaaaaattgtgggacccacgtgtcatactcttcctccctctcttctctctctgtatgcctcacttttcctctctctctctctctctcacgggtgggtcggcggcggcgggcgaccacgggcggcgggcgggggcggaggcggcagcgagcggcgggtgggcgcaaggctggcgacggccggggatggaggaggaggcggcgggcggcggtcgaggagccgaggccggcgacgggcagtggcggagaaggcaacgggcggcgggtgggcgcgaggctggcgacgggcggggtcagaagcgatagtgggcggcagccaaggagccgaggtcgctcaagcgccggcgggcggcga

SEQ ID NO: 5720 - DNA, 19405 bp, Oryza sativa
cccgccgcccgtcgccgacctcagcttctcgcccgctgtcgccgacccacccgtgaatgagagagaggaaaagtgaggcatagattgagagagagaagagagagaggaagagtatgacatgtgggtcccgcaatttttttttataaatacaatgctgactagactgccacgcgtacgccacgtagaccaaaaccaccatggattgaaccaggggggtaattcgtccggtttgcatagttaggggtgaagaatatccggttttgtggttcaggggggtaattcggacgaccgcgatagttcgagggtgtaattcgtactttttccaaaaaaaaaggctacatttagtttatttccaaattttagtaagcacatatgattgccaaattttttgacaaccttaccaaaatttggtaatgccaaaacttggtaaggttgaaaatggtagcaaaatgaacaagcactaagatgtgttagatccgatactagattaatttttttagggatggatggagtatactagtaggagtattccttctataaaaaaaaactcaatcttaggaagggatgtaacctctcctattaccacgaatctgaaggtactaaaatgatccttataggttgaggttttttttaatgaaagaagtaatgccgaaggttgaaagtttgaactcctgctattcgaagttcactttgcagattgaggtggtgtttggatttagggactaaattttagtacctatcacattgaatgtttgcacattaattagaagtattaaacatagactaataataaaactaattgcataaatgagagttaattcgcgagataaattttttaagcctaattaatccataactaacatatgtttactgtagcatcatataggctaatcatggactaattagactcaatagatttgtctcgcgaattagtccgggattatagaatgggttttatcattagtttaggtttaatacttctaatctatctatctatctattatatactaaaagttcattaaacttcctacaaacgctctcaagccgccacgtggcgctcctacaaatgctcctaggccgccatgtggcacaatataatctcaccgtcgattttcgcttaaattggtggactcattattttataccgttagattagatctttacccgccgttgattttcacttaaattggtggacccattattttataccaatgaattggatctaccttctcccgtacgtatgtatggtttgccggaaggattagtaactatggttatggttgttagaagttgagattaattagctgtcatattgtgttgctactaatcatatctatatttattatatgcacggcaatatatatatggaagctaggagattaacaagaagattatacatagctaattaaattagttattatacatgatttgtggaaggaaattaacggtaatataacatatacagctaattaaatcagtttatatggctttatcgtgatattacgtagctaattcgaaccaagcaatctccacttaaatcgtccagcttaaatcggtgtatctaagattacctttttaactcattatgatgactttaaaattaaaaaagattttctaaaaaacaaaatacatgataattggtttttgacctgaatgatttagaaaaaaatagaaaaacaaagtcccctccacctcaccctcaccattagatacgcacaacactttgtgccccctccacttctctctataatttttagtagctatgataaagagaaacaaccacagttattttaagctacacatattatatctaatctaactgttgctctatacataattaaaccaacaatttaagattcaaaataaattaaaatcgataatacatattaacgtcagaacaaaatcaatggtctttaaaatataactttttaccatataaaaatatattactccacaaatatgtgcaaatataaactagatctataatataaataaaaaatatcaaatcaattatctctaaatgttcatcttttaaattattttaaattatataatcaatttgtgatcctgtcgtatttctttaattaaataaaatatttgtgtcttataaattttatattgcggttctagatacatcaccacctcttgggaaaaatatataataattaatgttatgataattttaaataatttcatatcatattttaggatgtcaaatatcacttgataaatgtactacgtaattgcgaaaaaaataaaacaatttagttgtgttttttcaagtagatctgatttaattttaatttgtttgaattaagccaagtgacactctaaaatctatccattgatttttttttaaattggtgggtctaatatttttaactattagatcgaataaaaaaagtatgtgctcccaccttctccacaccctttcctggtacggacgtactctcctcatctcctctttcctttcctactctcttaggaaaaaaaatcttcaaattttctaaactattagatttatctcaaaatttaccaattaaatttgtaaacaataaataaattgcccgcgtaactgcgcgggctacctttctagttagtactaaatattcgatgtaataggggctaaaatttagtctctaatccaaacatggcctgaatgtcaggaaacagaacactccagctatttttttacggtcacaggactcagcaatcaaatgtgctaattaataccccaaatcaagaaagcaccaggttacacgccaagcaactcgaagtggtgagccccctcgcaatcgcagggacacacacctctccctctgtcctctcgctctctccctggtggcgccaccaatcctggccacctttcgctaccgaacccggccaatcatcgtatgattgccggcctcctcctgttcctgcccccacacgccaatcaaaaagagcgcggcacaggcgcacagcacgtaggcgtaccgtatagtggctgcccccttctccgtgcttaaaaccgggtgcggtcaccgtgattttcactacactcgctccaaaatatcactgcctagtacatgatcgaacacatccgttaagaattattgtattaggaagtgctaaatcacatatagaatagtaacatttcaaaacagatgttcttttttttaagtgtagtatgaacgtatcattaagcgagacaagctagcccaaaagcagcacgacgagacgagacgagacgaaacaaaacgagacaagaccaagacccgcgcgcgcgccgcgcccggccacgtctccactgaactatccacccccccgccgggaaacaaacaaacgcccctgcgcgaacacgggcgcgatacgctacggagaaaccaccttttccgccccccgcgtgcttgatcccccccccccccccgtgatttcctgcggttttgcggccgccgcgccgcgacgcgtcgcgtcgcgaaagccggtgaaagcaaacgccgcgagacagtggcacacaggcgcatcgatcggggggagaaggggtttagcacgcggcggccgcgcgagggcatgtcggtcgcggcgcgagcgcggagcggaaaacggtaaaagaaaactgccactccaccacgcgccgtccacccgtcgggtcggggaaaaaagtttaaaacgccgagaagaaggctgtgtctagttcaacgcaaagtttagattttggttgaaattagagatgatgtgagtaaaaagttatgtgtatatgacaggttgatgtgatggaaaaggactgaagtttactccctccgtcccaaaaaagacaaaccctggtttccgtgtccaacgtttaaccgtccgtcttatttgaaaaaattatgaaaaaaattaaaaagataagccacgcataaagtattaatcatgttttatcatctaacaacaatgaaaatactaattataaaaaaatttaaaaacccacagtttatcttttttttagaactgagggagtaaatccaaactttaaatctaaatacagccgaaggacgatagcgtaggcgggaggcagaggtcaaacgcacaaacggcgcctcgtggacggtcggtcgtctcgcctgcgggtcagggtctcggggacatgcaatgcaaccgggagttgtgtgcagggaacaacacagtgaccgggagcttaaacaaaagggccacctaactcgcccccctttggagcacatgcccccctgccccacatgtatcaatccatccatccatccatgtgtacttccaatcccaatcccaacgagatcagcaccgtcagctacaccgatcggacggccgacaccactgcgcatgcatgcacaggcgcgagcattcccagcgctgctctccctgtacccgatatggacaaaacgtatggcgcgtacaggcgctcccctagtccggcctacagcttccagccgaacccataaacaaagcacgcaacttgggagcgagcgaggggccgcacagctagccatcgatcgagtagccaggccaccacatcgccgtcctcgctagctggctgtgtcaactgcagcgacgacgaaacgaacgatcgatctcgccggctggctggctagctgctcctcctataaatccccggctcccagccgtccccctccgataccgtcatctcaccacacaaacgcaggcacacaaacacagagagcagcccaaaccgaccaaaatcactgcagagttcaggcacttcttcagatagttctccccctctgtttctttctctctttatttctttctcgagttcagtttgagagatggatttggcgtggtggttcgcggtggccgtggtggtgtgcggccttgtggggggcggcagcgccgggctgctggagaccaacccgggtttggcgtacaacttctaccagaagtcgtgccccaacgtggactccatcgtccgcagcgtcacctgggcgcaggtcgccgccaacccggcgctccccggccgcctcctccgcctccacttccatgactgcttcgtccaggtcagtgccagcaaaaatactcccgtttcttcgctgcttcagctctctccaagcccccatttcgccgtgtcggcgccgtgccgcgcgccggcctagctagccagccatggccggttttctttctccctgtctacatcctgagaggaattaactgcgagagccaccatttcgagctacctagctctagctacagtctagaggccttcactggtcctgcattctttgcatggcgtcgattggggacgaaacgaggctcaagtgaaccggggtttttaccgcggtggttcgtggcttttactctgattttcacagtggcgggaggaccagccgagaagatattatcttgcttttcgcctgtgcctgtacacatatacgtaagcattacggcaccttttccccggttcgcggcagcgcgaggcgaggggcgaggcggtcgcgacgcgccaaagcaacgagacaaacgggaaaaatactgcgtgcctagtacagggggggagcacgccgaatcttgtcgtatttttccccccattttttttccccgtgcggcccgtgcgttgcgttgccgtgcagctcacatgcggcgctgagccgatgcatcgcgcgcgacagctaagcttatcaaagctgccgcgccctgtacggcgcccatgcatgccatgcatgggccatggccacaccaccggccttggcccccttgctcccgcgattttttttcaaaccctgcaaagcgcagctgtttgtggccgcgtgtcaatggcgcctggctgaccggtcggttttcttctttttgtgtgtgtggttttgcgtgcaggggtgcgacgcgtcgatcttgctggacaacgccgggagcgagaagacggcggggccgaacctatcggtggggggatacgaggtgatcgacgccatcaagacgcagctggagcaggcgtgccccggggtggtgtcgtgcgcggacatcgtggcgctcgccgcgcgcgacgccgtgtcgtaccagttcaaggcgtcgctgtggcaggtggagaccgggaggcgcgacgggcccgtgtctctggcgtccaacaccggcgcgctgccgtcgccgttcgccgggttcagcacgctcctccagagcttcgccaaccgcgggctcaacctgaccgacctcgtcgcgctctccggcgcgcacaccatcggcaaggccagctgctccagcgtcacgccgcggctgtaccaggggaacaccacctccctcgacccgctgctcgactccgcctacgccaaggcgctcatgtcgtcgtgccccaacccgtcgccgtcgtcgtccaccatcgacctcgacgtcgccacgccgctcaagttcgacagcggttactacgccaacctgcagaagaagcagggcgcgctggcgtccgacgccgcgctcacccagaacgccgccgcggcgcagatggtggcagacctcaccaacccgatcaagttctacgccgcgttctccatgtccatgaagaagatgggacgcatcgacgtgctcaccggcagcaaagggaatatcaggaagcagtgccgctccgcctcctgaatcctgacgatcaccatacaaacatattttcttcttggtttcttgaatttttttttcttcttctcctctctcgtttcatcggcgctgatcaaaatatattgtgcgccatgatgattaattaaggtcccaagatctgtattaatttgttaagtgctcgattcgatcgttcaaggtgtgacattttgttcatcttggccttcgtcgcgcgatctaatcgaagaatgaaagaatgcagctcgttctttccactgctgcttcaaacaaacatgcagatactacgcacgtaggagtacaaatctactgctactcccactgttctttgtttaatccagctaagatgatggtgacacgagcataacaagaacatctttctctgcgatccaggattagtttatctgattctctgcgcccactagtgatcttgaagatgtgtgcgttggtgcaccactagccccagcgctaatcccatcgctaattgttgtcctactctgatcccaccacgttctgcctctgaaaatctgaacaccattggcacgatcagcaaggtgctccgttctctgtcccgtcactcccgccatgcgtttgcatattttgaatcatttgaatgacacttgattagggcaggcaaccaaagaacgtctgatttgacgacactcaacgtgctatcttgcgctatgcagaaatgggacaacagagaggctttgaagctgcatcgttcttgacttcttgtgctcgtgatgaacagtgaaagacacagcttttctgactggtctgatgagcactcattgacagttttttctgtatgtgggcgtctgtttcaaaagtactagagagattctttctctgccaaacttttcctataaacttttaactttttcatcacatcaaaacttttctaagcatataaacttttaatttttctgtcacattatttcaatcttagccaaacttccaattttagcgtaaactaaacacacccttagttccaaaataattcttcaaactttcaaattttttatcacatcaaaacttttctacacacataaactttcaatttttccgttacatcgttctaatttgaaccaaacttctaattttggtgtgaactaaacacagctaaaaaaataccgtttctcgcaaaatctttctgtaaataaactcatgtaaaatttgaacgagctcagatctcgaggaacgctgaattgctgaaacaaaaaaaaagggaaagaaaacaaaaaagggcaagtgagagaaaagataaaggacgccgttggcggcggggtatgcagcaggtccacgacgacggagtgagtgaagaactactgaaagcaacagtagccgcctacgattattctcctaccccgtctcgaaacaaaacaaaagagaaaaaagggctcgtcagcttcagctttcctccctgtctcctggcaagctcaggacacagattccttcccgtgtttctgctctctcggcctacgagcaattggtcgacagctccagatgatcattttgctagctagagatgatcattttgctacgagttcttcctccttttaatttctttttccatttgatattttccctgtacgccatgggtgacgggtggggcccattctccgcgttcatgcatgttgcttgatgccgtcgtgcacagccacagcagcccgtgactcgagaacatggacgaaaacctggtgaggacgtgaggttcgtgtacgtggtggagattaggttatggcaagtgaggccagtgtgcacaccccatgttctcttgttggatttcctgcttatatcactacacgtgagatgataaggcaaatggttgcgcttgtgctgttgtgcactgtgtctgtgtccatccttttcgatcgatctcttcttcttttttggacatatatatttcctgtccatccttgatcagctaggtagctaagaattttaagtttttttttctttttgttatgtagtacgtccacatcacgcgtaacagactcgatcgtgtccgtgatagcgtggcagggagttacgagattaattagggcccatgatagcctaagctgcagctgccgcaacccacaagcctttgctgttaagagattgatgaccaatcgaggccgtcgctctcgacaggttggatgccatcgatcgtttcgccagttcgatcgtggccgccccgcgcgcgagagagccgtgcgtgcgtgcatatgcgtggacagtgcgcgcgaccgtgagctgccgcgctcgcgtccgcgccgcgcgcacacgtcgctctcggcggaaacagagagagagcgcggggcacatggcctcgctcgcgtcgttgccgagcaagccatgcatgagcacgggcgggtcgctgttagcggatgcgcgtcgaacgagtcgcggatttgccagttgccatgcaccaaccaaccctgctgcctgttggctcgtcgtcgatcgctacggctgatacatacgagatgaacatgcaggtggggtacagggtacaggccactatagggacgggtgattttttttttttggtttcgtttcattctggtgattttcgagtcggttgggccaccccgatcgagttgcataggacgggaataagtgggccaagtgtagtttagcctaaaataaaaggaaaaagtacacccaaggtccctcaacttataatcgagatacaaaatcatcctgaaaccgtaaaaccagatatctcgcgtcccttaactaatcaaaaccggtcacaaaaggtccctcagtggttttgaccctagttttgtactacgtgactactgagtcagcgtgggacccacgtgagccccacatgtcaaggtaatccacgtcagccgcctctctttttcacctgttctctcccgtcgtcatctctctcactcttctcttctcttctcttctcaggcaagccgggcggcgctgctggggacgaggccgccggggcgaggcgggagaggaggcggcggcggcagcttcgacgcgggagaaggcgagggcgcacgtctgctccgatggcggcgagtgtcgtgcgtgtccgacaagtccggcggcggcggagagagcttgctccaagcgtcgcggatcttcttcctcgccattctctcgccggtgaggcactcataccgccgcatccgcgtgtggtagatcagcgccagcatgtactggtcggtgtcgtacacgtcccgctccggcagagcgccgccgctggggagcgccgggccaaacccgtcgttcacgacgagcttgcacacgtccatcgacctcgagtacagccggtaccaaccgcggagagagctcgtacttgtacactcgccggccggtgcaccggtctgttgacactgtaatttggccagttgggttatttggtttgccaaattactgactggttagtgatttgcttaattaattgctttattgggaatttgtgtgctgagttaacggatactacacgtgggctttgcatgcatggcggtgtgtcgttgcctcgttgggcagcgaaggcattgctttgcttcatagatggcacagcctgttgtcacgaagaaccaaatcaatgtggtgctactggtttgcgaagagacgatggagatggaggcccatgcacggcgcggcgcagtggttggatgggttttgcgtgaaggcatacgtgcgtgtttttggtagagctagagataaacttttgtttgacgccgacgtgctccggtggcaggaccgcacatgcggcggcgcgaccgccggtggctctgggcgttcgccggcgcgccgcgcaccgggagcaccaagaccgtgcgcgcccagatcatcgagcagtgcaccgcgtcgccgtcctgcacccttcggaagctcgccctcggggcactacaactcgccgaggcggatcatggagctcctcgagtccgcgtgttctgcatccagccacgcggcgagcgactcctacacccgcaagtcgacgttcgactccatgcttgccggctgtatctcggtgttcctccacccagcgtcggcgtggcagcgccttgccccggcggcctcctccccagcagcgctgcttgcctgagaagagaagggaagggtgagagagagatgaggaagggagagaataggggaaagagagaggaggctgatgtgggccaagctgacatatgcaactcatgtgggtcccacgctgactcagcagccacgtaggataaaaccgaggtcaaaaccaccgagggaacttttgtgaccgattttgattagttaaggcatgtgggatatctggttttgtggtctgaggatgattttgtatctcgatgacaagttgagagaacttgggtgtactttttccaaaataaaacaatggccgcggtcctacgaatcttggatttgctttgcatcaaacgagttccattttccaagcatcttgaatgcgattaggtgccgacacgctgcggttctagggctcatgtcatgtcagggagttaaggtgcagatcgaccgggaattaatccgctttttatgcatccgcgtctccgggccggggcctgctgtaatgtgtgcgccatcgtgtgcttgggccgggctaggtcatcagcgttaggaataagttcaccggccgtgtctcaactttacgtcgagtctatttgaagtcccctaaccgcaataccagataagtgtacggtgtacccctaaactatgtaaaaccatcccaaaaaaggttccgagtcaatatagaggcctggtttcactgacgtggcttcttagtcgcaaaaataattaagattaatatatggggcccacatgtaagtgagagaaaatggtgtgggccccacatttctcctttcttttcttttcctcttctcttctctcctaattctctcgagtgggcgcggcggtagagggggagagaggcgaccggtggcggagcggggacggtggtgataggagagggagagaggtggccggcggcggagcaagggtggcgagaaaggggaagagaggtcggcgcaacggcgagctcggccagctcgcggctgcggcgggagaggagacagttggtgcgacgttgagctcggcgtggtgcggtgacgagggagaggagaggagaggagaggcgcatggcacggcgcggcggcgtgggagaggagcggcgtggcgcccacctcttccctcttcgagcgcacgctcaccaacctcctcgccggcatccccgccctgcttgccggcctcctcgccctgcttgccggcctccccatctccttcccctccactcctcgcgcctcttcccctaagcggcggtcgtcgacgttggagccccctctttgccggtcgccggtagcagccactgctgaccacaacgactgccttgcgcggacaagaaagagggaggggacatacaccaccggccgcatctggcgctcatctgagcccgctgccgcccccatcgacacgctgcgctccactcctctccctcgccggtgcgccgtgcgctgcttctctcctcgtctccctcgcgcgcaggttggacgagctcgaacgggcttgccggccgcgtccccctccccttccaaaccgctttgccccactacccgccaaccgttaccgcgctcgcttgccgcccaccgtctgcatccgcgcatcgccactccgcccgccgctggcctctctcactgaagaagagaagagagaagagagaaaagagaagagaaggagaagaaaagggaagaaaaaaagatgtgcagctgacatgtggccccccgcatccttttttaaatattttgctgactaggatgccacatcagtgaaaccacccatactaccataggatcttgagtgtacgttttgagtgagtttaggggtatacatttctgattttgtggttaagggttaagggacgttaaaaaatctcgctgttaagttgagggaccttgttatcaccttgttaggcataacataatcttactaggaaaaagtccatattgagttataaaaaaaagtccatattgcatctctcaacactacactataattcgcatctcttaaccgaagaatagatatggaggctcactcaatcacaacccactcgttatttaattgcaattattaattttagaaaactaaaacgtctttgtctatctacgatggcatgttttattggacataaattcgtactccctccctcaaaagcgtttaagcatacattcaatctcattattcatcactttatctactctcagtctgccaatacaattattctcaacttccacaaaccccaatacaatagctacactaaaatgagtttattttgggacaaatgaaataagttgaaaatgaacttaatatgatacggaagaagtaatttataaccgtgacctgctgccatatgctaaccgtttactagctccttgaggccatttctcccacattccagtccaggttccttcctatatgcatgcatgcatgcgatactgtcttatcatggaccgctccacccctctgaatctccgatacgcgaaggcgttatgtcaaccatgcatggactggctggagagctaggaatgcgtacacacgcgccaagccaagcccaaaattagggcgacgaacgggacagccaagatctatatatgcctcaatgccgtcgtccccactgggcgggtgcaaaaaaataggcagccgtagcgatcgaccttctccgacgagttctctctttcttctccttcccccggcaacgagcctgacgccgctcgcgcccgcggaggggaggggaggggaagatctagaaccgcggggaagacgacggctgatggctagctatagctgattgatttagcggctcaacatatataccaaggcggcgcggccggccggcacgccggcagggtggtcgccggcgaacctcgcgtagagctcaccctcccctcctccggtggtctgcctccccctgcattggcggatcgaggacgcacgcacgtacgactcgttcgttcgttcactgccatgccggcccgtgccctcgccgtcgaatcgtcgtcgtcgtcgtcgtccctgcgcgtctgtgacgtctgctgctgactcgtggatgtagcttgattgctcgccgtacgtcgtcgacatgttgctgtaacgagccgaaaacaccagcgaaggtatggatgtgttgcatgtgcgagtcgatcatcgccattggtgtgttgcagtttgcacagtatgatttgagtaattttggttgcatgcatgcatggcagtccgttgcgtagccggccggcctcacctccggtcgccgacgccggaggtagcgtgaattcgttttcatcggtcaggatggcaatcgcggtcggccattgccgcgagctgagtccccccggtggcggcgtccgcggccggcactgccgcctccgctccgtcacccagctagactgcccggtgttcgacgaccatgacctggacctggaccgccgagagcgcaacgggcacgccggcctgtcgccgcggcggagcctctcctcgccgtgcttctccaccgtcgtccctcccgccgccgaccgcgccgagcccgcgcgcgacgacggcgagaagatgatgccgcgcgtggagatcgtcgcgggcggccacgcccgcggggtgcacgagctcatcgcggaggccgcgggcgccatcgcgacggggacgcgcctcgtgccggcgcagggcgggatcggcggcgcgctgctgctcgaggacggccgctccgtcgaccacgtggcggtgatcaagccgctcctcgacgacgcgtcctcgccgtcccacggcggtggaggaggctacgcgagcaaggccgtgctgcgggaggtggccgcattcctcctcgaccacgacggcttcgcccgcgtcgagccgaccgcgctgatcaagatctcgcgacccgccatgccgacgaccacggcctcgatccagcgcttcgcggcgcacgagtgcgacgccggcgagctcggcccgtcgcggttctccgtggcgtccgtgcaccgcatcggcagcctcgacgtccgcctcctcaacatcgaccgccacgccggcaacatcctcgtcaagaagtcgccggagagcgagtgcgccagcggcggcagcacgttgacgccgctggacctcgtgccgatcgaccacgggctctgcctcccggagcagctcgacgacccctacttcgagtggctgcactggccgcagtcgtcgctgccattctctggcgccgagctggagtacgtcgcgtcgctcgacccgttccgggacgccgcgatgctccgcgccgagctgccgtcgctgacggaggcggccatccggatcctcaccctctgcaccatcttcctgcagcgcgcggccgccgcggggctctgcctcgccgacatcggcgacatgatgacacgcgagttctcggcgatggaggaggggctcagcgcgctcgagtccctctgcaagaacgcctacgattcctccaccaccaccgccggctcatcccctcggaagcaccaccactccgacgactccgacgacgagagcacccagttcggcatggacgacgtgcccgccgggctccctcctcacctcttcctcctcggcggcggcggcatcgccaagagcgtgagcttctccgcggcggagcagggcgccgccgggcgcggcgccgcgcggaagcgcatgtcgttcaaggcgctgagcggcgacgagtgggcggcgttccttgaccggttcgagcagctgctgccggcggcgctcgacgccaagaagcgcgccggcctgaagctcaccaggctgggcacctccttctgaattctaatctccgccgccgccgccgccgccgacgacgacgacgtcgccggagctagagaagaagaagatcgaggtcgagagcttgtgtacacatacaatgcgtgtgaattccgagagcccttgttgtatttgtacgtgacgtgtgccagcataggtgtgtgagacgatcgatcgatcgagaggccatcgcgatcccgccattgttgcttgcgcgagaggttgaagttgaaccctaacatttgatgctataggggagccagggagcagctctggaatggtaacaaatgttccaacgaagctgactagcagtgccaacgatccaatgcatcgagcaaaacacaaacattgctcattgttgtgttgtgatattgacatgtgtttgtctatcgatctctgtctcggctgtctcggctgcagtttccatggatggatacgtcattgcgtatacgaattcagggggtgcttctacgcttcactcattcagagttcactttgcaaatttttttttttgtttttacactcatcctaaatgagtaagcagagatcctgtattcctgtcaagctttttaatagggaattgctaaaacactgtcccaagtttttttagggtaaagaacttttaaatataacttatagtattatagttgtagtttaaaaaagggtaaatagctaatttagtccctcaagttttaccaaaggctcaatttggtccttcacgtttcatttttgttgacggtgggtacccgtagaccggatatagagggtattggggtacgctggtacgaggatctacgtagtacgacatcaaggaaacaagagacaaagattatactggttcaggccccttaacaggtaatagccctaatccagttgatatgggattatatggaaataaccacagattacaaagggaataatagaactcggtggtaccgacgagatcgtagtcgagttgattcgactagatcacccggcgacttggctcctgtagttttcggcttcgtaggctgtggtcgttgtgtaggttatgagatttgatcccttaggtcccccaaggggtcccttttatatcgcaggtcaggcggtctccaagtaggacttggagacatcggaccctacacgatataataacgacacagtcctatacgggtaggaatctttccattggcggacttcgtgatggatttccttagcgtgttcagagaacgtctgtatatgcaccgctataccgtatttccgtatagcatacatccaagggtagagggtataccttatccgtaaccctgacagtagcccccgacttctacttaaatgaactcgtgtaaccaatcgcgacttctgatgtcggagttgttgtcgttctcgactggtcgatctcggtgtagggaccgtagagacaaagagtgatcgacaacaccatgcgaagtctaacggttatgagtgaatttaaattgaagtccaaggaaccgcttcgcgcaacggacccagaaatttccggcgtccatctctctcctttccttgggattcgcaccgtcagtagtgcgcctatttaagggagttttgggaatccattttggagtccggcagttgtgagaaactttcaagccttccagagctctttgtcttctccgcttccgcacaaaccctagcttgttcatctcggccccttctccggcgatcttcgaccggaatggacctcgacaagtccacttctaccagcgtgtcgctggagaagttgcaggaggaaggcgctctccctggtcgcgggaccatggagagggaaccaggaggtactgaacctgaacctgtcctgggtcgcatggttgcggtcgaggattacattctttgtggttttgttcctcctccatccgagtttcttcttttagtcttgaatttctacggtctctctttgctccatttgaatcccaattctatcgccttcctcagtatcttttcccatatttgtgaggcctacattggggtagagctgtttcttgacctcttccgcttctactatgagttgcgttggatggaatccaacagggtatctggatgtgttgggttccgacttcgggatggcctgaagtctcgctatatccccttccagtgcccctcttctcgtagtaaatgacgggcgaggtggttctatcttcagatagaaaactcggacccagtctttgttgttcttgaggaacaaccagacaagatttcgtcttggaccgtcaaacccgccttaaccccctcccttcaatccttcatcgatatcgtcgatgacctccgagtgcgagagttgtcgggatatgaagtcgctgccgacttcattggtaaacggatccagccgctccaggctcgagcccatccagcctttgactactcagggcccaaagacgcgacccgggtttctccttggggtatttttcttgtattctgggttccattccttaagtgcatgttcctcccgacttatcgattttggttctcgatctgcaggtctgaacagcgagaccgtagggcgccgcatcggtcaagtgatgatcagcggccctacaacagcgagcaatgtccctgttcctctctgcgagaattgggcagccgaacgtgaagctgcaatcaatgtaagtgtactcggcagcccttttgcctttttaacccgtgggttgaaaatacccgtaggcctagcccaatatgcagatggcccaaggcccataaccatcaaaaccctaggtataaatcctcttttcctcactcctctaaatcctattccccttctcctcctatcctctccctcctgtctccgtttctccgccgtccctcatcccccaagcgcccaagccacggccgcaccgcacgggcgcacgccacacgccggcacgccaccgcgcaggcgcgcacggccgcagcaccagccgccagccggtctcggtctcgccgatggagtagggcgccgccgtgcgggcagccgccagcgtgggggcagacatccaccgcgtcggtcgccgcctggggcagggtccagggagccagggacgctgcttcctaggggcgggatagccaccgcatcgatcgctgcttgggggcagtgtcacaccctgaagttcttttcccaagcctaaattgaatttttaattggcctcaagaaaatatcggtgtaaaagcaagagagaaaccctaaataaattaatgcgaataataatcggaattggcatatggaatttttcttgagttctacatgtcgaaatgtgctaacaagatttttagtggaattttcagagctctagaaataattttaaccaattaaaatcgagcacaagcaatatttaatccgaggaaattcatttccttctttttattttcttttccctcctttttctttttcgaatgggccgccggcccattctcttcctctccccctccgcgctgggccagccgaaggctacggcccagccgagacggccgcctccctcctctcttcaggtcgccgacaggtggggcccacctgtcgggcccgtctcccacctccagccggcgccgctgcatcccgcaaccgccaccccgctcgctcccgcgtctctcgggccacgtcgcccacgtcgctgcctgcgcccgccttccccgcgcccactccctctcttctgcccgcgtccgcgcacgagacggccgggattcaatttttgaatcccgcctctctctcctccccacctctctccactccgccggcgaaatcgcggccaccccggccacgatcaaccctcgtgagcctatataaagcacccccgttccctcctctctctttttcgttttgcaatcgcccgctcccgtgcactccaccgccctagcaccgtccccctcctttccaccgccgccgccaccgctccggccgccgctagccgtcgctagccgctgcgccaagtcacgccgtcgacgtcgtcgcgttcgccgtcgtgcgggccaccccatccacccccctcccgttggattccgccgccggaacccactccgcaccgtgtgccggtgagtaatgccgtggccgccgccttcggccggtgttcccgccatc

SEQ ID NO: 5721 - DNA, 29301 bp, Oryza sativa
tgtgtgtgtgtgtgtgtgtgtgagttttttatatatataaagaaaaaaaaagagtgtgtgtgtgagagagatatatatatatatatatatatatatatatatatatatatatatatatatatatatatatatatatatatatcattctataaacattaagttaaaattcaaattttacaagtaaaaataataaattacattacaactaattaacttacatttatagtcaaatttatttttttctttcaacatgtagaagttaaattttgccttgcatatttgtgtagtaatttatcacatattagtctaccttgttggtattttttaaaaaaaaacataattatttgagagtgacatgcaacaacgagagtacataccctcgggagtttatagaatagtggtgtgcaaaagattgtccacgatagaaattgcactgtagtttatattaactgaatgaaaataaattttctgctttgtcattatcatcaacgatggaagtgcatgcacggttacctttagcattagcggcccataataatgcaacttctctcttttaagtttttatttttcaagaggacatcctcttatttattgcacgcaacctaaatagtatagttattaaaaatttagaaaaaaaaagttttgatgaagcaaattagtatgaaacatatcactccacaaatataaaagtccaaattcaactttcacaagttgtaataaaaacaacaaatataattgtgaattcacgttaactaatttcaacttaatttgtacttttttcttataacttataaaagtcgaattgatcttgcatgtttgtgtcgtgatatattttatattaatatatcttaattatcattttttttattttttaataattatttacgtgatatgtaagaaaggcaagaatgttccatcaaagatgaaaatccatctccctagctttgacatacctatatatggtcatgatacaaagacacaagctgcaccttcatatttcagggggaaaaaaaagcgcaaatcgcatttttgtacgagaaacaagagcatatgaattggtataacaactcgtgtcaatgttcaaaaaaaaaaaactcgtgtcgacgtgtcgtgtggttgggcccgactacgactcaaaagacccatgcctgagccatggcggccgtgtaacagattataatagcaaatagctcgagttattttcgtggttttctcctgccgagcggtactgctcccggtaaaacgaaacgaagatgcatggcgatcccgtctacaccgaattgaagtctccaagccagtaggaagagagaagatgaatcaacagtcacagcagatgccggggagatgcatcatatcgccctctagcgagtagcgagacgcccaggcggctcgagttccgcaagcatccgcaaacgcggcctccgcaacaacactggcggggtgagccgcctcatgatacgcagctgcttcggcgtgtggtcggtcgtccacggccgctacatccggcggacacactatctccgctacatctggagttgaggacggcttgagcatggagtgcattgtgggcgtcgacatccagagcagggagtggcggcgcgggtagttggagaagaagccgggacgaggccgacagatagtcgggagagaagcgcccgcaatctccgggagcattggcggtgaagtcggggccgcagccaaagtggtttctgcgccgcgggagtgtcagacgcagccgtcgctggcagatgtttggagagagcatcacgcacggcggtcgatcgtgaggccgggagggggttggtacgaagcgcgaacaccatcgcccaccgccgtggcgactgcgttgaccggcgcgtcgtcgtgggatgggggaggagccggcggttgacatggtcagggttctaggagcggaagcggtggatcgaggagtctgataccttgtgagacgataggactcaacgcgataatcgaattgatactgatgaaccttcctgaattaagtcagccgatttatagaaatataaccggagagatgatttagagaaacgggagatcaggtgtggctaaaaggaaacacgatatacatgccaaatatacatgatcgatacgctaacatctatatatacgtattcgtcggtgttggtggtggaggctaggttttgcttgcaccttctcttcctctctacgccggcgcctacatccacccaccacgaatggcaaccaagggaggacgcggcggcaggggaggccagccgggcgagctcggccaaccgggcgagcccgggcaaccgggccggggcggcggcagggcaggacgaggcggcaggggaggacgcggcggcggcggcggcaggagaggacgcggcgggaggggaggaggacagccgggcgagcccggccaaccgggccagttcggcggccccggcggccgcggcggacccgcgctcggccctcacggcgacgacggcggcaccggcggcaccggcggctttctcggcgtcggaggcgacggaggccgcggcggcgacggcggcccaggaggcagcggaggccgcggcggcgacggaggtcaaggcggacctggccaacggggcggggacggcgggcccggcggggcaggcgggcccggcgggcacggcggcgacggtggggacggcgggccgagtggttccccgttgcgtaaacggcggcgtggtgggcggagcagaggctatctgcttagggaggaggaggaggaggaggagcttgatcagatatgaagatactttggatagtacaacaactgtcgatgccgctgtagttgcactccatctatatttgaatttagttagtagaagtactgttcgctctagtgttctatgtggtctaagagttttaaactcgtttatgctatgatttgtttttccatggaagcagcatcttgaaattttagaaattatgttggacgaacacatctgacagacgagttgagggggtggtttaacagctttgttgatcgcctgcgcttgagctactactgctgcacaatgcacatgtggcaatggagaaggtggagttgcacgtgagaggaggcggacggcgcgggtggagcggtacggcgatgctgctgcgcgcgccatctagctacaagctaggcggtctcgccggcggcgcggaagacaaacaggtgcaagcgcggcgcgcatgcagggcggacggatgaagcgtgcgctcatcttcgcattgccggccatggtgacggccgtacgtacgtgcttggccttacccttctcaagaacatgttcgtctcagctcggagtcgtatagcgcgcgtatggcgaaacctgtgcatgtgtgccttttgtacgtacgttgcatgggtctaagtgcctccgtttcatttgtatgtaggagaaacgaactttatactagtattaaccgttcatttttatgtatgagaaatgaactttatactagtattaaccgttcattgattccaaatatagcagcatatagagcatcaccaatacattagcaataatctatctctaaaatttgatttttgggttttctaaactaaaagtaattagcaataatctatctctaaaatttgatttttgggttttctaaactaaaagtaggaagtattccttaaaaactaaaagtgggccctttcactttttccttccgctcacgcacaaaaaatcacggtcacttgctcccaaaaataagttttgatcacccgcttccaaaataagttttcgcgcgggaaggagaggacaagcgcgggcaaggagtgagaaacggcgaacgaggagacactctctctcccttaaatccacatagcaaaatactccctccatcccaaaatgtttgacgcagttgatttttttaaacatgtttgaccattcgtcttattcaaaaaatttaagtaattattaattattttcctatcatttgattcattgttaaatatattttaatgtatatatatagttttacatattttacaaaagttttagaatgagacgaacagtcaaacatgttttaaaaagacaacggcatcaaacatttagggaaggagggagtacatagggatgggaactccaaaactatctcaaatacacgtagccaaatatatggaaatgggaactccaaaactagtgtagagcttttgggatttgttggatccgatttttttcgctaaaaaacctcaaaatcaattttggaaatgaaataggatgactgccggtgatgctcacatccttatcttttatctttacctattataaaagtttaagatgtttttgccaagtattttcgtacgtcgtcctagtataatgggcgcgtagtccgattccctccccgtacgcgaaacggacaacttgtttaccgtatagcttgattccgaggttgatacgatgtgattttgctctaattcttagaaagaacgaagatagaagaagataaggatcaaaactcttcaattaattttggattatctctgtggatgcggactgatttcacagaggtggcggtgttgggaaggtgcagagtcggacggaggtaggggacgacactgtagcactgggacccacgcgatagtgagaggaggacaagggatgctaattagactttgtggttgcttgatgggtcggatgcacgcttgcaggctgaggtggaagggaggagaagtgaggttaacgggctgagccggctacgggctaatgaaagaatgggctgaaaatggccctgggagaaaggagggttttcatttagattttcatttaaataaatgctaaaatgatttttgtattattaaaattagtaatggagctttgaaaataccgaaaaaatttcacatagtataattaatcatggaaaattgaataaaaattaaatctagccatagtttatttgggaaattttattttccacatttaccttgatttttacgagcctttcttttctttaacatcgtatacatgcatagttgcgattttataatttaattaattacataatgtaagggcctattcactttgatgccaaaaaaaaccttaccaaattttggcattaccaaaattttggcatagttgccaaaattttagcaacttgccaacattttggcatgattttttatatagttaccaaaatttagcatcaaactaaatgtagccacttttttggcaactttaccaaaatttggtaaggttgaaaatggcatcaaagtgaacatgccctaaatctttcccaacctttccttaaagttctcatgttttttccgttgcaatgcacgagcatttttttctagttcagagaaaaatacggaattactatacttcggtttgaattcaaactgagcttcgattgcagactagaggtcagaagaataacatcatctatctcatgttttctaaaacgtaaaaactagtggtacctatacatatgtatccataaaaaaagtatgtgcaagcgcacctacaatgtaaggagaaaccatctttgatcggtcgaccaaatttcacaatagtcctggttacaataaaaaccgaaactaaaaattatctttagtcctggttcaaaaggttagagctattttttttatctttagtcctggttgggaacaccaaccgggactaaagatcatttctagtcccggttcaaagaacaacagactatgtcacaccttctctattatctttagtcccggttagtctatttcttgtcctggttggtaacatcaaccgggaaaaaagatcggcatacgcggcggagaggacgagacatgtgcaagatcgaggaggaggaggcgggatcagttaataagttctatctcctccctcaccttatctcttcctcctcttcaccccatctcttcctcttcctcctcgtctcctcattctcttcctcccctctcctcccattcacaggcggcggtggctgcgccctcgcgcggcggcggccgcgcggaggcggaggcggcctcgtgcagcggcgaccgggcggcggcaagcagtggaggccggtgctactgcgtggattttttttcttttttccttaatgtgtgattcgatctgtattgaatgtgtgattcgatctgtgttgttattgtgaatgatttggggatgactattgagtgaatgatttggagatgaactattgtgtgaatgatttgggatgaaactattgcttgtgaatgatttgggatgaactattgctgtgaatgatttgggatgaactatattgctgtgaatgtttgatctaaaatgatttccgcaaataacaaaaaaacaatgaaaaagaaagagagaaaaaaaacctccagccgagaccacattgggactaaagatcgatctttagtccccgagtatttgaaccgggactaaaaatagcgatatttagtctcgaattcttactcccggttggaaaaccaggactataaaggggttaccaaccgggagtaaaaaagatttctccaccagtggtatatatataacacatttgatctactatggtagtggcgtgcaaaagattgtccaagatagaaattgcactgtagtatggtctatattaactgaaggaaaagaaatttcctgctttgtcaattgtcattgtcatcgatgatggaagtgcagcacggttaaagcatagcagcaaatagtaaagcagcttctctcttttgacatgggaaagtgttattatttctggtggcgatatcctcttatagtcttatttattgcatgtcatctaaatttatatatctatatacctaacaaaaaaaatacataaggtttccggttatttgttttcgttagtcatcccacttgcgtgcactaaaatctgttttaatccgcttagccacgtcaggcctttttcaatctactccaaaaccagagtttagatagtattttccatgtctgcctacttggctaaggaaggatgttttcacgttgcccaccacccgtattattacttggaataaatctactttgtcctcatctcttgctgctaattgtatcgcaccctcaaccgtaaaacgggtataacacctccctcatcttcaaaaaccggtacaaatcaagttttttcatggtttggagaatggtttttactgacgtggcaggtgggatccatatgtagggactcctcttccccctctctctttcttcctctctcttctcgttttaatctctctcaatgacgttatgtctgagcacgaagactcaccaccatgagtcggcgtccgtggctcggcggtggtggcaatagcctaccgtagcgtcgaccacgcgtcgtcgtagcaggcggggacgaggtgctccggcacgaggcggttgtcgacagccgcaactcgctcatcatggaaaaccgctcgatcgagcgccgcgccattgcctcagcgtctttgtctccactgtcaagacgacggccaccgtgaaggaagcctcgtgcccaccgctagctgccgcacaagtggagaaggcgtgaccatgaaggagctggtgaggagatctacggtgggcggtatagatggccaaatgggccgcccagtccggcatgacccaggcatggtcgggcctaggccgagttcagttggaccggcacgactcgacctacacggcctggccatgccattccagcccacgggctacatacacggcccaggcacgacccaataagactcaggccatgccagcccgtcccgaagacacgatagcccatcgtgcttctccatacaataagtctatttgtcctccctcaactcttatggcgatctatagtggacggtgaccacgacggcactaacgatgggaggacacttgggccagaatggctgtacgttgcgcgaacattcctgcaacgaccattctgcaggatgcatgccatgacgtacggtaactgatccgttgctccaattaggtacgatgagccccctacctgacatccctgcaactaactggacggtgccacgacaacgtcgtggtcgctagccagctcgaagcacgtcgacttcgccttctgcgacataataattccgtggagcttcgtcaaccgctaccgccgccgcctgctctatgttcgacgtggtctccgccgcgatatggcagtgttgcacccgagctagccatccacggccacggcggaggtgtcaccgccgctcccgcgcccccgttcgtgttcacggccaacgtgcggaaccatgtcggagctaaggacgggtactatggcaaccgcatcacgcggcaggtggtggcctccacggccggcacgcggtggcgagcggcgacatcgtcgacgacctggctaggctcatcaacgacgatgccaaggagcggatgccggggctcctcccgaacaagcagcagcatctgatgttgctggcgcgcgctgtacgtgtcgagctagggaggcatcgtgctgtgtgccgtgcctgccatgctcgagaatggacagtgtgaacgcggtcgcgtggtgcgtcacggatgaacaccacgatggtgttccgctccgaactggacatactccagtgatatggagtactccctccgtccaaaaaaatgttcaacgtttcaccgtctgtcttatttaaaaaaattataaaaaaattaaaaaaataagtcacgcataaagtattaatcatattttatcatctaataacaatgaaaatattaattataaaaaaatttcatataagacggacactcaaacgtttgttttttttaggacgaagggagtactcttgaagatgtactcaataataaatacgggccgaattgtttccggaccaatactaggtcccccatctagccctaacatgtagggcccacgtagatcccacttgtcacatcagttaaaactggactcgagacatcgataatcaccgcttttacaagttgaacataagggacctaaagtgaacttgcatatttctcgggccgaaattatacagcccgattagggcccattaatacagccccaattcagtctctgggaaggccatcccaattcccaaaccctagccgccggcggccgcaccacacatccccgacccaccgccgttgccgcagccgcagctcgatcgcgagcgagaggggctagcggaaaccccagcagcgtgagggctaagcttcgcggcggattggagatgacgcagaagcagagccagttcaaggggcaggggaagaagaagaccatccctcccaaccgccatggcaaggcgccccacgtccgcaaaggtacccccgccgcaaagatctaccggcgcctccgtccgtccttccgtgccgttctctggtgctcttcgatgcttccctgtcgccctgcgtgttttgattggtcgctcgattcttgcagggaagagggccgtgaagccgaccaagttcaccaaggacatggacgccgataaggtagactcggtttactgaatgcttgctctattcatcaatcagcacctgctttctccctttcggacataagatgttatttggggcagcatttggagattgggggtctagccttctctgagctctgaagtaggcaagaaacaaacatgaattaaactagtgatacatgcaaaccaaatatgttctgtttttgagtgatataagatggaaagttgtgtgttcgttaatgtgctccaaaataacatagcaatattcttttactactccaaaagagagttacatgcctattgattacggattctctactagtaccaataagatcaaagttaatgattttgtcggaactaatatccagtgatagttcttttcaacataggttacatatgtagtaatatgtttcttcataagttgaggagccatggaaataataattgagaggtgtatggacatatggttagtatggttagaggggtaaaggtaaaggctaaattgctttgattagcagctgggatttgtcttttagcgcctgatttgtgttgcatttcaatatgggtgcccatattaggctaatacatgtaaatctcatgtggttgacttcaacattgttctggtgaggcccttttagggtaactgggtgctgaggtcatgctccatgattcatggcctatggctgggaactgtacaaaatgcaaaaactgatgttaatattaccgtataaatatatgaatttatgataagtttgactccagaggcaattgcagagagagtccgacagcattgctgattttttggctggctgttgctgaatatgtccgctaatgccattactgtcgttccatttacagtggttgatctgtttgtattggttgtttgggtgcttgccaatcatctaccgtatgttaaacctagggatggatttaaaatctatttttactggttgacagacacagcatcagtattcagtagtcctatagatatgccaagctgtagtttaatccatggtttttctgccagtacttgcaatgataggtctgtttagtatgatattaacagttttctatggctcggtaatatggtaactaaactggcatagctgtagcctgtagtcaacatgttatggccattgataagttacatcatacttgggactacgatacattctttgtagactatagttttctagctcggtatgtttttgtaatattccgaattgtgaggaatgctgcctcagttttctattccactttcttgttataacaagattggtaactcaattgcatgaccgtgtagttgttgttgatgttctacggtttgatctgaaaaaccagttttacattgcttcttgttgtattttgatttacaggataagttgtgtttgtgaactatgtagatgtttgggaaatatttggcaatgttttaccttgacttgcggtgtggtttttgcacgggcaatcgtgtccgaagttatcgaggatcaaattttattagactattttggtgttgcagatttcagtaggtttggcattctctatgatactaataaacgaccacttttggcgccatgtctgtttgtcaaatggtgacattagagtttggaataattgaaagcagactagaccttctgatcttattgttattaactttgtgattacgtttttttcttatttgagatatttaagatatttagtaaccagtgaactcatttgatgttctcttcttcccaggaactcacaaaattcatcaaccagtgcaacgagaagaaggctgcaagtcttgccagcaaagaaggcggcgacctcagtatactcaaggcggacgttgatccctccaattcaaactaggaatctgtggctacctctgcctacggctatgtgctatagaagatgagtgtgtggaatggatattatgttacattgcatacttgcattctagtatttccctgcagaaatgtagtaattctgtatttctctgaagaaggttatgcttactgctaaatgtttacaatcaatcaacggttaatactgtaaagttctcttctcatacatacaaataattaaggcgaaagcaatagacccatgcgacgtacgcgaggcacacgcacgggtttcgccacgcgccgtacaactccgaagatgcaagtagtgaagatgcatcctgtgagcaatggtcaggcttgtagagttgcatataccatttggggcttttgggatgcgtgtgtgcgagagagataatagcatatgtttattgagaagtaagagatggtcgaacatgtgaatggacgtgctccagacccacgatttaagtcaaagggcttaaattctttctgttgtgtgctacagtaagattatgtaatcatatggttagcaaaaaaatgtcaaccatcaccgtaggatcaaacatgcagtataaggatcgtacgggtcattttgctagtacgtactccctccgtttcaaattgtaagactttctagtattgctcatatatttagaagttaatgaatctagatacatatatatgcctagattcattaatatctatataaatatgggcaatgctagaaagtcttacattgtaaaacagagaaagtacgtacaaatgaaatggagaagcggaagcaacaaaccctcgaagtatgcgagccacacgcacaggttccgccacgcgttgtacacttgtacgaatccgacacgagcatgtccctgaggagggtgagcccaagcacaaccgtctccttggacgagcgcgtgcctcaccaacctcttcctccgcaggcgctgatccgtcgttgatgtaccgccgggagcttccagccctagcccggaccgttgcccctcgaacattgcctgcaaagagagccgaaagaaagaattgacacaatccgattttagaaacatgcaaaacgagagattttgcaatgcaaagtgaataaaacaggcaaaataaagaggcaataccagtagcaggcgctgatgaagctggagggagcaatggtgttggtgcacggggcaatagagccataggtggcaccgggagccacacgctggtggaagtgccaccacgaggtcctggagggggaggagatcaccggaagggaggaagaaatcagcggaagggtgtaggatgttggtgaataatgtcacgagaacggctgcggtgaaagccacgccgctagccacaacaaggaactagcatgctggcggaggcgcttcatagttggggtcgagggggagggcgaggtcatcgtcgtcgtcctcctccttgtcctgctcgtggtcatcgtcagcgacggccgggatatgctctgcgccggcgacctcgagttgctcctccgagggatcctctgacgacatagagctatagtaaagtgcattgggacctactgtgctccttgttgacgacggttaaataccaaatttaagccttcgatacctgcataaatttaaaaatataaaacatccaacatagtggtagggtttatttctaacaattttcataagtgttggtgtatatttgaatgaaggtgataaactaccaaagtgaaaagaaatatacataaggaagagagaattacgttcatatccaagactatggagtctcgggcccacaaactcatcgaaataccagaaaataggcccaaccatcataccaatgggctaaggactcctttgccaaggcccaggagaaaggcctaggccagggaggccaaccagggttcggccgaaccccaacccagctagcccagaaacttcacaagctagtagttatcacccaaggcagttgtgactgtttctacctgaagaaaccatcaaatgacacttggcacaaggaggtgaagcaagaaggaatatgctcattggatgcttgagcatctccacatttccaaggcacttcttggcctataaatacctctctcctccttcattcacaacacaccaagcataagctgaattataagaggctctattgtatcttttactccctccatcccaaaatataaggctcaaccactcataacacaaagaccaagaaaatatttaatcatattcttggtttggatcacctcgatgcatgaaagcaaggtgattgagaggtttgatggtataggatttaaaacaaatcaattctattgaaccaagaggtgctagttaatctatgcatgcatgcacatcttatattatgagacatggaagaaaagtggttgtgtcttatattttgggatggagggcgtatgtacattagaatatggagagggtaagggagaaagagttggaggaattagaatagggagagagtaagagataaagagtcggatgaattttggagttttctatattttccttttatcttttgtatcttgtcaactaatctgctttaatagataatatctttatcgagtaattgagatttactttgtaaggattatcttttagttcagctgcgcaggaatatgttccttttacctttttttatcttgtcaattaatctgctttaatagataatatctttatcgagtaattgagatttactttgtaaggattatcttttagttccactgcgcaggaagatgtgccccagcccgaaccgctgcccctcaaattcttcctgccccagcccaaaccgctgcccctaaaattcgagatttattaaggctaatctatttgttccactgcggaggaagacgtaccgccaccgccaccgcgaggaagtccggttgatgtgccgcgcgagcctccagccccagcccgaaccgctgtccctcagatagcttggttactgctgtaatgtgaattgctttctccaggatgtgagattgtcaattgctttgtgtgtgtgtgtatatatatatatatatatatatatatatataatgtcatttttctcttttttttagctaatttcatttaaacaaacagtcagttttgaatgtgtgtattttatctctaagcacttcttggttatccctgaatgtgaattgctttcttcagaatgtgagcgaaaattcttaggatcggtcaatcgggggagggggaaaatcggtcgctccccctccccacgcgcgcacccccgctgggcccaccaatctgtccctccccttattccataaaaaatgtttcacctagtgtatctacaatgtttcactatatatagagatctaatgttacagtggattaaaatattcttttgcaacaaatcaccaacatattttgtaaaccctctatgtcaccaacatattttggaaaccctctatgaaaggaatttatttcattttttgttccaccaaaaatgtttcacctagtgtacttataatgtttcactatgtatggattaaatgttgcagtgaattgaaacattctctcgctatttgctgaaacattgtttttatataaggtgaaacatcgtccgatttaaacgattgaaatattgttgatttacttagtaaaacaatttcgatatacttggtagaatatcgtgcaacatttaaaaataattcaataataagctaaaaaaattcgtcggaatatatccatatgtgtcttgttttaaagatttaattgcaacgaatttaatggtgcaatcgaatcatgatttggataagtaatttaagagaaaaaaaatagtttaaagtggttttacacatatgcgtgacgctgacatcatgctgacgtcagcaccgatttgaccccctcccgggcacccaactgggagtcgcgtccggacttgtgaattgcttgtgagaatgtatacatgtcattttctctttttttagccaatttcatttaaacaaataaacagttttgaatgtggtgtgcattttatctctaagcacttcggtccccccggtacaattggttaattctcagttcttgaaagccatagctataaactagtatcaagaactctcatccattttcgaagattcctcgacgcccttgaaagtaacacgcagcttcctcagagaggatactttcttcccgttgttttctgccattccagttacatgcacagtcgtgcgtgcagctcctttgagtagctcaaacattgggacacccaggtttggtcgcgtcatctgctctaggacttcaggtgcctgcatgtagaggttatcgccttcgtgtgttacgctagccctcgacattagcagcttggggtgctcttcaagcatcttgatgaactgtttatcaggggaagtgttagaaatctacaagatacttaggattatacacgaaatgtaacaggtatgcagaatatgggcaaaaaaaaatgtttgtctttgcttgtccaaaacaggaaaaggaattcaacagtttagaaaagcacgatgtgaatgcaagcatagcatgctgtttaaactttgtaaacaacaactttagatgacaatggtttggagtctccatataagtgattgccatatgatggctgtattaatgcatatgtagacaggtcacaggtgagctagataatgattactataacagctctacctcagaggttcagactgccattaacagctgaagtacgtcacatactagtgtgattatgtggctaagctagcaaagtgagtctagcaaggaaacgtgttcatgacatcagaaattctcaacatagttacaaggtattgagtgtattactgacctctgagagggtagtcgatgtcccaagttcaataagggtaccaggtccacatacaaggcagtctttctctcttgcaaattcgcttacattaatgtgtgttccatcaaggccgttatacctgcagatagtcaaagaaaaataatgcacttcaaacagaaccatgttaagtgtttctaacctggtcaagaaatcaatcgcttcagatgtgcttgttaattatagttaaacaatcttggggataaataaatattccaagtcgaaaccaaaatttaaaataagactcagaaaagtagtgaactcacgtgagataattcgacacagttttgctgcacccagagataagcttaagagcttccaacgcacatgcagcagaaacaattgcatttgttgaagcaatggctgggatgatattcttgacaacaccctgtaattcatgaaaatacacagtggtacatatgtcacatcccatcaaattaacaaccatgactttccaataattacacggcatatcaactaatggtaagatgatcttagtcatccactcaaatcaagaagcagaaatggctggcataaatttcgatgaaaactgacaaaatggaccacaaccaaaattaataccccatttagcacaaggaccaaatattgaacatgcttttatttatttgtagtaagatcgaatcaccatgagagtcaacttgttgtgcagagagaatgctattcacatactgttgagtctaacattttctttaaccaatgttggatcgtttatcatctcagtcaatcttaaagaatttcccaaaaaaaaggttgaagttggtgtgattataggactcatgcattattaccagagtacaagattcgcattaaatcactagcagagaaggcacaagattagagagacacctgggtaaacgaatatgtaactccagaaataccaaaaagttctgctctctttaaagcctgtattacaatgaggaaaaagattagagagaaaccagagataaaataaattccatgtcatgaagtaaagcaaacctctgagtaaatccactgcatatgttctgcatcatcagcatcaaaaggtttcccaggatgaacctacaagagtgactttaattattgggggggggggggggggggggaggagttcaaagagcaattatacagaaactagaacagtacctcattccatttgatcaaatgagcatattcaatgcaatgagctgcagttctcggagtctcagcaagtgtacataagggaaatttgacctggggagggaaaagccatatgttgcattcaaaacaaggtgttgtcccaggtatgatgactctagcatgacctttgaaaccttcagtcccaccatcgaccataggtttaagcgtctcagggattggcttgtcatctgagtcatactctgcaattgcaattacatattagcactatagcactgcactgaatatactgagtttggtacagtacatagtgaataacaatatacctctgtttgggcatcaccattgtctcctagatgcaattcagatcactaatttattttggaaaacccattaatctcttaaagtatactattgtgaaaatattttttgatacaaatctacatgtatgattttcatatgttcaatctaaatacttgagacaatattgatacccaaagttctaaaaactttactacatgcatgtccaaaacgaaatgtatttgagaccgaagggagtagtaagctatggacaattgagaatcagaaatataagcaaacttcatagacaatgatgagtaaaaattatctgcgcactaatttggatttatataaccatgacttttgtctgcacagtatcatatttacaaggttactccaattcgtcacgaatggtttttcatcggttttaatcctgaagctatctgtggcatgtgtgtaggttatcacatcactttataatttaatgtcaaaagttttatactgaaagaggagagatgaagatgttgtagaactcaagacgtatgctagattaaatgtctgtttccaattcccatgcaggagaaaagataaagaaagaacggctaaggaaatatgtacctaagaaaccacacgccacggaattgatatagcttcgagcttcaattgaatctagaccaagaacaattatcgagaattgactgtagaactctatctctttatcttcaatcctacagaaatgtggaacaatgttcactccactaactcgctccataaccctctttgcagcaacttcagccttggacttcccaacatcttgaaccctgtaagagagtacatgtagcacttatcgagatgaataagataataataaaaaacacaaatacaaacatgaaacgtcaaaacagacaaacaaacgtgaatgctgcaccacactgaaacttgaacttggctatgagagaagccaaaacatgggactttttttttttgctttccattcaggtattggctttgaaaactcgaaataggctttctgtagttatctaccattaccgtcccttttattaggaaatatgcgtgcgggttgtcaccatcgcttaacttaactttatctaaggcttattctactccgtgaactcagagctggtaagcaactgaattaacaaagggaaaaccacctcaattgcattcaactgaacaaataggcataacactcttaatcctattcgcccattctccgtggatattatgcactcccagtgaatgtaaatgaatcttttcagtcgacgctcataggtgcccggctcttggcatttgaacacggcatcgaaacctgacaatctatccctatgtttttccctcacggcgcaacaatctgatggcatcgcacaacagtgggggggagggggggcacaattaggtgggcgtgtggaaggaaggagagtaaaaaaaacctgaagaggaactggcggttgaggttggagacgtcgatggtgtccatgtcgatgacgtggatgttcttgaatccggagagcgccaggtccttgaggagctcgcaccccagcccgcccgcgcccaccaccagcacctccacgaggctccccagcgagtcccgcagctgcgacgcacagggcacaacgatcttcatctcaggacaaacgcaagaaacacacacagacaaagagagagaggtggctgaccccggggctggggttgaagtcggcgtggacgaggttgccggggcgggagaggagcatgtccagatccctccaccgctcgggctccgtcggcgggtcctcgtcgggggaggacatctcgccggccctgcttggacggtgggaggggaagaatcgctggtagaagagaccctagtagaaagagagattgctgatgcggcggaggagaagaggagggggaggagaggaagggagaaaagaaaacccaggggctttggcgtggacggctaggatgcgtggtgcgtccgatcggacggcagcaaccgaggtttccactttccaggctgatcgagttggcatcttatcacgcgtacaagggactcagttgcgcctttggggcaatagagcgcatttttagatttttaacacggagtctgagatactattttgatcaacgatatttataaaagtaaaatgttttaaataaaaaaaattatatattatgatagtttgtttaataataaatctagtaacatcaattttacattattaatcttttttttattttttttacaattaatagtcaaagtatagcatatgatagagttaatttaactttttaaaatttgctattataatttgtttatttggatcaacactattataattcgcgtatgatttgaaacatatcataaacctatgtatttttacttgtattggatataaatatccacatcttccttcaacatcctccttgtatcctttttaagttggagaccaggcaacgccacggcgtctagcggcacgacttgcttgacgcacaccaacctgagaaggattgcacgtcacattgacttagagaccatcctctggtgatagatgaagaagaaagaaaagactcaatctaacaaaatgtgtccggtagggatgaacatgatgatagcttatttgatttcagagccggctctgggctccggcaagaagtgcgatggcctagggcccaggaaaagtagaggcccagaccttggtatgtattagttataccatatggacgtatacaagtttctgattgaatcgctgcccgcataagcgccacttatacgcgaccgtccgagttccaaacttctgttttctcgtctcctctcctctaccggtggcagtctccgccaatccgcctccagcgccctctacggcgcctccgcaagtccgccgcacgccgggccgccgccgatccctgcagcattcagcccttcacagctttgtctgttcgccatcgaccggccgacacaacatgaatatctgcctcaacttccagagtgtctgcgggtttcaatttatatgtactatcgtgctgccgtgctgcaaccatattgtccattgaattgaactactgaagtaactaattagtcattagtaaatactaaagatcagtttcctctgtacgtttaggtttgcaatgttacaagaaagattaaatggcttggctatgtgcatgcattgagaagaatgtcttggacaatattgatatcgataccgtattaatgattttgcatcaagaaatacccgaacgagtattttttttaagagatgcaaatggatgtatgtcatcttttcttttgtcaagtattattaatgaagtccctggagcttgatccttagtcaagaatccttagtcaataatttaaggtaaccatagtaattctattttactgctctttttgtatttttagcaacatatatagaggatattatcaatatttattttcagcatgattagcggatgaatgctttaaaagtatactttaaaaatccaaagtgcatatgtgtatatatagagagagcgtatgcctaagggcccatgtcatggagttgatctagggccctaaaaaatgtagagccggccctgtttgatttatgcaagcttcgaatgggggggagacgccacgcgtatgctcagcgattctgacttaggaccatctaggcattaaaataactccataacaatgtcaaaagacgccatcattgttattgccatcggctgctatggtggttgttgcatgatgttgagttgttcgcggatgggaatctatccttgctctgaccccatccgatggtgatggaaacggagtagaaagaaagcaggttgccttcatcacttccttccctctaggatcgattagatgtagcaaagcatgtacgatggacaactaatgaaaaatattcattttcactccgtcttgcatgtcttggtcttgtggcgtttattgttgccgtctgagcgaacatatcatttctctcaacgatgtgttcttctcccgtttctgactgcttatccttaatattacattgtgtacaaagcaaaaaaaatataataagaaaatagatcatgcgtagagcaaaaggagttgatcaaatacaataaccagagtatacatcacctttcgtgtggattaactcccaattaagatggtttgtctattgtattcttccatggaagaatgcagtatcagtagtaggtctgaaagcttattgggataaattagctaaagagagggtgtagtgtgtatggcgacgtccttttatagaaaatgagggtgcacacaacatagcattaggtgacaagtgccccaatagagctcatcaacggaattgctgctacgcctcaccgaggcaatgctcggtaagtcccaagctccctagagcccatccatttcgtcgtgctaaagtcaacctaaatagagccccacctctaccggtgctccacctcgctagcccccaacctccattggcacttcccttagctgcgccgctccaaagtgttagcccatcgtgccgagctatccttccacatacagtgctggagaatatgaacaggaaaaatcgagaaatagaagggaaagaagaaagaaaataaatgcaattatatataaaaaaagcaaacaaaatggctaagcaataacatatatctcataaccgtgaaattataacggatgtgttcaaatttattttaagatcggaaaaaaattagtggcatatggatcggattatttttttttcttacagaactgacatgtgacgattgaccaacactggcacagggacggtccagatgaacccacgtcctagccgtcaacggcgtaggcctcttcgttccgcctccgcttatccgctctcggaggccgcatccactcacccagcttcgctcgctcgctcactctgccccccggactgcctcagccatggaggcggccgccgccttctcccctccccgcgtctcccccgacgcccgcgccatgttagctaccctccccgcttggcctatcccccaacttccgcctcgccgcccgcccccgcgctctttccgcttccgcccccaccaccgcggcggtggcggccaccaagcagcggttcttggcgccgccccgcccggaccccgcggcgccagaaggctgcggcggcggcggcgccagggacgtcgtcgcgatggtacgggctttgcctttcacctgctacacactacctggctgcgtggactgaaatggcgtctcatttggttgggatgcttgttgcgttgcaggtggtgccgttcctgagggggaccgcgtggcagcagccgccgccggacctggcctcgttcctgtacaagaacaggatcgtctacctcgggatgtgcctcgtgccgtcggtgacggagctcatgctcgccgagttcctctacctccagtacgacgacgccgagaagcccatctacctctacatcaactccaccggcacaaccaaggtttgctgcatttgattcaattttggttatacgatttccactaggcttggttgattagtgaacgggcacgcgcgtctcaatctagggtagcttgtggatcatgaaggtctctgccccccacaattttcaatgatctgttcagattcttttactttgccaaatgattcagataatgtgcagtttatacatctttgaagtgattagcaagtgaggcaggaactcaaaagtttttattgggctagaaaatgcaattccggtttatgcctatcaccttttccagtagcacatcatcttaacagtctacaatgttttcttcaatcagaattattgttgttctgttttcagcataaaattttctgatatatttctctcccttcttacttagaatggcgagaaattgggctatgagacagaagcttttgcaatatatgatgctatgaggtgatttcctacacatgcaccactttctctcaaagctattgatcttcctgcttcctctccaaatgattttcctcttgtttcttgatgctgttctctaatgtcaactttcatactagtagttccttatgagcagctcttttactgtataggaagttcgaatcaaattggtctataaccttagccagatggagaaattcagtggactgcactatatggtggaaagcacgatccaagatataaagacacacaggatatacctcacatggaactcaaagacacataaatatgtctcatatgattctccctcataaaattctagttctatccgtgttatcagaagggtggatctatgtctagtgtaacagtgtgcactgtaccagaggctatatttttggtggcctgagtcagacaactctttagggaaacaaccaaatacagctgtgtattgctcaggctcactgcaggccaggccaatctccaccagtgtagcaaccaaacacaccctatgtgacccagaatagaggaatcagctccctgctgctcagcgcaagaccgcagtaatctctccccaacatgagccacagccaccagcccaccagttagctatttccatctgaccgccatcttttgtatttaccatttgaaatactggtgatcaaatactacaatacttgaccaactactataataccttattcccaatttgtgttgacatatagtgattatatcctactaccagcttcaaatactgtaaatttatacaagcagtagactcaaggtttcatttaccaggaattttttttcgtgctacacataatttagttgcagaatagaataaaatctgtttagcttatggtctccaactctccattagttctttccattcaccttttaacttctactagttgtacttgggttactagtctttggaagattgtagtggttatagccgttgccaatacatgctgttattgtcatccaaaaattcattcttcaatgtctgtacttgttgttttacgaaatatgctcatgcaacctagcgattgtagtaaaatttctggaattctgtctcatgttttcactaaatacaggtatgtcaaagttccaattttcaccttgtgtgttggcaatgcatggggagaagctgctttactcttggctgctggtgctaaaggtaaccgtgctgcgcttccatcgtcgacgataatgataaagcaggtcattttcttttccatcaattaatagagagcagtttagtttctaccttggacaagtctatgtctatcacacaccactaataagacactgtagcagaatgtgtcacattcttgctcttcgattgtggtgcacacttggatatacttattttgtgaacatgcaattctgtacagtatcagtagtctttgcttccaagaaatacgaggataatgatcttattcttctgacctttaatgtgcagccaattggtcgctttcaaggacaggcgacagatgttgacatagcaagaaaagaaatccgaaatgtgaaaatagaaatggtattttttccaaggatagcctatcctattttttcctatccattctggaagaaagaactgataatttcagcttaatttcaaactaaatcaatatttaacatgttcatgtcttatcagtcataacaatttcgctagttcataactggtgcttttcaatcgaacattgccgcaagacaagaacgttagagttcttaacttacctgaattatcaggtaaacaaaattatacattgaatagctaaatgcatgtgctgtgctacacctaggcataaaagaaaatatgtcataataattcctaaaataaataaaatatgtttttgcatgaaatatgttatccgcttgtttgttactacctctgtcccaaaaatataagggattttgctcatgtaactcacgggccaaatcccttatattttggtaggataagggaatgctgaccttgatcatatatatgccaagtacttgcaacctatttattttggttctgtaattctaaaaaagtatcaggacggtaatttatgagaactgcagcgggaagaagtgaggtggcagtttcgctgtcaccaccaccaatgcagtcttttaagaggaagtatagattatctgttatccatattaacaatactacctaggcacatttataatcttaccagaagtgagcaatagaaaatttggcctcctgtcttagggagtgaatggcaactgaacaatagtttctgtcttcatataatcactgccaggatcccgatgtcctgaaaattaggtggatacagtgatttgaaagtgaagctctttgttatattttggggcagcatttgcgtgccttggaaatgataaaagacaatatacttattttagttatttgcagcaacccaccttaagaatggctacacacaatttatctgaagccaagatcttatagggatacaaacttcttgttggaacttggaactgatgttggtgaaaatttagttgcattgcattagatttgatacgaactaggtttcccttgcgttattttcagccatgctacattcatattttgcactagctacccatgaactgaaggggcaggcagtctatttcagtaggctgtttacaattcaacctataatgtactgtatgaattcacttttatgtcagattaagctgctgtcaaggcatatcggtaaatcagtagaagagattgctcaggacatcaaacggcccaaatatttcagtccaagtgaagctgtggattatgggatcattgacaaggtaaaatttctagaatgatcgcaaaaaaaaaaaaaaaaacctgaaatgccgagcctaatttgacggtgttcttccacacacaggtgctgtacaatgagaaaagccaagaagacggtggtgtcgtatcggagctcaaaagatcaaatttgatatagtattacgctagatacaatctccctgtaagttggtaataggtcagacacacgacatgctttgtagtgccatggagtagctgccattcattagctggcctggttgtagaacatcgagctggattggcaatgcaaatatgcagtacacgctgatacttttttttttttttgatatgggctttttccaatctggtgcctgataacttgtacggtggcttggtgcgaaacttctattttttgtttagttttctgaatggcgattcaaatggttgctctggttgtttgcaatggtattgcttgaattgtgagcgccagtgactgtaagagctgattttggcctgttgagtgccaatattttgtatctggtctaaaaaatcgcgcaacactgacttcatctatcagggtttagaaattttgtgccgcactagtggatatgttttcggtaggaattttactagattcatgaatttaattctatttcagttgtgtttgtgcgtgtctgtactttatgtttattttcttttgagaaagtgcgtgtctttacgtaattagggaaatgttgtgctcgtctgaaataggtgtgagtgtatgttggtgtacgcgcatctgctttactaatgtttttttttaaaaaaaatgcaaatatgcagtgtaaatcataaatatagtgaaaacctgaaaaactaacatttgataaaaaaaaaggacatctaatatttgttcatttcactgagagaaacttttactaagtaataaaattttgctcaggataagttcatttttttaatctaatagtagtttttatagtatttttaggttttcagtatacatatatggttcggaaagaatataatcggagaaaaaggaaattgatgacggaaaaaaagcggggaaaacaggagatgccaggttcccttggaacggaaaatgttggaaaccatttgatctaccactggctcgcagaattagaccatcttttgcgattcgcacggcagcggccaagtttatattaacccctcccttggttgggccttcccttctcttccttcgctagaagccgcgctctgctcttccctccccctcccccgagaggccgagagacccgcctgcctgcctccccctcgccggcggcgcgcccgccccgtcgccctcgcccgccgcgccggcatccactgtgagtcgctttgttgatctcagccttgagcccttgacccttctttaccgtgggaacaaccgacttacaagctgcggggcgccccccctagttaagcgaggtttcggccttcgcgcgattttggccggcggcgcggggtataggggacccggacccgatgcgatgcgatgaggtgctgcggccctcggggattacgtgctgctagttagtagtagcttccttccaattccatcgaggcttttgggggcagtgagcattctgttggccagttcgttttgctcaccgtctgatgcttcaaatcaagttttgagtaatcgacttgtttgggtagtatcctggaattttatttttggttttagggaacatgtaaattctactgctcatgtggtactcttttgaggttgctatcataaccccaatctttagaggttgctgtcataacccccagctgactgcattcttatcagatgttcagtttgttgaaaatgacgtaattttgaaaggatgtttatttattttgatttttgagttagaaggctggaattttatatctttgctaaaattgctcgtataaggactcgatgagtaagtgcatactggtttatttagctgatgtaaattgtacagcttacaacattttaatttgtaggttccctctctttgagaggacttgcaaggagctgaatggagccgaaactagcattcccccaggatagtccaccacttgccatcctctgtgctgctaaggtcgcaggtgtttccctcaccctcgatccgaagctcgcctcgggttcagcacccacacttcaccttggttctgggtaagtggatactgatcagtctgtagcttctctctgagacgaaccactacttttttttccctttcttttaaggcttatactatgataatttgctccatcatcatgcctgcatcttgaatcgtgcttggaatggcaagttcggtgcataatattctattccatagtagggtttgacaaagcaaccttcagcattatttttttctttatgtcattctagtcttcatggaacatcaaaacaatatttttggtggccaaattattgctcctcttttccattagtatttatccttctcagtatttcccctttagagtttaaaaattctcactgaacatctgaacctttcatgattctgtgcagggattttatccacggtgttaacacaattcttcgttacattgctcgtgttgcatctgttaccagtttctatggtcaggatgctattcaggcagcatatgtatgttctggttgactatttgctatcgctggtgctactcagtgaatttattgattgtctgagtattcatagttcctgttattatgcatgtttaggttgatcaatggctcgactacgccccagtcattctttcaggatctgaatttgaagctgcttgctcatttctagatggatacctagcatcacgaacctttttggttagttatggcttgtcaattgctgacattgtagtatggtcaaatcttgcaggtaattgtctggtttcttttataatctatattttatcattctatatgtttatattacttactttggagtggcacccctttatttagggacaggccaacgatgggaaagtctaaggaggtccaagaaatatcaaaaccttgttcgctggttcaacagcatagcagactattcagacacactagatgaagttgtctctgcttatgttggaaaaagggggataggaaagtctcctgcaccaagcctgaaagagaaattacctgattcaa

SEQ ID NO: 5722 - DNA, 11998 bp, Oryza sativa
ggtcaaaaggggtcaattctggcaatgagtgaaaaatgatgagataataagcaaagttcacacttaaacaaccaattttattacctgaaccagccatttatagaatcagatcattagatgtggtagttagtaactagccagtaagcattgaaataaaccaattattccattgaaatactgataaactaccatttatttggctcaacgacaactatttggaaaaataggatgtttggattctgttggggctattaacaatgtcgtttaagatgtgctaaagttagctaatattgaataaaggtaaggacgtagggttttgtgaatacttggtcttcggtgccaatgacattggcgcctatcccccttcacataagtggcttagcttccacggggaggctaggggtacggtgccaatgtcattggcgccctcatgttggaccataacaccaatgacgttagccccacaagaaaggtccattcccggaataaatttttctggggtctatttgtaaagtaagttttcaaaaaggaccaaaaagtgaattacaggcttataatcgttgataaccactcatcatatagctctgaacaatattaggttagccatacggacttatgtaaacttgtacaaactggccttggatgtgtcaaggaagctgtgatgcaattatatctctttagtttgcttcttcgcacatactattgattttactacttcgaatcattacgacctgataacttcttatatgattggtcgagtgacatgttggctactttgatatacacagatattattttatacttcccattaataatattaggttgttattgttattagggtggccagtctatatgtatcagtgatcttgtttcttcttcatcttggagtattcttttgcacagagtaagtttaacaaaaatccttttctctgatgattatggcttgcaatctttttttatttgataagatacttgtttgtgtttcagatcggggatcttctcatgtgctatttgctgaggtgcacatcaatctttctgcctgttaaaaagaatgattattttcaggtctctggtgttccactcaatgtggttctgcgaaatcctatatttgcaagtactgttgcgagaaaacatcaaccccaaactacaaaagcaaaatgtcatacagtaagcatttatttccagattttatagtttttcgactattgagtacaagtctttgtccagtgaaccccgtacaaatatttgattcccaacttaatgctctgaagacacaagtcaacaatttatctcagtatgactaggtctaccatttaaacaagtctcaacattcataaatttattttttcatgtataactataggtgaaaatagttctcaaatacagaaggaaatgtttacctcatccaataatgtgatatcctgcgatgttttatgatattcttgagtaagcatatttttctaaagaacaatagttttgttgtgtgtgaaaacaataacaataacaataacaataagttatacataaaagcctttcagaggtggggaaaggtgtcttctttggtagaaaaaacaaaactatcttgattagcctgattagttatatgtgattttggaataaaagctagacggagaacagtgtctgggattgcagcggaaacatgacttatctgacttcgtgttgatttcattacttcataaatgttgagttccaacaaggccacaacttttctgcaagatttttaattaaataggcaaaacacagcagaattacgatgaaatgagtatatcgcaatttctggttttcatgaagttccaggaatacaaaactagtccaaagaattggcacataaatttaaatttcccggtaataccaaatatccacatggagacatttttgtttataaagtatttttatacttttgtcaattttgtcagagaaatcttcaaattgcatcgtctccataactcgtgctataagaaactagactgttacatattaaattgaaaagctgatgtgcacgagggtgtcccgatctttcgatgagaggataagtcgattggattgagtgacgttggcgatctgactacaactatccagggatgttgctccttagcaatcgttacaccaactccaaaggcagtcgtgaattgcatagtcagcctaaccacaagggtatttgttcctgcaagcactcgagaactagcaagaacaagatgaacaagcaactcaatttgcgaactaaagatgtaggattgaatcaacagaagtatcataggtggggttccgtaccgagcaaaccggcgatctaaccgatcatgggattacacggttcgctactttgatctaaacaaaacccaaattgatctatggggtcgtcctctaaccctaagacctgcccctaacggactcaacttgatacacaacccattgggcccaaataagttgacgcaacaccgttggcagaaaaaggtctagtaaaacggcgattgcagcctctccagaacagatttgacatgaggccggatccatttgaaatagacttgataagttttcgatgaagtacttgcacgccaaatcggagttcgtatgaagtcgtggcgatcgtcagaagttggtgctgtcctgcagtccgaatccagcctgcgcgaatcctctcccctctggatcctctccattgttcctgagtaaaacaagagtgcacgtgtctctggggtataaagatgatgaacatggactcaagaatgaactcacctgatagttgacttgacgtgcacgagcacgggtaataggactatgaagttggacttgtggagatgtggatgtaccgagggtgttgatgtcctcatcaaaaacaaagtgactttatctgcttgatctggttgccttcacttcagaatgaggaaagtcaaaccaggcagtttttgtgaaactgacgaacaaagtgatgtcagaaggattatattacattagctgaccgacttgattgacccacataattgttcctagaatgggtgcctcagcaatcccctgcctcaattttcaaattctctctttccacgtgcccatattcctttaaatgtaactgtgtccccttaactactagcagctggaacctactctcataagaccatcagtgttatgtaaccacaatgcatgtctttcattgctatatcagaagcaagtgctaggtagtgaacatcccaacacatgtattggttcttttctttctttgttttttgtacaacaattgaataaagtaagttcctaattttttatattaatccttttgctatttctctccacaatatgagaaaagatatgccaaagtaataaaatattaatatgtaacaaactgctggttcaaacctatgaacggtggtgaactgtgatttgataacctgactgttttaacttttgagtactggagatattttttatagattttgcaagcttcattaattttggctgttgatttgtatctgattctagtcctataaaatgtcatcagttatattatttgatgagccacatgataattatattctttaataatacaagcacatgtagagtgttcagatgaattactccatcacaatatatagctacttctagtgctcaaatcttgtcgtcgcaaccaattacaacctcctcattcaatttctccacctaccttctccatctcaaccaatcacaacaatctcgtgtttcacctgtcttcttaatctcagtgaattttttttctagaagtgcttatattttgggaacggagggagtattaaataagctgacaagtcactacatgtctttgtgtcatcagtgctacctgtggaaaagtgcaaacatggcggaaaacttatctatttgtcatgacagttcaaattctggagttaattcttcgtttagcagcacttgcaaaattgttactcaacaaagctgtgaaacatgtggttccataagaagagcagaatccaaagatccaagtgaaggatgtaattgtccaaaatttccttctgatggtagatcaggagagtgttgcaactgctatacccacaacaccaggaaaagaaaaaggttatacagttggcagcgccgcagcaaaaagaaacaggtctgttctgtggatgagtcttcagcagaatggagtaaattaaatggcagtaatttcaatatgtctaatggtccatcggagaacctggctggaaaaatgaatgatcaagcacaatctgtcgagctcacagtagataatacttctttggcaaggagcaatgatgacagttcttcagaaatcaaagtaattaatgctactatcttgtcatcagaaaaatcaccttgttcagtgttcgacataaggggttcccagggtttatcttgtcattacagcctgtcagaagtccagtaccaatctacatgtccccaagttgggccctccagttacttacatctgaatgtcagcttcccagccttctattcttttttttacctcttgcttttaagcttgcatttcattcataatggacaaatatccatttatttaatatttttgtacttctgtagttagtttatttttttatcaatttaatttctttgagaacacaattccgtttagttattttgagaaaacatcttttaccgtttagaaaaactgttatttactgaaaatgtgccagaatcaatagtttggatgtataaatagtcaatgtatgggttggtgtacatatattttttaaaatatactccaacagtagtcctgtaaaccatacaactggaaatgtcatattctgtcttgaggataccattttaggactctaatcaagtcaacgtcttgaacaatatgcttgcattacttgttccttgatgaacttactgtaataaagccatgctgatgttctctagtaattatagtttctttggtttgtattgtttttagaaaaaaaattccttggcattgatctgatgcactattctcttttaggatactgttgtttattgggtatgaacttaaaactggaccctttgctggccctggcatgtgggtagaaattttcactcctttagtgtatatccacaaatcattcattcactttttcttgcacatataatgtttctcataatatgtttttcaatctattcttcctccagagtattcttgaaattcaaaagcacatttctgttgaatattttactgcacactatcatggaactttttaaatgttctagtcgtttcatctttatattttttcttgcagagttgttccatctgcttcaattgtataatatcaaatgcatccaaacatttatcattagattccttgatatcaagaaatggtattttctataacagaaggacaacctatagtgtcttccattgcaaacgtatccttttgctgcttcatgtaccctcaaaatctgtaacaagatttgcgaatgcaaagaagtgttacttgtcataatgatggggaaaaattgagtgaaacctgtgcatgagtgcttattttgtctttcctgttggggcctaaggtgaataggtgatgaggtgtttggagttctggaggaaaccagaagcagtttgtctaggaaagggaggattgtacgatgaggtgatgaggtgtatggagttctggaggaaaccagaaacagtttttgtctaggaaagggaggaaaccagaaacagtttttgtctaggaaagggaggaaaccaaatctataatgttttcttgcttgtttctgttacactagctaatgcgctttttaatagggatttaaatagtactagatctcctacattgcaattcgaatatggaatcttctgttgtgttactcagtagcttgttgctagatgtagattgcaatactgatttcctgtaattttggtagcaaaggacacatttggccatcatctttagataattttgtagtcccattcaattagctttaattaatgcaaagagttcttttcttttctttaacattccgtgtcattgtactgttctaaaattttactatttttatgtaggctaggacatttgattttattacaagtagttctatcaattcagtttttgaacaaagttcaatgggaaaaaaaatagaggattatgcaattggtccattaccactgttggattaacatctcctatgtatggagcgatctttacatggcatgttatagtcacatatcagatcccatgatgtgttgaaatctagcattgcctatgattacagtatgttgtctgagtgttccttaatccttactgctgttagacatattaagcaaaaggaaaaggccagatgctctatctcttgtaaagcacatatttggaatcaatagttgctgtgcaagcttattgaaatacaactgccacgaatctacaatcagaaagtctaattgcttgtgagtcattagatatggttcttcagcgtttcatatcattagttactcttgctgttggatgacacacttctcactaatatttacgattctgtccacatattgtaactgcaatgcacacatcaatgtgctgtagcaacacataaggtgttgtttaatactaatgatatattacagtcgatttcctagcattagggatgccgtatttggaagataattcatcaaccctgtgcagctctgtgccaaaacaatgtacttttgagtattgatccaaattgttttttaagaaaaaagtattgaatcatttttttttgtaaagagctcactgattcaaatttatgaaggagaaattatgttgcttgtccttcaattttttacttggtttaatttttcctctcccaaatgcaaaaccggacaaaaccaaccctcaaccctcaaaatctggcaaaattaatgcctctgccctatctaatacttcctccatgtcaaaatgtaagcatttttgaggttggcacgagtattaagaaagaggtgagaatgattggaggaagtgtgattggttgagaagagaaagtagatgaaagagaatgattgtgattggttgagaggagaatggtaggtggagaaataactttattttgggacaagatactgtgctaaaaataactacattttgggatggaggtagtcgtggttttgacttacatatggaggacccacttttcattgaggatttgatggttcaccattcttctgtccagtgtttgccatatgggcccaatgttaattctctatccctccgtagcatgtgtgcccaccacctatatgttggtaaaaactgttgaaagggagcagagggatgagttttagctgggtttggttatgcacttatgcatcttttttgtacggctggttcgtggttttgggggtccttttggtcccttctgtgtaatttccttttcttcttaatgaaatgaagtgcagtcctgtgttttcgagaaagagggacaaatcaaactgagaagaattgagggatggtaaacagtttattttttgtgaaaataattccaacctgactttactaccattattaccattagttagggtggtgcgtcagtacacaatttttttttggcatattttggtcaatttctagactgtcctaattaatcgtttctaggcaagtgaatgcaaatgcttctatgcatgtcttgaaatcatgtggtctttgcttaggaattagcttccatgtttttcacactcgtgcaggatcataggcttgtctttatattattcttttcgagttacaccctgcaaatgtgaagttttgacatttttactatttacggctttcactaccaggtgctgttggctgcccaaatcaattaaaaatctcataaggaattctaaacgttgccaatataagaaattatttctgaagcattgttctgtcaagtgtaaggtatgtttgagatagttcgacctcatttactgagtaatatcataaagataatccaatgtatcagctcatgagtcatgactattctgggtcatgtccttttggtaaattatcctactgatctttgcaacaagttgttaatgttaaacttcagtgcttatctgttgcttcccacattatacattttgtcaagtatagcaagccacattttttgtggcaatctaactgattatcacaccttttgtcaaggacattttattcaaccatataaaatgcctcatttcgttcaattgtatttaaatgcctcaaccctccacaagcaagtggaatgatagtacgttgtctatttataatctatcctatgccactgagtttatcccagttgaacaatttatcattgacattgtctctttctataatataccagcgactttatcaattgttctacaatacgccattgggttgggcctttccttcaaaaatactcaaaataccattagagacgtaaaaaggttaacaattaatttatctcactagaaattttttaaaaaatgatttttttatgtggcctccttacataatatagacgttttcgtataagtttcaagcattttgcatttctactttttgtaagatattacctccgtcccataaaaattgaaattctagttctaaggcttagtcccacaaaaaatgtatttctaatctcatgggacccaacaagtaatttaagaatgctaattatgtgggttaattgtctcaaaattccttttaatcaattttatatatggaatgtatgcatgtatggggttcattaaataaggttattgtggtcatttgtctatcctcctaatatgtcctaaattagctagaatttcaatttttatgggacagaggtagtataatttatctgttatgctgtataaaatattttttgttgtttcttttaatgtaaatcatctttcatgtgctacataagatattttcgtgctattatcttttgtgtaagcaaattctctcctataccacataaaaatatttttttacaaaataaaaataccaaaaaaatcttgaaacttataacaaacttctttgtaatgtaaggaggccacataaaaaaaatcattttttttaaacttctaatgagatgaatcaagtgttaaccttttatttttctaagggtatttttgaaaaaaaggcttagcccaatggtgtattgtagaataattgataaaatcactggtatattatggaaagagacaatgttagtggcaaatcgttgaactggaacaaactcagtggcatagagtagattctctattgaaataatttctagatgtttcatacgttgcgctaattcaaattcaatagacctagcaaggataaacaaatcatgtagctaatctgtgattaatattgtaagtccattaaatttatagaaaaatgcaccatttgcgacatcaaattggtttcatgaaatccaccatgaaatatgtcttgatagtagtgcattcatttattattgtagatgttggtgagtttttctatagacttggtcagagttgaagaaaaaagtgacttaggaacagaggtagtatagaaattcgttaatggaccttaagtaaaggaaggatttattgctaaatattaattattttgtaactatctgatattaaaatcattaaaaagataacttttgttccatgataggctcaactaaatagccattttgtatttacaaatataactatactcaaatttcaacaaacaaaaaacaaattgctgcttctgagatttttaaacgcttcatgctataaatttttttaatcaaccctgcatctaaatggtttgaactagtcatactttgttcgtgtttgttttaaagtcatactttgttattattcttcatgctgcaaaaatgcagtggagttatcaatttatctgttaattttgctacttacaaaaaacatgccaagccaccatgcaatatgtaatgcgagcaagaattttttatactagatatattctagtctattgactaaaatgttgatcagacatgccaaataaaatttgaacctgtatagcttgctgcctggagtacttatattggttgcaatattatctgacatgagtttttatggacagcctgtcaaaatagcaaaaatgttgtatataatgttataagagaagaatgacatcacttatttttgctgtaaaacaggtggcacctgatgtgaccaagaatgatggcaaggcacattatccacctggaggaaaagcagcatattatgatcgatcattttctcgattggaagcgtatagcacccatcaacaagtagcttcttttgtttgggcagtgctgaaacgaatagtaccaaagccattgcttggaaactcttttggcaagagatctttgaggacaaatatatggaagttcataaagttacgtaggtttgaaacatttcaattaagtgattgtattggcgatctgaaggtatcacattattcttggttatcaaatattgaattctctaactgctagtgttctgcaataattgggaaacaaactgggtcatcaactagtgcagaagagcagaaacagaaaaatattttgcattgctggattagctggttattttctgatattgtgattcctgtggtccgtacatacttttatgttacagaaagagaatcaaaacgatatgatgttttttattacccaaagtcagtatggagggacttaactagcaatgccattgcttccttaaataagaaaaacttcaggattttgcgcggtgaacctaggaaagcagttaggcatttgaactgttcgtcaagagtgaggtttcttccaaaagcaaaagatatgagaccattagtagacctcagagctaaatcgaaggatgccaatctcaataaatgtcatttaattatgaaaaagctaagagatgagaaaccagagatgtttggttcatcggtttttgattacaataatgttcaccaaaatctttcccaatttatttcttcaaaaagaagccagttgatgaagaagttaaaggtatatattgttgttgctgatgtatcgaaggcatttgattgtgtcagtcatgacatggttctaaaaatgatagacgatgctttcaagtgtgatgagtacacagtgaggaaatgctcaaaggtaatttgtaacaggtctaagaattccttgtaccggtttgattcaaatgcttctattggcaatggtaacagtatctatgatttatcaattcagctatcatcaggtggtggcatttttgttgatcaggtagtgtatcctaacaaatgtcctttctttacctggttgactaattaacgaatgtgattgaaaatttgatcttctatccttctcattgtgacattgaacacaattttaattgttattctaatagcgtattggaaatttattaaaaaaatagtcataccagagaagtttttattaaatttcaaagttttaaaatgtttactttgcatactattgatgagaaaaaaaaataatggagcaagcatcaattggtgttacaactaataaactggctggacattgaagaacatgctgaaccatctcttccgttggtggatgattgattttcacaatttcattttattgtacaagttgagagtaaggaacttgaaggttcacttctgttaaggaacttgaaggttattttgtatgtttagaattttcctggatactgaactacagaaatatcctaggctgtacagttgagaccaggaattgaaatttcttttttgtgctgtagctgtatatttcgtgtaattcaatcagctcttttattattttgctacaaacaatcatcaatcaggctggataacactttttgtttttacaaatcagggtactatttgtagaatactaaaggaacagtttcatcatcttctgtatgagcaaataaaatgcaatattttgaagattgggcaaaagtattacttacaacaagtagggattgctcaaggaagcaagttatctcccaacctgtgttccctgtactatggccacctggaaaattcagtgctatcaaaatttctgcatgatagcaagcttaatgcaggagaggctttttcggaacctgaatatttgttaatgaggt

SEQ ID NO: 5723 - DNA, 20281 bp, Oryza sativa
  unsure (1)..(20281): unsure at all n locations
accagttcaaatctggttcctggcacagaaaaaagggatcttccgaataggtattgatacaaatacctcgagatgggttgggatacatattcgttaataatatagatagagtatgattttttcatctaagtagataaatctctaaatagaggcacttctttttctgcatttttgcatttcttaattttctattccgctattccgacaaatatttttttattcttgcttatcttatcttactttcctagttgttctaagtgatgcacgtggtacaaagttcgtggtagggaacttctttgagtcatcatatttttctgttcatacgaaggaaatgaatatgtgattttccaacgaaatgaagcccttttttgcttagtctatctgaaccttttgtataattggaattaattagaatgtaataggtattctgtttcatctaggaacagagcgtaaaaatattccttgacttgcataaaatctggagttgtgttgtataagtgagcatgaatttcttatcattcaatgagcatcttgtatttcatagaaattgggggttatatagtccttacgtaagggccagcctatccaactttcaggcattaggatacgtttaaggcgtggatgattatcataagagattcccaccatatcaaaagattcgcgttcttgaaaatcggaacttctccaaatccagaagacagatgggattctaggattatccttttgggcaaagacttttatgcatacttcttctgggttatctataccatactgtattctcgtaagatgatacacgctagctaaagatccaccgggtgcaacgtcataagcacattgggaacgtaaataattgtaaccatatacatataaaatgacagcaatggaatcccaatcctctgcttttatttgcaaagtctctattcctcgatgatcgaagcccaaagatctatgaaccacctcatgtttgactagccaattagataaccaaccctgctgcattatcttgatctctcctcctttgtataaatatttcgcagttcgaatgcaagtttgaaatattgccctgctctttctttttcggcacaaagagctcctcctaattcactaatttgtaggaagatactggacttttggatttgaaaaaagtttcagaagatatgtctaaagtagatggtgattgatagagcaattcttgctcataagttccagtattagtactgcgccgaacataaagcttgtggctggtagtaaaacatcgatttttcttttgagatagagttcgatcctcaactatttctcgcgatatcttcttacgaagttttgttagggcatctataacagcctctggtttaggtgggcaactcggcaagtagacgtccacaggaattaacttatcaactccccgaacagtactataggaatccgtactgaacattccaccagtaatagtacaagctcccatagcaatgacgtattttggttcaggcatttgctcatataatctcactaaagagggagccattttcattgttactgtaccggctgttaaaattaggtccgcttgcctaggacttgatcttggtaccaatccataacgatcaaagtcgaatcgtgagcctattaatgaagcaaattcaatgaaacaacaactggtaccatatagaaggggccataaactagagagtcttgaccaatttgaaagatcttttagtgtagttgaaataacggaattggaacttgtttggtcaagtaggggaaactcaatcaaactcataactgtcttaatggaatcttttccttcttttttttgtctgaatattcagttaagaccattccaaggctccttttcgccatgcataaactaaaccaacaactaggataagcacgaaaatgaaagcttcgataaaaacggatatacccaatacgtcgaaactcattgcccaagggtagagaaagaccgtttccacatcaaaaacaacaaaaactagcgcaaacatgtaatagcgtattcggaattgtaaccaagccccccccatgggttctatacccgattcataactagaaagcttctctggtccttcacgaaccggagctaaaagtgctgaaatccaaaatgctaaaataggaataaggcttgctattattagaaatgcccaaaaaatatcatattcgtgaagcagaaacataaatgtactcccattaatgtggaataggcggaactgaattagtcaattcaagtcagcattgtcaatttatacagaatttctctcttttcctcggtgaaacaaggatcggtttttctcaaaccaaagggcttagtttagcctttgtttcctctttgccacgtcttctttaaagattcatccaatggaatcccgactccctttcttttttatttcctttctatttaggtatggtggagacataattcttatagaaacaaaactctctcgcttcacgttgtctcattttctctagaatctctagaaaaaggaataaaaacgaaaatactacgaattagagcctaattaagataggatgactaatgtatgcagcctaatgaggagtaattctataaaaataaagaactctatttcagaacgtagattgatttagatttaggtaatctatagatatagataagcaaagtaatatacttcaaacaaagtaggaatttgcaagatggagaacatcttgcagttgatttgatagaaattcatttttcttttcctgtctctataattttcgatgaatgagcctctggtaatccttttctctctattttatggcgcaggcgcctgtccagtctataaacaagtactaatagggaaatgaaaactatactaaaggaaacgtaggatatctctcctaaaatctaaaaaaggacatattagggctatacggattcgaaccgtagaccttctcggtaaaacagatcaaacggattattatcgaaatgattcgaactgtttcaaagacccaacatgcatttttttgcattgggctcttttatcaactgatagaaagatcagttagtccaccatagtttttctttacggaaagataatgagatggctccctgcgctctgattgattatttgtattatgatctatctaagagcaataccaaagtgtttcaaaggaggattaccttgacttaggtctgcctccggcctaaattaaatcaacctaagtgaaatagagtctctatcgttccgctacaagagttgactatgagacttcatacaccttaaagttcatagaacgaaaagaatttttttggaggcccttatcctcattaagcctagcatttagtgggctggatatttaccttatcaactagcaaatcaataaaggttctatttgtttaggcacctggattggtacctgaatcggactgaaccaactatttgtcaggcgactgttctcctattctctcgaatccatgaagtaagacattgattttgcaagaagatccactatgttcattgcataataagctcccatgaaaagcattggcgcacgtgtaaacgagttgctctaccgaactgagctatagcccttgtcagagatatcttaatatatagagaatttcttgtcaagatgaatattctctaatagtagaggatatcctttgatctgtttactataataacataccaataactaagcggtatttgcttataaaaaggattcgatctataatcaatcgaagtaaagggtcttcctttgtggtgataaattgcctacttaactcagtggttagagtattgctttcatatggcgggagtcattggttcaaatccaatagtaggtaggtagatagaaaaattactagatagcattggccctacttcgcttcgctatctaataattttttctacccctcttccctttttctttgtatcaactaaaccgttgggttgtcttcaattagatgggggaatccaattaacagcctcgactcgtatcctagctcgtctgagagctaccttcgcttcaaccaattctttcgtaccctcagctctactcacgttagcttcggctatttcaagtgcctgttgagcttcttccggatcaatgtcactacccagttccgcatcatttcctaaaatgatgatctcattattaactattctggcaaaactgctccacagaaccgccgttaaccatttatcgttgaggaggcgtattctcaagggacccatatctacagctgtgttaatgggggcgtggtttggtaatacgccaatttggccactattagtagataaaatgatttctttcacttcacaattccaaataattcgcttaggagtcagtacataaagatttaatttcatttcttcaatttgttctcctcttctaagtttatagctttcgtgctagcttcatcgatgttacccaccaaataaaaagcctgttcgggtaggccgtctaattctccggaaaggattagttgaaatcccctaatagtttctgcaagaccaacatactttnnnnnnnnnnnnnnnnnnnnnnnnnnnnnnnnnnnnnnnnnnnnnnnnnnnnnnncaatttttcgtgctcttgctacagttaaacgatcctcctccgataattcatccaacccaagaattgcgataatgtcctgaagttctttgtcaatggctctaagtaagaaaagctttatcagattctattttccgaagttgcacctacaactattcattgaaaagaatcctactcttatgggtaaatgctcaatatccaagtgggcttacaaatttgatcatgatcaattgctttgtggattgtctcgcgtctcttgattagttggtatttatcccccccaatattgcaagtttcttacgtccaaacaaagtatttacttgttactaataaaaaatcaaaaagtttagactacgttcttccttagatcccttcttttactccgatagtattgcatatcgcaatcgatgcaaagaaaatgaatgcatttccatactataataaaaagtaagtgtaataaatagagaattggatcatgtcacatgacttattccactcctgccatctcggagtccagggaagcgcacagatagagcaaggaagagaaggggggaaaaatgaaaagaaaaatatgggatgtggaaggatcccattgtgaaaagatgttttcggaaggatcgcggggaggtttcaccgtttgagagatccaacagctcgcattgtctggtgtagaaatcagacggcccataatttcttgaagacgtgggtttattgagttttacttttcacttagttagataggcattcattagctagccactcttagcacctaagagcagtcctactattagccagctatagatatattttaacgagctaaaagatgagagagaagaatagtgggttacagatctgtagccagctgcagcacggactccaagacgcagtgtgtgtatgacaggtgggaccatatatcaatagtatagtaagcaactattgtatgaattggctattagattggctatagatgaattagagctagtagttggttatactattaaatttgctctaagaggcatcatgtctgaggttttgtttgaaattcaggatatggaaaacgtaggaacattaaaaacataacataggaaataataggaatatgataggattgtaggtttaaaacggagtgattataaagcataggaaaactgagcaaactattgttcggaagcgcaaagaaaaactcagaaatcttattcactaatagaagtaactcgataacatattatcaaattgtacttagatggtacaagcaactgatgtgtgggccaaggaacagtaaaccatcgttacaaaggccaattgagttgatttatttctccctttgcatcggtcctatatatggaaagccagcaaaaaaaaaaaagagggactctcgacatgacaaacggctcaaaattttttgggtttcagccgttttttctcaccgtgcgataaatacacgcgtcacccatcccctcccgcacaaaaatcccacccgagtagctggtagtgcgctttgcacaaacggcacaacaaaatcccgcttgtgtttgttttgtccgtgtgggtttagtccacaaaagaaaaaggcccatgacgttttatctttgtagaaagcccacatcccgcaaggagaaaaaaaccaaggactatttttatccgtgtaaacaagcccagaaaaagaagcacacatcgtgcaactcttattttttaggaacccacatcctggacttcttttttagagacacacaacctgcacttttctgtgctgctccagtacgtcttgctgcatgaaccatgctggtttggttttgttagtgatatgctctagaggcaatcataaagataattatatcacataatatgtttatatatttatccgacattgttctttaaaatagataacacattattggttaatgaatatgtgattctttcatgagactttttatgttgtatgttactatttctgaaggatccctgatcaaatatcatatgtggaacaaatatgtttaaatgatcagcacatgtattaattgatgattatgtttcatggatcatggtatagagataccaaattaataatgtggacacatgttggggaacatgttgttggatagacccaacatgatacattgcaagagccatatgtgttgtgttatcagtgatctcatttagtgttggtgttgaatccttagacctgagattatcatggttcccaacatatgtagtatcttacttagggactgctaaacgctactccgtaattgggtagttataaaaatagttttcgggtatgctatgaaacatatagttagatatgtataatcaagatgggatttgctccttctatggagagatatctctgggcccctcgatgttatagattatgaaagtgcatggccataccaaaggtcattgaggagtcaatcacaagttatatatataatatatcacatgttcgagtgaatgattgagctattagaggatgtcatatatctagccttgagcttaatcgatatcatgaggcaaaggtgttcatacatgtatacactagatattcagccgatatgatctttatgtatgcccggtgggtcaatacattctgctaggggccaccgttgacacgtggaccgaaaaggagttttcgggttacagctgagtgtacatgaacctacaggattgcacgcttattgggccggaataaggggattagatggagatccaatatgagcttaattcgaatagggatccgagttggagtcctacggaccttcacggatcctatatatttgtgaggggtatgaccggcggaggtattgcatcacgtgagaaagcctagccgccactcccctccacgagcaaaaaaccctagccgcacgcgggtgctagcacatctgcgcgtggcgttccgtccctgtacgtgtggatactggtagagacgccgctgctttgcggtgctgatcagcgtgggagcacggcgaggagaacgcacgaggaggagaaggtcgagccggtgtgatcgactacttcctctacatcgacgcgcgctacatcgcgagggttccttcgccttcttagcgctttcttccactgcgcagcgcgtcgagtggtaacgatctatgatctaatacttgcatggttcctgatttacgcagtaatttatactatcgtagcctacgcgtgtctcaacaggtttcacatttttttttcaagaagtgttcctgccaaacaaaataaaaaggttatattaggacgacatgattgcatacaaatatggggagcaaaatactaggttcagaaaactgtcagagttaattctgaactgttaaatatgttgaaaactacgttaaccccaaagatgcaatatggcgtgatgcatcattcatgctgagatgcaacaaacatgtattgacgttgtgttgctattggaaaattactattcttggcctagttctttttccaaacttcaaacttcaacttcctcgtttttcattagcacgtttttcaaactattattaaatggtgtgtttttaataaaaaagtttctaagtagaagttgtttaaaaaattccaatgaatctattttctaattttatacttcaataattaatacttaattaatcatgtactaatgagctttctcgctaaaaatctctctcaactcacctatcgaacggggccagtagaacaaataaagagcatcagataaagtagcccatagtctcgcgcaccttgcgcttagatcgaaggagtctgtagtttggcgtcttcaggcgccggagtgtgttcataatcttttagccctcgattgtaaccctatgattgatgagtaataaagcttcatgtttccctcgcaaaaaaaaaaaagaacatcagacaatgtgtagcaaggaaaattgtgtagttgttatgactcaaactaaaaataggtgctatgcatgcacagttatagtcaaatttgtgggcacaaattttaattgctacatcaaggaaatttgcattcgcaactatagcaaatttgcaagcacagctagaaatctatacctatagtataattgggaacttcataggagctcccacgttaaccagtaaaatcagatcgttaatttgatacatcatataatcctaaccattgattataaactctaatctacattagcatgatgggcctgatgtaaagcccatccaatcaaccgctttaattatagtgatgggcgtgcgttccactccagtcttgcacctaatcttcgttttcttccacaaccttatgtcaatcaagagatcaatcaatccactgctcctactcttcctctcagagttcaatccatggtgtttttttttccctggtcatcaatgatttgcaaatagtgataatcatttactcaattttgatgcatcttcacgtagccaaatcaaatagccgatgaatcaaatttaaaacagatctatgtaggccatgccctagctaatctagagcaggaagtttcatgtaaatctcacacctccttgcaatacatagacaattgatcttctgattttatctgacaatagattaaatatttcttctttccaggtgattgctagatattataattgaatataccataccagacatgttctcttacagtttttgccagtacttgttttctttaataaagaacatttgttgcatgccttaatacaattataaataatattcattggttcaacatggtccaggataatgttctgcttataatattggtaccttggaaaatttgatcttcaaaacaaaatgtatacaataatttacttcccaagctacggtaaatagcttaaattcatcagtcaatattaaattccatattttacttttttttaaggtgattgctatatgtttctgcagggcaccataatacatttgttgacggttgttagcgatcagtttcaatcgtcaatattaccaaaatagagaagaactagttatacttgcaatgcatatccatgttagtataataatattccactagtattagattcactagccttttatagagaataaccattaagtggaggagaatcgatatcaaatcagatgatatatcaatcggacgatgtcgagaatcaaacttatgtatgaatgggccaagaactcagaaatgacacaaccaattgggccaaaattcacaagtctgcagagaagagaagtctaagaggccaccagccaacttgtgggctagttaggccagcccagggttcggccgaaccaatgccagcaccgatggatgcatggttttgagggaacagtggagattcactccctatggcggttagagggtattaccgactattccaaccgccataaccgtcattatatctacctatttaaagagctcctctttcatttcactcatacacctcaagcaaagctctctcatattctctcgagtttagtttagtgttcttaagctagtggaataggaatagagtagaaatcggagtccagaagccttcggaagagttcggatatggctctagtagctcttctcttctcttttgtaagctttgtactattattagaatactcttctttatacatttatggtattaaaatactttccgagtatatgaatgccaactttatattatgtttatgttgtactgattatactgctagcttatctgggagatgccttggtgcgggtataatgtttttatatgcaattactccatgtcatgacgatgatattagagtagtatctggtagttttggcgtggtgtctagattacgggatatcattatttggggttatatgctgcggatgagaggtgggccgctgatggtgacagctcagtacaggtattcctctacacgtatatatagtcctaagttaattttctggggagggtactcctccgtatttagcttcggttgtatggtcatgacggactgtcgtaaggaacttggcaatcaggggtggcttctcgaagcactaggagggtatcggatagagggtattagctagtatatcagataactaggatatatgtatactatgtatactagaagtataggaatagattctcgttctcttttctttccactttgcttagatattttagtatgagaatgagtagctccatgctgttgtgtcactctgcttagactatgattatattaacccctgcttagactatgattattacaagtaacatataaattattagtcaggttctctctaccatgatctttccacgggattaaataaatacgatacccttggaatactctcgggtaaaatgctacaatggtatatccgtgcgcttgcggatgaactctataaccataatatactaggaggatttctgcaccattgctgggaattatatttctggcaatgtcgttaagaaatatcaacaagcatttctggcgccgttgccggggacgattcataatagagattaccagaactaatactgtaacagccctaggtcaattaccaggtaattagaaatgcaattatcatcacttaggttgcatctttactttattgcaagtaattacatgtgatagcaatttaaactttaaccggcaaaaccaaagcaacttctaaatgaaaaataacttgaacagaagtatatgtgtttaatattttattcaaatattagtttatttatcatcactaaatataaattttgtggaatttttactctctgtttaggcctcctaaaaattcaaaccaactttcagcctaaccaatttcatcttttcaccagatttaaaacacttggaatttatgtgtgaaactttgaaaaatggaacctagaaacctacacctatcaccacaccaaatttctacatttttgaacttgttttacctagtcaaattgaatttaccaagagagggaaagaaaataaatattggaaattgcaagaacgaatttatactcagtttttcacccacctctctcaccctcatagacagccacgacttgggcccacttgtcactgaccttgggtgcctctttagccccacaacacacccatgggcgtgctcccacctcaggacttaagggggtagagaaaaccccatcttcttcctcgcctttcatcttcactgcttgttctttcttttcttcatcaagctgagctctcatctcacttctcctccccaaatcccatccaatagcctaagatcaatccctgcatgtaagaccacaacaatccctatcataaaaactttgcatccatcccaacatcttgcacatgcatggagagttgagagagatcgagaaggaacaaaagagtggtggtttcagcctgcagggctgcagcagcagcattttgttttcctccatttggtaagcttccatttcatccatggtgcctcttttggattccctccatgttgaacatctatagcaatgttctataggttgtccactccattgctgcagctagaaggtggctgcaactcaccccgagttcatatcttttgatttcggttgaagcagccctaggcaacgtctcttgccgtcagcccaagaccttgctccatctcttgccatcagcccgaggccttagcctcgcatgaccctacgtccaggttgctaccatgtgagcgaagtccgatggaagttggagaaaaggggagtgaaaatagaaatcgatttcaaagatatctattgagctaaaagaggtatgcgctttaaaaattcataactaattcatatgaactccgaattcagtgaaccaaatttctgtggattaagaaaaacgtgatcttcaatgttgtaaaataaaaatgaccaacttttgtactggttttcccagtaaaaatataaatagctaatatgtatcccttgtgtggtctagctcttaataaattcgcaagaaattattggtaaaagctaaaattgtgaaaccaattttgttgagcttatattttagtactctttgctgttgtggtgttgtttttggcaaaaatacctcttaaatcttgtttagcagttatttagcattcccatgattttaacttgtaaaacccatatataaatgagataatccatgaaatgccattgacaagcgtcccagaaatgccgttaacggcgcggaatggacggaaccctaacggcgatggcatttttgggacaaaatcgtttgtacgatggcatttattggaactcacacttgtcgatggcatttctgggacttagacgcttgtcaatggcatttcatggattatctctatataaataatgacaacagatacagctgtgaaatattttttcttagaacctgtgagtgatgtaatttactctaaaaataatcattattatgaaatcttggtttgaaatgcatgttacttgtaatgtactaaaggaaatgttaatatttacagaactgccattttcaacacctgagagcttgtcattttcatatctcccaaaccataagtgataatctagtgattctttcaactaaattcaagttaaaatatgatctacccactatatttatttcataatttattgatcattttgcatgtgcatgtttatttggctcttattcgcatattacttcttttcgatagattcggagattccggagagtaacgagccatatcctgaggaggatagtgactaccctcagcagcaaggcaagcacctaagcatatagaacctgtgctttctctaaaaatgatttggttgcaatctatacgtatatatatatgcatgtattgcctagatattaatattgtcgatttatggtgtatgggtagaacctatttatgcatttagttcttgtgatattgctgtccttataccccattaccattggttgggattgcttgggatgtcttattcattaatgcttagccatgcttagtgctaatagaactatagtgatagacagtgctattaattgtggtatatagacaacttgcattattgggcataaaacttgagcacttacactactaaataatggttgatgaaatatgttggacttggacgggtgatagggcaatgatgggaggttggtttcccctgatgcaagtagccccgtctaggttgttaaggactgaacattttgacatctaatcaagcaccctacgtacttatcacatgccttattttgggaccggcttgttcttactagttctattgtgatcatttataccacgttggagagttgtgaggcaggtagcctttggagggcctcgggtgcctaggtttggccgggggtgcctcccgcgtggcgcgcccgccttggtcacatcacgcacgcacgtgactgagtcgtcgggaaggctagcgtggtataggtggttggggtggggctaagaaagggcatgtaatgagcttgaatcacttgtgtaccgcagttgacggggtgtgtagcatttgatctttgttcatttcgtgtgggaccagttgtacacctctgatcagagtataatctattcgaatagtcgcgtcctcggtgatggacaatgcttgatgtgttagtcagttatgttagcatcaaatgtggattattatggatgggattatgttcgatggtggtgttggcatgttgtgccatgttggtatagactttggtagtccatggttgatgatgagagcgccgtttgggctcatttgcttatacatttcagaattatatacttgctgtccataaattaaaatgatgctagatttacttatccttgcttattttactcattaattgctcaataaaattagctttatgcaaatgttgaacctagagacccactatagcctagaaagcttgcatacttctctctcccttatgtatatataattttgggtaagacttgcgagtacaatcttgtacttaacccggtgtctgcaatttcaagagaggattccggttatgagttatgcttcttgtgtggtaattgcttagacgagggcggcgagggcaatgagtgatctcttgcagcttggctcttgcccggttggtttgcattagtggggttgtggcaccaccggttttatcttttgcttatgaactctatttgagacttccgctgctatatttatgtgttgtatgttgggacctcggaccctattatgtgccatgtacctcgctgcactttaaccctattatggtacttgctatgtttttaattgcttccgatgaaagtgtgaggctaatcacattcctggggactagctaagcatgagtaacgagttttgatcgcttgagataattggggatagcgctttggattgagtcactggggtatacttttggtcgccaccttcgagtggttgacgggcatatgacggagtggactggcaagctatcttacggttatgtcttgcgctcactacttgacattccggttattataacagaaggttgtcaaccgcgatcatggacacattgaggacgaatggctatttatgcgtatatggatcccacttctccaatagtatgtggtggtcgcgttggacactggatggtataatattcggggtgtccccaaatactttatatttacctctgtataatcactgccctttgcaggctaaccttggttgttttcacttttgttgtgaaaacggggtagtgcatgactggtttcaacctaccggaaaactttaaggaaaatccagaagctttcttccggagcgtcaagccgcaagtcatcgctccgtagaaaactctaccgataaagaaaccagccataccagcttcaccgaccttcaagaccatggctgataagaccctccgtgaattcgctgctccctttgctgacaatgttccattgggccgcatatcaacatgggagatgtggatttcgatctaaagtccagcctcatcacgatgacacatgctagcccgttctgcggcaagcctaatgaggatgccaatgctcatttgcagcagttcctggagatttgtagtacgtacaccatgaagggtgtcagtcctccttaaaggctcttgtctttgcgcaagctaaaaccactaatgccttaagcaaaaagctagctgtcaatgacaaggtcttagagaacattaatgtcaagctagatggcttcgcttctgctttccaaaactagctgagctttactaagatgatagaaacccagctagctcaattggcttcataggtacctgcaagtgaatctgggagaattccggggcagtctgactcctccattgaaaatgtcaaggcgatcacaatgaggggaggtaagtccactcgtgatccaccgtatcccatgttgatggtcgttatcgatcagtttcgaccgtcaatattactaaaatagaggagaactagtgatgcttgcaatgcatatatctgttagaataataatattccactagtattaggtatactaaccttttgcagagaatgacaataaagtggaggagaatcgacatcaactcagacgataaatcaatcggacggtatcgagaaccagacttacgtatgaatgggctaagaactcagaaataacacgacacactgggccaaaattcacaagtctacggaggaggacaacaaaggaggccgcaagcaaagatgggttgggttgggccagcccatggtttggccgaaccatagggttcgacggaacctcccatggcgctgatggatgcaggttttggatggacggctgggattgatccccaatgacagttggagggtattatcgaccattccaaccgttacaaccgtcattacctgcctataaaaggagctcatcttctcacttcaaacacacacctcaagcaatagctctctcatattctctcaagtttagtttagtagtatctagctggtggaataggaatatagtagaaatcaggagtccggaagtcttcggaagagttcgggtatgactctagtagcttttctcttctcttttgtacgctttgtacttttattagaatactcttctatatacatttatggtattgaaatactttctgagtatatgaatgcctactttacattatgttaatgttatactgaatatacggcttttgtgcgggtataatatttacatatgcaattactctatgtcatgacgatgatattagagtactatctggtagtttagatgtggtgtctagattgcgggatatcattatttggggttatatgctgcggatgagaggtgggccgcttatagtgacagctcagtacgggtattcctccgcgcctgtatataatcctaagttaattccctggggagggtattcctccgtatttagccccggttgtatggtcatgacgggctgtcgtaaggaactcggcagtcaggggtggcttctcaaagtaccaggagggcatcggatagagggtattagctagtatatcggttaactagaatgtatgtatactatgtatattagaagtataggaatagattttctttctcttttctttccacttagcttagataatatattatgagaatgagtagctaatgcttgtgtgtcactctacccttggaatactctcgggtgaaaagctacaatgttatatccgtgcgcttgcggacgtgcgcttgcggatgaactctataaccataatataccagaagtatttctgcgtcattgctgggaattatatttctagtaatgtcgttaagaaataccaacatcctaaccctataggaactaatggtatcgccaaggaagcaccatctagtaattcggctgatgaagaggttcaaccagagaaggctgtgctgcaggagtactgcgacacacggttgctgccgtttcctcaatggattaggaaaccatcggtggacgagcagttcactcgttttgttgaagtaatccagaagattcacatcaacatgccgttgttggatgctatgcaagtgccaacatgtgcccgttatctcaaggatatcctcaacaacaagagaccgctcccaacaaaggaggtggtcaagctgacggagcaatgcagcaatgccatactccacaagctcccagagaagaagaaatattcgaggtgtccaacgatcacctgttcgatcggggcacaatagttcgaccaagccttgtgtgatcttggagcaagtatcaacgtcatgcccaaacacgtctttgacaaattcaacttcacggtattggcaccaacaccgatgcgcctactagtattaaataaatacgatacccttagaatactctcgggtgaaatgctacaatggtatatccgtgcgcttgcgaatgaactctgtaaccataatataccagaagtatttctgcgccattgctgggaattatatttctagtaatgtcgttaagaaataccaacaacattgtattccctctgtttcataatgtaagactttccagcactgtctacactcatatatatgttaatgaatctagacacaacatctaaataaatatggacaatgctagaaagtcttatattatgaaacggaggaagtattttatatatgattctatatagtattttgaccattaatgactgaggaatcagactacatgataacaattttcaaggtttcatcacaatgtctacctctacaggaaatcaaataattccagaaaacactgagaaatagaacagagttttatatatttgctccggcgcatatatctcaacctttcttcattttgctcatctagttatatttgggagtcgtacggtgtgagaaatacgcgggagtagatcgttgggaatcacaacatcacaagataaatttcgctagcgtcggcgtgtatcgaggcacatacaacaaggtgtagcaagcgacagatcgattaattgcagtctgcagaccagtcgaagcacacgtaccacatcggcagccagcagatattcttcaaatatttagtagcttacatatgtaatctacacatgttagttcttgagaatatctcatatagatcaggactgccagcaggaggaagcgacatggcgcatatacacaacgctagacaagatctgctcagaatactcagcacaattatgtataaatgtcgtattcatatacatgtgtttcgaacacttttgcatcaatatttctctttatatctaccgaattcatgccatttgttttttttatgaattgtcatgttttggtcaaggtagtttgattttgtcgtcaaaatttatattttaaaattatacagttccaatatcttattatatttataataacttaaaatacttataacattatctatctatagaatattcaactatccacaaagaagaacatagtaagtttattttcatttggatattgctaaaacattagaaatgccaaacagatacaattctatactttatgagctgctaaagaggatgcatgatataatgatgttaaaagatatctcacatccacaatataacgattgcattgagtctgaataggaccacaattcctgtttacaaaattaaatactgaggttattagcaatataggatttctggaaaataatattaaaaataaaagaaaatacagaatagtttggacaaaagaatatattgtgtttgttcgattagtccaaatgactcttttttaaaaaaataaagttaccctgtgcaacgcacgggttaacgtctagtaagacaaaatacaacatggagatgcgtgcaatttttctgattgatgctatgcaagcacatgttcagaaaatccagaaaatagattgtgcacattaaggccctgtttagttcccaaaccaaaaaaatttcacccttcacatcgaatgtttagacatatgcatgtagtattaaatataaaaataaaactaattacatagattgaatgtaaattgcgagtcgaatcttttaagcctaattgcgccatgatgcgataacatggtgttacagtaaacatttgctaatgaaggattaattaggcttaataaattcatctcgcagttttcaggcggaatctgtaattcgttttgttattagtctacgcaaatatgtgtacgtatatccgatgtgacatgccaaaaattttcattcgcgaactaaactagccctaaatctacttttctgaactagttactattttcctttcaacatacggttaaatttgtataaaaaagcaaggagaacatacaagttctaagattttcagatttctgaattcgaaacatgcacagaactgaacatggtcggtgctaactaataaaacatcatctttaactaaatttgccaactaaaatttcagaacataaataaccactatttgagtggaaaatgcgcgtattgacctagttactagttactattaactgttgaattttatgttggcaacatgaaattttggagaataaaagctgacctgaaaaaagagaatgaacaaatgctgtcccattctttctgaacacagccattttgaaccccttatccacacgcaaggattccctttggcactagtcgaatctgaacacgcctttcacgagaaaatatcaatggttgacaaaaacaaatatgatattgatagcactgtcagtctatcacaagcatgcattagctactcagcacaaaaatattaaaaatttaacagttgatgtattaaaaattcaatacaaatctactgaatctcatcctatcccaaactcaagatgcattacttggccaagaacctatcctttgcagtacatagctcaccttccctacttcaagaaacacacaattttacaaaaacaatcactctgacttcccttgtctgatatagctattagaaaattattagtcctagtaga

SEQ ID NO: 5724 - DNA, 23877 bp, Oryza sativa
ctccccctcccacccttcccaccccacccacccccaggaccctaattcgtcggcccttcgctagagtttgggttgtcgctggcgccggagaaagaagaggagttcgtcggagttggagaagaagcagttggagcacgaattgcgaagcacatccagtgaaccaaaatttgcaaggtttggaggtaggttttctgtcgactgaagtttagcaattctgttttttttttttcaccgtgctggatggtttaattttaactacatttttttattgtatacagagcgttgctattttacaattgttggtatttcttaacgacattacagaaatataattctcagcaatgccacagaaatacttctggtatattatggttacagagttcatccgcaagcgcacggatataccattgtaacatttcacccgagagtattccaagggtatcgtattaattttatcctgtgggaagatcatgtagagagaacttgattaataatttatatgttacttgtgataatcatagcctaagcaggagttaagataatccaagggtagagtgacacacaagcagtagctactcatataatatattatctaagctaagtggaaagaaattagtaaaggaaatatattcctatacttctagtatacatagtatacatacattctagttatttgatatactagctaataccctctatccgatgccctcctggtacttcgagaagccacccctgactgccgagttccttacgacagcccgtcatgaccatacaaccagggctaaatacggaggaataccctcccagggaattaacttaggattatatacacatgtggaggaatacccgtactgagctgtcaccatcagcggcccacctctcatccgcagcatataaccccaaataatgatatcccgtaacctagacaccatgtataaactaccagatactactctaatatcatcgtcatgacatagagtaattgcataagcaaacattatacccgcactaaagcatctcccagataagctagtagtatattcagtataacaagaacataatgtaaagtaggcattcatatactcggaaagtatttcaataccataaatgtatatagaagagtattctaataatattacaaagccatacccgaaggcttatagaagagaagagaagagctagtagagtcatgcccgaactcttccaaaggctttcggactcctgatttctattctgttcctattccactagcttgatactactaaaataaacttgagagaatatgagagagctttgcttgaggtgtgtgtgtgaagtaaggagaagagctccttaaataggcaggtaatgacggttatggcggttggaatggtcggtaataccctccaaccgccatagggggtgaatctccaccgttccctcaaaaccctgcatccattggcgctggcattggttcggccgaaccctgggctggcccaactagcccacaagttggctggtggcctcctggacttctcctctccatagacttgtgaattttggcccaattaatcgtgtcatttctgagtttttggcccattcatacataagactgattctcgacatcgcccgattgatttattgtttgtgttgatatcgattcttctccactttatggtcattctctgcaaaaaggttagtatacctaatactagtggaatattattattctaacatatatatgcattgcaagccttactagttctcttttattttgttaatattgacggtcgaaactgatcgataacgaccgtcaacaacaatcactgattctctctttatagtatacttgagaactccaaaaaagtgcatgttcccataaaattgttgcatatacagttaacaaaattaaatatgtacaagtatttatccgaagacatatatgtgtctttagtacaacatattaacaaaaataaaaatatgtattagactggggcatccaaatacatgcaaacataatattgagatgttataaagcgcctctaagagcgtctccacgttaattcagttatggcgcaaatgtttgttctaaaaatgattatttatttatagagaaacagctaaaacgactatatgtgtttatggagacgtgcttcaagcgtgtccagtgaacgtctcagattttgtagaggtgttttgtaaaatgtctctatatttttgagacggtcctgggggaggtgttcctataacgctttataaaaatgcctcaactatctactagagatgaaacaaaacgtctctattctttataaaaatgtcttctttgggggtgttttgttttagtggggtcctattgccacaccgatacaaggttccagacttctccaagtttttagggcaagatgatatatctacaatggaacacatcagccgattcttagctcaatgtggtgaagcatcggttgaggaggctctgaaagttagattttttttccatcatctttgactggattggctttcacatggttttcatcattaccatcaaattctatccgaggatgggccgatcttaagaagcaatttcatgattacttctttgctggaatcaatgagttaaaacttttagacttaatatcggttgagcagcaagaaggagaatcggctatggaatatattcagagatttcgtaatattcgcagccaatgttatgatttgagcctaagtgatgagcagttagtagatcttgcattacaaggattgtcagcacctatcagagagatttttttgccacgagtttgacagtctggctcatctaatgcaaacagcatcggctctagttttggagttatcaagatcagacagaaataattttgaagcatgagttctcatactccaaaattggggggcatgtgttaacagtgaagtttggtaagccccgaagtcaacatcagagcttcagagtcctggaattagccgacgggaattatcaagatcagttctggagttatcaagaccagaattttgaagcatgagttctcatactccaaaattggggggcatgtgttaacggtgaaatttggtaagccccgaagtcatcatcggcctagagtcagtattggcttcagagtcctggaattggccgacgggaattatcaagtcgccaatagtcggattcttgctatattcagtttgtgtttagtgtctgattcggactttatgttttccttttatctttagaaagtttctttcttgtccaaccaggactagtatctacaaatgggtgtaaatatgtatacccggggccattgtaaactatctctcaaatcaatacaactaccctcgtcgcattgccaccatctctactgaggtttttacttatcatccggtggaacttggcacctgacgcggggctgcattggctttcgattttcagcgaaggggtaatgtcacaccctgaagttcttctcccaagccgaaattaaattaataaatgatctcaagaaattgtctgtgtaatggcaagagagaaaccctaatttaataaatgcaaataaaaatcgaaattggcatatggaatttttcttgggttctacatgtcaaaatatgctaacaggatttttaatggaattttcagagctctagaaataattttaaccaattaaaacttagcacaagcaattattaaatccctagaaattctttttcctttttcctttccttttggccccctccttttccttcttgggccactggcccatttccctcctcccctcccgcgcgccccctccattgggccggcccagccgccccgcgccccctcctcgctccaggacaccgacaagtggggcccacctgtcgggcccgtccccaacctccggccggcgcccgcgccgcgcctgcaaccgttgccgcctgcctctcccgcacgtgcatgttgcctgctcctacgccctctcccgcacgtgccgcaaccgccgccccactttcccccgccccccgcgccgcgcccgagatggccgggattcaaaaatcgaatcccgcctctctctcctcccccacctcccccacttcaccggccactccccgcctcccccggccacatctagcctccccggccctatataaagcacacccgccccctcctccacctttttcccgttctcgccgagctctcccgtgccctccatcgtcctagcgccgcgcaccacccgccactgccgctttagccacctccggctgctgctcgccgccgttagagtcgccgccgagcctcgccgtcgcgttcgccgcctcaagcgccacaccgtccacccctccgttggccgaatctgccgccggaacttgcctcccaccgcgcaccggtgagcttgccattgccaccaccttcggccggcgtctccgctcgttttgctccccctctccccctcaagtccctctcatttgcttctttaggttgccccgcagtccgtcccgccgtcgccattgctttccgcttgtcgccatcgtcaatcgtcgtcagtgaggcctcctcctccccttcctctctctctcgggccacttagccgtcggccgctcactgccggtcgacgccttgcgccgtcgctgcgtagcaccgcgccgccacgcgccagggccgccgggtcggcttcagccgcccgcacgcgcccggccgcgcgccgcctctgccgtccggggctgttcatcgccacccgtgtggcagcccacgtggccgccacgtcagcgccacgtgtgcgccacatggcgctctcttccccggtcccgtggactcggcccaccatggaccggcggcattgagccgatgacatgtggggctcgtatgttggcgccgcgcccccccctttgctgacgtcaccagggttaataattgcacaataaatcaattaagacttttctttttatagtaaaaacacagtgaatcttctaaaattcatagaaaattcatccgtgccccgtttaagcccattcaagtctcagtaaatcgagaaaaatgtaaagaatccattaaaaattgttttgttctctgtttcagtagtcttatagcctgtttgcattgttttccttgtatgtcgcatagatttcgtgtctcccgacgctccggtgtacttcgaaatagtcgccgaagttcctccagccacagagcaaggctagtaatgcttttctcttgaacatattgatctcatattgcaaatgctctactattttcctttaaatattgcattgttttataatgttactatcggatgattacctactgtctcagccatactatttgttatcctgttccttgctagcttgggtcgtaacatgactagatgttggattagggattgcttagccatgcttagttcaactagtacacaatggaggaactacattaatgcatagacttcagattctagtattgatgttggattagtgccactgctttggtgttggctaattaaaatatattaaatggtgggctatgggtgcatggttttgatggtcgcgcccatggcaattaaggaccggttcgcgggattccctggaagaatttatcgtacttaccacaagccagcgtaggcaacggctgggcttgtagtgtggcttttctctagctgacgcatccaggcaagggtgggcgtgatggagcgggatgggccctgcgacggcctttgtcgcttccggattcacctaggcacgagaggggattgcccgctgccttgcgaggagtgggggtgaaacctgaggtgtggtgtgcttggttagaggggcttatgtgaagggtcctttcacggcctctttccggtatgtcgtggtggcatgccggcgcacgggaacgtgtcgtggggttgtgtcttgtggtacagttgtataccttttatcagagtaaaactattcgaatagccatgcccacggttatgggtggtcaaccagattcactgtgattagtctcaccctagtttagctcgatggaactgattagttcaggtggtgggttgggcctgtctcaacgtggtgtagtgttgagcagtgattgttttaatattggttaattactacaactgttttactgctttcaactactatttataaatgctagctttatgtaaatgaaaccccttttagccttctttggttatatcctgcatcataccctccgttccggtatgacttgctgagtacagtggatagtactcagtcttgctctatctcccaatccctcagagtttgagtatgcgtccgatggtggtttctccgaggagtaggcttcgtccgtgccatcgaggatgcctgtggagtggtgttctccgctactatccaagtcaaggcttagctctagttatcctttaatttccgttgcatttgtgtaagacttttataatgtttgtaagacgcggatctgtatgtcaactttgtcatttgtataccctggccggtcctggacaggggttttattgcacattctacttggaattctattcgggaatttctgggtgtgacaggtaagtcctatgttccgccggacttggcaattgtattggctacattggtgttgttgaaggatgcatcgcttcgacccttcgatcgctctgttttggttgatatatttgcctacctatttatcatatatcttagttaatctagtttcagtatatcgatttggtcatatcaactaattcttgctttaggatttatgccggtatcggctaaatcgctttactagattagattagctaaggtatctaccacccctgaaaataagtcaagggcttcattgtctagatattgtgcttcttttcatacttagtgctgcatcagtacattcgacctactaagtcgtgtttagaaccatgatctctaggctgcttttgattgccaataagggattcatcggggtttcagccgatgagttatctagatgttgcatcggcttataaggattacatacaggttgggtttagcctattgcaacaaaggtttcacttccagctgatgtatgctttaaccatcggatcgcttattctattatatcattgttagccgactaatttctattggattatattgttgttttttacattatcattagctgattgcctttattgtaatttactcaagtgtcagaatatatattggatatattgctcaaaaccctatcactatcggctagcatcggcatcggcttgaattactccatcggtttgtcagccgatcggctctttgatctgctatttatatcgcttgtcatttgtcagatcaaactgactggcacgcccgtatctcatcaacctttggacctgcactggagctaagtagatctcccaggccgttgtgttcattgacttagtccgcgcttgtaaagttttggcaccatcggccgagcgcggatttttcgttaacaatgtcatttttctggaaaaatggaaataaagagaatgctactgcttctttaccttctcccccaatttcttttccttgcataaatatggagagggcatgactatttctttttctctctgttttttttatcatgctccatattttggaagaggatgttttttttattgctaagcctttccctgcttttctctttttcttttacaaatgatttttaggagaagaaggcataattggaattggagtatttatttggatggaaatgtgtggaaatagatgataccaacttccagtgtagaagcttagcttatttgtgcatcaatggtggatgagtacccttgatcatgaaagtatgagagacatctaacatgagtcacaataatttggcaacgcatgtatatgttttaacattgatatagttgtgtatgaccttggtacatagtgatgaagtcatttgaggagtaagaatccaaaattttagttttgaaaacaaaaatcccaagtgtcatgacaaagatcataaaactttccttcatcttaaccatctctcatgtaacaattacttagagcaattaggttccctaaaatggtagttgttcacaagtgacaactatagttgaatcacaggaaaatttcattagttgagagtttatccttttcaatttggccttgagttgaattttcatttaatcactgctcatgtactgaacaaaaaaggagagtatgaggaagtggacgtgcttacctgtacacctgacaaaattaagagagattggagccacgatgggttcagccgaaccaggggttcggccaaacccctctgacgcccattctctctgtaattttcagggaagttcagtgattgtcagaagtttagagatatgcattattttcagattttgcacgttaggagtccgaagtatcaccgccacacttatttttgaacctaaactttattgaatatcctagaaataaatggcttccattggggtaaacaccaatgagccaaaattattataataaagacatgcgcttacattgaacattaaagaaagcaaagattgaaaataaactaaagcgcctctaaactacttattaaatggggaaggcatctaattcgcataatacttgtcctccttccccatttcagtgaatgcgcttgttcttagtgcacattccacggctaaaggtgttgaaatcatgcctaagctcagcgagctcaacacctaatattgcggtcactcaactccttgttctccttacggagcttcttcacttgactcacgagtttagtgaccgaaggcttgtgcgattttcacttcatcttcttggtattgccccggcgcccgaatgataggaggaggagtcaaatgacgcctcaccttggcgggtgaggaaccaaccgactctgctgcctcgtccttttccatgggcgtcaaggggcggcacaagcccttgccgtacccaccgctaggggttctcactcccataatgcaaaacctctcccccttaggggttgatggagtggcggtgggtgtcttgtacttgtttagcacctcatctcctgccttggtgtacagagtgcccacatacttcttggcgggtagcagattggccttcaattgctcttcgaacaaccccctcgccgttattgggcctagcttgcccgtcgtactggtgaatcacccacaccttggtccttgtcatgtggcacggtgagagagatcgtgctgccgaacgcgtagccgaacggggccgggaaggattcggccaaaccagggagttcgccgaccggccccaaatcggccgaggagcttggcacgaagatgatgggttgcgcccacacagcgtttaccccctccattgtgtagtttttgacaggaactaattggttagccggagtgggttctccctctaggttaaacgtggaattggaggtggatccgatgtagggcatgagagattttccagccatgggggaacaatcactagtgtgaggggaattgagggaacttggaaaggagagaatgcaaaggaggagggaagaagagaggcttgagagtgctctgcgagttctagattgatctaccctgaaactcgcatcacaaacgaactaacacgagcgggggaggcatccattcaaaattggggccggcaggacgccaaattttgcacatctcttgactaggctaactcaagctagacatgatacaattttatagaatttaagcaaattttagatgagatcattatggttcgtagttgattaattcaataatatccacttctttatctaaaatttcattcggctcaaggaaaatttttaagcgctatctgtttaccttgaatatgttacctgagtcatcccggagtgtgattgctctgtgcggcgaggtatcgatgacatcatatggcccttcccatttgttgcgcaactttccatgtccaaatagcctttcccatttcctggcttgaatttcttgatgttttatccgcttgtcgtgccagcgttttgttctctccttataagtcttggaattgtgatataccttgtctctccattcttctagttcagctaactgcatttatctccattctccggctccctcaaaatccatattccagttttggattgccaagtacgctcaatgttcgagttctacagggagtcgacatgacttcccgtagattatctggtatgtggacaattccaatgggtgtcttatgggccgtccggtatgcctagagagcatcgggtagcttgtccttccatcctgtgcccaatttgttgatcattttctgtagaatattcttgatctgtttgtttgacgtttctgcttgtccacttgtctgaggatagtagggtgtagcgacgttgtgcttggtgcccatttcacgcaaaaggtatatgatggttttgtcaatgaaatgtgatcccccatcacttatgaccattcttggggcactaaagagaggaaagatgatttccaagaacatcttcttagcatgtttggcatccgtagccctacgcgacattgcttccacccatttagacacatagcctaccgctaccaggatatactcacaattatgggacttaggaaaggtcccataaagtcaataccccacacgtcgaatatctccacttgtaggttatacgtgagaggcattgcatcgtgagcagtgatccctccttacctttggcagctctggcatcgtttgacaaactccttggagtcttcatatattgttggccagaagaatccactctgccagatcttggcttgtgtgcggaatgcaccgtagtgtccaccatagggcgaagagtggcatctctctataatcttgagcccttagcaatccgtccgaacagactctatataggtatggctcatcctagatgtgacgtcagctctcatatttcagctttctctgattttcttccagtgatacgtactttaataccatgtagtttactatatttgcgtaacatgggttggagtcgtgcaccgtcattagcatatcgtcccatagaaagtcatttatcgggggttcctgcatgttagtgatttgcatcctcgacaaatgatctactatagtattttctactctctttttatccttaatttctaagtcaaattcttggagcagaagaatctatcttaaaagacttggcttagcatctttcttagtgagcaggtattttaaggcagcatgatctgtgtaaacaattaccttagctcctatcaagtaagatctaaacttatcgatagcaaaaacaaccgtaagaagctctatttcagttgtggcataatttttttcgacggttaaaacagcgggagaggctcctatatatatatatgtacaagattgagatattacagggtgggaagaataaattacagtgctatctaatggtttgtatccatgcttgccaactgggattgtctgctgcctttactctgtgcatatgccgagtaaaatcatccttgaaatctttggtccattttctgaagcttattggagttccattaaagatgaggtcatttcttatagcccagatattccaacagctaatgcccaggatttccatgaaaaaagaatgagggaacagatttttagttgccatgatcatattcatgaattccatatttaagttccaagttatgccaacatggttccaacattattatgcaaacggatatgagaaaaaaagtggatataatcttctgtgtttgtcacattgcacaccagacatttaattcctccctgagtagagtagttctttctttgaagcagttctttagtgtttagtctatccattaagagtagccaaagaaaaacctttattttcattgtgcttttacttttccaaatgagagtaagagggatttccggttggatatgggcgaagaagagcccatacaactttttggattgaaacagatttggagtccaaaagtaattccattgatcaggctcaatattggattgcatttgctggatgttatttcatagtgattgccactgagttatagctcctttaggaagtggggtgtagaaaaggtcctctacattattcgttaaggtgaagtgtctgtaagataggtattcctgttttgcataggagaatagaaggctgtgagtgtcttgaagtatctgaccattccaattatctttccaaaagggcagtgattttccagttccaatagttacagatgtgatggctctaaagatagggatcagcctgaagatgtctttccaccaaaaggagcctttttctttatgtgcatgaggaggtttttcagattcaacatagtatttgttccaaatcagattgacctagggtagatctttgcagttaaagaatttatctagatgttttgtgaggagagcaatattttggatttctagattgacaatttctaatccacccttgtttttctgcttacaagccagttcccatgctgccaaagattgtactgttgcatttgggtcacttgactttctccagaggcagtgtctacgagctcgatcaatatgttggataacttttttggggagtttgagagtacacatgtagtaagttggcagagcggagagtaccaaattaaccattatcaacctttggccatgggagaggaacactgaagtagatggtagtcttctttctattctatcaatcaggggtgcaaaatcaacaatctttggtttattagtgcccattggaagtccaaggtatgtgaagggcatagatccaatattgcatccaaatgtgccagctagaacctccattttgtggttatcaacatttattggaaccatgcatgacttgtgataattgattttaagacctgtgcaaacagagaaagtttgaaggagtgctccttgagacagaaaatttctttctgtatagctggcatgattattaaagtatcattagcatattggattactggaaaatagttgccattagttgggatggggagtgagataattccttcttctttcgccttgtttataatggattgtaggaggtcggctgccagcacaaacatgagaggggaaagagaatcaccttatcttactcctcttttgcacttaaattctttcccaggaactccattgagtagcacagatgtggaagcggtggtgagaatgtttcttacccatgaaatccaagtattgtcaaaaccttttgcttgaaggatttgtataatagcctcatgttccactggatcaaaggctttttcaaagtctattttcagaattacaatttctcttttgctttgatggcattggtggatgtactcaaaactccaggctagacagtcttgaatggttctgcccttaataaatccatattgattttcatggattagattcagaatgactgattgacatctattggccattatctttgaaataaatttcagagcagagttttgtagggcaattggtctgtaatcatttggggtttctgggttgggcttctttgggattaaagtaatgtaggagttgtttaggttctgaattgatgatcctccactaaagaaatgttctgctagagaatagaaatcttcggagatgatatgccagcatttcttaagaaaaagtccattgaagccatctggtcctggggctctgtcaattggtagattcttgataatttgatccatttcattcctagaaggtatagaggatagagcttccaggccctgaattctatgaaacagactgtttaggtttaggaccatttgtatatgttcagtagtacccattctgtttttgaaagaatttagtaagacttgtgctttttcttcatgagctgagattgttctgtcctccacctttaagtgtgagatcttgttcttgttccttctgtgactatctgttgcagaagcttgaaaatatttaggattttcatccccaaatttaacccatctaattgtgcatcttttcttccaaaactcattctggtatttcaacagctatagaatatgttctttcaagattattctaaaattccattctcgaataaaaaggggtctttgttcttcaatattatccagaaataacaatacctcattgcagtttgagatgatagcatgaagattataaagccttttactccaacttttcaaacctcttctcaaatttttgaacttgccattcagttttgtggcctgatttgaacctctgacaggaatactctagaactgggagactacatctataaagcctggcatgtcagtccaaaagttttcgaatctgaataatttggatttaggaactgaagtttcaattgaaatcatgcagggtgcatgatccgagatgtatttagccagagctatgactgaggtgtgaggaaattttagggtccaagctagagatgtgaaaacccaatcaagttgctgtaagagaggctgttcctgcatgttgctccaggtgtaagataaaccttttaaagggacttcaatcaacccgatattactaatgatttcattgaagatcagaatgtcattcatatcttccccaggaagattcctattttgcactgaccgaatgaagttaaaatcacccattagaatccaattatgatctatgtttatttcaagattgttcagccatgaaacaaactcatccctttgttctccagaacaggggccatagatattagatagagtccagacttcatgtaaggaggagttagaagtaaactctatggagattgcaaaagggaggttttcaatcaaagttccagaaactgtattattgttccaaataactattagtccccctgagttcccaagcgaaggatggaaaatgaatttgtcaaatcttctagggcaaagttttctgatgtaagaatgatcaaaaaaatctcttttggtttcctgaagacagattattgaacaggaagattcagaaatcttctcagagagtgtaagccacttttgagcagagtttaagcctctgatattctagcacaggatattacagtttctgttgtgatttagattcatttaaccaaagagagagagatatactgaaatgggtagagattaactgcacacccatgaagaacatccaccagcaattaacagaaaaggcttgagaattttcatgaaacagcaaaagagagtagcacttagcctgagagcttaaacataacttaagaagggtccagaagtaatactgaaagcagttttgatagaaagagataactaccctattacactttagggcagcagggctaagcatagccacattattacaaacaagagtaaattgattcattttttggtcttgaggagttttgcttcagccacttcctcaggaagaaggccacacttttccaccccgattttctggagttgggcaacagggactggagggggtagacccttgctaattgcaggaagaagagctctgactggctggactttggatttcttttttggattgtcaaagtctaggtcttgcttttcttggcccaggaatcttgggcttcttctaagattctcagtagatatgggccctttttgtctctgtttcctgggcttgggagttgcttgaatttcattttgaaggctggattcatcagatgcaaattgcagcgatcttgctacatgtcttcctacaatggccactttctgcctctttgcaggacttggactgacttccaggtcttgaaacaagatcacatttattttcacctcccaaacagttctggcaagggaccatctctaaagaacaatgacaggcttgcacaaaggaggctgaaaggcaagaagcaaaggtctgaaaattccctgagcgaccgcccggcaaaatggttcgggtaagttgagaatcgggagcgatggaagaggcaggccataaggaataatctgccaacccagatgctgctgctgctgcaagtgccaagttgtctctaaatcatatgtagagtaatcatgaactgacagagagtcttgaggttgctgcgcagggatgtcaacagccatgtgattctctccctaaaattcttcatcattctgatcatcagcatgaaaatcaaaattttcccaaatgttgtttttgttgttctgcattgttgtcctgtggagcagagagcatctgccatatgggtaaaaggtcctcatcacctggcaagatatatgttggcataccgttgaggacaaagacatgaaaagtccaagattgtcctaatcctccaaaagccgtagcatcacccaaaaccaacttagcagggatatcattaacagatttatatctagccttgaccaatacccttccaagcaccttatcgcggtagtgccagtcaatgaattccccacagaggttagtagcctgttcaataatagctctagtcttaaggtgtagggcaatgcctagaatcattaaccatccttctctagtgaatggggagttcctccagtttgcaagttgatcatgtttaacaaagtttgcatggaaccaattaccgagaagcacaggttctgaattcactagaacatctcttacaagagttgaggccagctctacaatgcacagggcgagagggtacctactcctcggagaaaccttcacctgacccgaactcgaactctggggttgggaaaaatagagcaagactgagagtactacccactgtactcagcaagtcataccggaataggggtatgatgcagggaatcatcaaagaagagctgaagtggtttatttgcataaagcgagcatttataaacagaagttgaaagattaaacagttgtaataattaattaatattaatcatccactgtccaacgctatcccacgttgcgacaggcccatccatccacctaaactatccaaattcaaaagattacactaaggtgagactaatcacggtgaatctggttgaccgcccataaccgcgggcacggctattcgaatagttttactctgatcagatgtgtacaactgtacccacaagacacagccccacgacacgtttccatgcgccgacatgccaccacgacataccggaaagaggccgtgacaggaccattcgcataaccccctctaaccaagcacaccacacctcaggtttcacccccactcctcgcaaggcagcgggcagtcccctctcgtgcctaggtgaatccggaagccgcataggccgtcgcagggcccatccaaactccatcacgcccacccttgcctggatgcgtcggctagaggaaagctacgctacaagcccagccgttgcccacgctggcttgtggtaagtacgataagttcttccagggcatcctgcgaaccggtccttaactgccatgggagcgaccagcaaaaccatgcacccacagcccaccatgtgatttattttaattaaccaacaccaaagcggtgttactaatccaacaaaccattagaaccaatagtctaaacattaataggattttttccccattgtgaactagttgaactaagcatggctaagcaatccctagtcctaactctaatcatgttagaaccccaagttgacaaagaaacatggtacatcaatagcatagctatgacaataggtaaacaacccatagtaatattataaaacaatgcaatatttgaaagaaaacaatagagcatttgtaatataggatcaacatggtcaagtgacaagcatgacttgccttgctctgctgctggaggaacctcggcgactatttcgaagtacaccggagcgtcggaggaatcggaatctagcgacatacaaagcaaacattgcaaacaggctataagactactgaaacagggaacaaaaccatttttaatggattctacacatttttcttgatttactgagacttgaatgggcttaaacggagctcggatgaattaattatgaattttagaagattcactatgtttattactatacaagaaaaaccttaaatcatttattgcacaataaatcccagggctgacgtcagcacggagggggcgcggcgccggcaagcgggccccaccggtcagcggctcagggggagcggttcaccgtggaccgggaccacgcgggtggtccatcgccggtccacgggaccgacggcccagatcgccctcgggccgatcggacgggcggcggtggaggcagctgctgggctcggctcggcatcaaagccgaccgggcgacccggggctaacggcggtggcacgcgcgcgtcgcgttgccggtgacggcatccggcggcggaggcgacggcgcaaaggcgacgcgaaagcgacggcagtggacggcggcaacgaccaaaggcgacggcgagcgcgggcggcagcgacgcacggggaatcgaggaagtaaaggaaaggggaaggagtcctcaccggaggggacggcggcgtccggcgacgaggagcgacggagggaagtcgacacgcggcggacggcgaccgggacgacctaaagaacgaaacgaaagagattagagaggaagagaggagccataggaggcgggaaggccggccgaaggcggcggacatggcaaccctcaccgtcgcacgacgggaacggctctccggcgacagacctcgacgaaagaggggtggacggggtggatctcagccacgcgaacccgacggcagcgatggcgcggtgcggcggtgagcctagcggcggctagcggcggtcggagtagcggagacggtggcggcgggtggttgcacggcgcgggagcgatggagagcacgagggagtttggcgagaaaaggaaaaagcgagagggagtgacggggaagcttaaataggggaggggagggccggacgtggccgggagaggcgggatttcgccggccaacgtgggagaagtgggggaggagagagaggcgggattcgaaaatcgaatcccggccatctcgggcacgggcgcgagcgggagagagaggggagtgggcgcggggaacgcggcgcacgcgcgggcgtggtcgacgtggcccggaggaggcggaggcgacgcggcggcggttgcgggcgcggcggttgcgggcgcggcgtcggctggaggagggagacgggcccgacaggtgggccccacctgtcggcgaccccgagagaggagggaggcgggacggcctggatgggcctcggcctgcggccggcccaacaaggaggagggggaagaaaggagagaatgggcaggcggcccattcggaaaaatggaggaaaaagagaggaaaaagaaaaagaaaaaaggaaaaaggattttcccaggaattaaaatattgcttgctcaattttaattggttaaaattatttctagagctctgaaaattccactaaaaatcctgttaatgaatttcgacatgtagaactcaagaaaaattccacatgtcaaatccgattattatttgcattactttcttagggttttctcttgatttcaccagcattttcttggggtcgttttaaaaaaaaatttaaattttaggcttgggaggagaacttcggggtgtgacagggaggaaacctgagagagagaggcgaagacaaagcgacgctagaaggaaacctgaccaaagatttttccgctgatttcgggatcgaccgcaatttccagacttttttctttgaatgggccaaacaggaacgggctagatggccgtaattgaaacaggcccgacatctcaccgagttggggcaatcagcataccgatgaccagcgcccaaacagcgggagcaattgaaacccccagataacgccgaatttaagcccgaatttgaaagggagcccgaatgatgcacaagagtaatggcgggcatagaaaatggcatctaattcaaaaaaatgggcgaagaacacggtagaacaggctttggtaggattttcgtacctgaagatgaagccttgggagggcgaatgtaagaatccccattggaaaagaacatccttttgaacactgaaggtttattcacttgagatttaccctttgactgattaaaatttaaaacttctgtggaggccttagtagaatgaacgagaaaatcacccttggtgtcagatagcctcttgaacattgaaagattattcacttgagatttacctttagcctgatcaattttaacaacttctgcataagaaatgaactccggttagagttttgctagcgtaacagattgtgtgatgctttttacctttggtttggcccaagaccgtaccaacagagaagtcgttggcatcacacatgatttcgaagggtaacgtccaatcgggaggttggatgattggagccgagatgagcgcctttttgaggatttcaaaggacttgaggcacgcatcatcaaactcaaaaggagcatctttagctaataagttagtgagcggcttgacgattgtagaaaagtccttaatgaaccttctataaaagctagagtgacctaagaagctacggatccctttgatattcataggaggtgggagttgatcaatcacctcaatcttagcccgatcaacttcaatccccctcttggacactcgatggccaagaacaatcccttcgcggaacatgaagtggcacttttcccaattaagcactaggtcattttcttggcatcgctgcaagaccttgtccaaattctagaggcaatgaccgaaggtttttccataaacagagaagtcatccatgaagacttccataatatgttcgatcatatcagagaaaatggacatcatacaactctgaaaagagaccggagcattgcacagcctgaatgacatcctataataggcataggttccatacgggcatgtgaacgtggtcttgctctgatcatcaggatggatgggaatttgatgatagccagagtatccatcaaggaaacaaaaataggaatgatttgccaaccgttccaacatttcatcaatgaagggtagtgaaaaatgatcctttttcgtagccttgttgagtttcctgtaatctatgcacattctccatcctgtgatggttcgttgcgggataagctcatttttagcatttgcaacaaccgtcattcctcctttattaggcactacttggactgggctatcccactcgctgtattgcacaggatagataatccagacgtgcaggagtttcaggacctctttcttaacgacttccctcatcgcattattcagctgtctttggggttctctggacggtgagctctcaggcacgatgggcttgcgatgagtatagagcacgggattaatccatttcagatcctgaagggaatagcctagaacagcgcgatgtttttcaaagacggctagaagacgactggttttgccatcagaaagcttgtcactgataatgactagagcttccttattaccatatagaaaagcatagcgcattccttgcggaaggggttttagctcaatcggaggtcacagcggtgattctaagattggaagttcgaaagtttcacagtgctcatcttcttttacaatgaaatctgggacttcattttcaagaagagactccagagactcatgcagaagaacggccattacttcctccgcatattcttcttctggtaaggaatcggttagggcaaaccttgcccgcgaggatggaattgagaattcattccctcctatagaaattttgaggctgtctaatcgagcagtattaatgaggagctactcaatcgggtgctcgattagaacatcaaaatcttggatttcaaagacatggaaatccaagatcacctccttgccgtcatgaatgacaagcactcttgcacaatcccaaatccttcaataagatttccgttgggatgcttgaagaatttgtttgtcggcataattgtcttgtcatgatgcgaccatggctaccatggatacaacctttgctcacatcatggatcaagaataacacttcaagaacaagccatccaaattctgaaatccaattcggccacctgctactgtgctgaattcaaatggtggctagatgtgcatacgacctccgttttgggtccgtgagtacttgatggaaagctctcggaatcctctttccaacagatccagccttgttccaaaattccttctcagtcgacagaaattgcaaaaacaaggtgctacatcccctatattgggccaatgggcttgtaacttcgtttgggactccggcccaagtggggcccatgtggggtgcgccccaaccaggtggagcatgaccctagagtccccttggtcatccttcctacctctttaaatagttaggtaccccttcagggtttctcgggttttgtttagatcaaagtatagcgtcgctactctgccgagttgatcccgtggtcgattagatcgccggattgcttgttactgaaccccacttgttacttctattgattcaatccaacatctttgattcgaaaatttagttgcttgttcatcttgttcttgctggttctcgattgcttgcaggaacaaataccctcgtggttgggctgatcgtgcatccgtcgagattcatgaccgcctctgaagttagtgtaacgattgctaaggcgcaacatccctggatagttgtagttggatcgccaacgtcactccatccaatcgacttatccctctcattgaaagatcgggacaccctcgagcacatcatgtcgctcagataagcgaacgcaaaggattccgagacaatatgagcaccaacagttggaccataaagaatactaacattattcccatctaaatgatacggaatggttcgagaagcgctatttatccgaattacttcggatgaaagctctgccttcatgatcactcataatcgatgtcaactcctgaactgttccctttagatacccaagctctattggatcgagaggtggcaagggaataggcggtctcttcttactaaagtagttcaaggtatttccataattttcatcaagatcatacctgaacattggagcacatcctggagttcaaatttcttttttatcaacagatgatggctcagagacatgttcctcggtcgaattgatcgaagtagacggttcagtctttgattcgattaacaagggttcctcgatcctagccacatatgcctcagggaggggttcattgcactgttccatgaagtaagttttttccataattcagtctaggattacttttccttcggatagagttatatgtatgaacgaccctccggcagtaatgtctagataaaatgcagactccttatctaaacccgtgcgaaaatgatgcaacaacacgtattcgggtatggataaccttggaccgaatcgcactaaattagtaactctggacctggcttcactgattgattctttatttaactactagaaactgaggatttccacacgaagcgcagtaatacgggttataggaaaaaaggcaaggcagaacctgtctcgtaatttctcccagttaccgcttacacacctgacgatagatgtgtaccattgttttgctctctcttgaaggtagaacagaaacaatttccactgtacagtttcttgcttcatgcctcgaatctaaaggcatgagcaaagctgctcaaattcccgcagatgatggtaggagttttcttggtcaagaccaaagaaaggtttttccctaaccatacttattaatttggggcgaatttcgtagccagttgtaaaaattggctcttatgaaggaggtggctcgtagaattcgcccctaggggctgattgttgacggctgtttagtaccaaattaacgccgtcaatacctgcataaaaccataactacaaaacatccaacatagtgttagggtttatttctaacaatttccacgagtgttggtatatattcatatacaggtgacaaactaccaaggttgagaggaaatatacatgaaggaggatgagaatcaaactcgtatccgaacttaaggagttttggacccataaacccaattaaacacctccaaatgggccgaacttcataccaatgaaatgaggggcc

SEQ ID NO: 5725 - DNA, 15768 bp, Oryza sativa
ctttcttaataattatactttgctgttaagcagatacatgcatagcctaattgtcagacggatgcaagatgtggagctgcactataatgtgcgtccagttctgaagcttaggcgaaaagaaaccatttggcttggtttaactgcatacattcgtgtgcttcagcagaaacaatcacgttacaaggatatgctgactttgttgacagcagagcttgggagatattgccatttaggtcatgaatgtgataccttgcgctatgctgtggatgattctcactcgtctatgttctggaaatttaagttctagaaactagaagttgctttcctggtgtactgcagaaactactgttcttttggatattcttttgacaagtcattttgggactttacctccaatctgccgacgtgtcatcgcacgcagtaccaatgcctacctcgctaaaacatactcctggtgtgtgcaaaacaaaccggtggattcatgtcctaacctcattcaaggtgcgactgttggcccgtgttctccaatctagtgtaacgaacgagaacgagcacctcactagtcaaaggttaatggtctcctgaggtgacagtggggtgccgatcatggtttttttttaaagcattttacgactgattgctcatttctttaggatacctggtagcactcgagcagtattaactttttgtataatttattgtgggcattgatttgttttccttaggttactgcaattgaaacgattgcattttactaattgttgccaatcggaattgtaccccttcaattttcagcaattccaaccttttggctcttaatgctaaatctactcaggtccctactaaagatttatagaatactccctccattccaaattgatctagatatagtttttttgagattattcctaaatgatctacatatttgtgctcatttattgagtctattcgttatttgtgtattggagtaaatggacattgatgcatgtatctatgcacacaagtatttataacccacatgcaatatcttgatttgctgttggctaggaaatattggagatggtgcatgcattgagtttgttgctagaataaatatagtatgaaagagttattagctttcttggtcttggtgtacctatgaaatatgtagatcaatttgtaatggagggagtactcaattagtactaagcataaaatgtaatttgagacatgcataatgctagccattcttaatttaattgagcttgtgccatgcatcatttaatttgctagttaatatcaggagatccttttaatacttagcttcagttatgaattttgttgggctcaattttcctcggatgtatttattcttcctatatactccctccattccaaattgatctacatatagtttttttgaggttattcctaaatgatctacatatttgtgttcatttactagagtctattcgttatttgtgcattagaataaatggacattgatgcatgtatccatgcacacaagtatttataacccatatgcaatatcttgatttgttattggctagaaaatattggggatggtgcatacattgagtttgttgctaaagtaaacatagtatgagagagttattagcttttcttggtcttggtgtagctatgaaatatgtagattaatttggaatggagggagtagttggtacccactaagtgcaattatgactataaagctgcatctagaaagagccacgtcatccaaataatcctaaccgtcagattttatttggactgctaattgctatcttagatgtgaactatctcagatcaggctcagatgaagaaatggttcagcccatggaagcccagccgttgccacagtccattgtcttgccctcaaccttttcggatcccctgtccccgatgcaattatttacatgatctcccccttccccttctcttgaatttctatggttctcctgttcactgctttttttttttgggttcatgcatggattattgataataattatgagttcaagatatcaatcttttgggtgcataccaggagatggactatgaggcaaaataaattaacatatatgtatttcatcctcgcagttttctgttcatccaagcttcgtgctgaaaatttgtttggattatgtatttttaacttgcttagtttgcaccaataccagattgtgtagattaaagtcttttattacagtaaatttacggataggaggctctacgaccaagtttatactcaggacaaatccgttctactttatttcaaattatgtctgatcttaataccttttaaattagcctcatatatctctttttttcatgctgtgtaagttccaattcagaattacaattggctacaccacgggacatctcactaacttaaaggtgattttgttcacttttctttgagatcaactgtatgtacaattctgaatgtgcctctttttttttttctatcaaggtttcatgtagtccatttggactaatcattcatgtctcttttccatattatttcctcaaagcaagaataccactttggtaggatacaaatatcccacggtaacacacgaggtacccatctaattttcctgaagtcagtgccagctagggttctaccgaacctctggtttggccgaaccaggcaaactgtctctctccaccgcctttggtgagaggctgcaaggtgcgcctctcagtcggttcccaagtggttggccctactttgagccggtttgaactaacttgtgggcttttcaatccgtgtgctcgcacgtgattcgtcggatgtatgtttcattgtatgtcggcttcatttcttcttcactttgatgtataactcctgcatccaagttaattctctaatcctaatacaactacattatttattattggtatttttccctttactagttgagtgcccatgcgatgcaacggtgaaaaagaaaatgtgatattgttaagtaatcatggtggctagacccttccaataatacctgactgttgctggtcacaattgagctgccgctagccacaagcattatgaccattcgaaccattttcctgttattatggttagagtaatgcatgtgctgccatagatgccattgtctgcagctcctagcccccttccagttgtccatacaaggatatgacaaagtaacaaaatatcaactaaataatcaacgcagcaaattaaactgtagaagagattaatcatcacctagaaccaaacttgtcagatcaattggtgtccatcatctatacaaaaatttcaaatattgtcttgctaaatctacacctgtgctaaaggaacctgtagtgaatccgatccaaaggagccatgcttgttctgtaccaaatatgctgaatttttgttataattctttttactgaaaagaatgctctatggctctacctgccttaaaatactttttttttctcttaacctttatgttcattaccagagtttcagctaacctgtaacaatgcaagcattgttattatagtaccataatacatattcaaaatgattgtgatagaagttagatatatgacttactgtgatccaaaaataagatgagactgttgttgaatctcttagttaaaaaaactaagaagccagacatatataaaccgatcatccttctcccattcttgcaacaacatcatcttggccaggatattgtcttgcacattatatatacaggctttataatttggaataaaatgagcatgggatcttaaaaatttcataaacaggtgctcactacttaccatgggattagattgagcagtaccaaatttaatatatatagcagagtgctcagctgccaacatgagtaacattattactctcacgaatttacatggattttacccgtttaacaaccttctaaatgaagaaccaatttgtacagaagaatattgttattaaagaggacattaggacaaccaaagttagtgctgctaactggaaagcaaattacctgtgcatggagtaatagtaaaggaacgcatacctgtgtaacaaaaattgattaaaaatagaatacaaatctttttcatgcggctattgaagattgagaaaatcaaaggcatgcttcatgtgataattgcaatgcagacaccaattctaggtaacaaacaaatcaggtgttgccttacccatatgggcttcgtttcataagccgattcccaatcggacatgcgaaagaattttgtcacctgagcataaccttttgacaaatcattcagcctcaaaggctatttcaaattttagacatttgtgatttttataccacccaccagcatggccatgccaaatgctattccacgggataaaggtggttacctgttaccacacgacttaaactcagacatgagcatccatgacaatttaaaaactctgcaattttgtttcagtgacaatgttagtttcagctgtaacttcagatcatgtgagatactcatagagaatatttatatgttacctagagaatgatcttttcttgtaaaaaaaataatgttaattcaggtcaaggaatcagagagataataaaatcaaaaactcaccaagcgaatgaccttttatgcttgattgtgactctctaatatttgatggagatttaaattgaaacttggtaaatccggaaacaatcaagcatcagcctaacagtagtatatggaagcatgggaaatctagcctaaatttgggcaattattcgaatagcaggaaccatagcatttttgttgaatgaagttatataataaaattaattatgtttcataaaagcattcacaggcagcatgttgcacaaaaaaaaaaacccacacttccaggcattttcttctttcttcagtaccatgaggctgttacctacttggatctttctacgcatttatatagaataagtaaaagaaattcagggaaactgctaatgtccaattcaggttggttagataccttgatttcccctcataattcaaggtgcaaacaaagaaataaacaggtgcatttacaacaacagtgagcaagagcaaattaaggaacctgttgactgctcaatcagattggttacacatactttgacttccccttgtaattcacagtgacaaagaaagagatgaacggccgctttgacaataccaacagtgtgcaaaaaaagccaaatcatcataaaaaagggggccgatggggctgcagtagaaaaggctccaggagcacgatggagggggcagagagggcgcccgggtcgccagaggccgcgtctaggtcgcagcggaggctggaggtggcgtgagcgcccgccgtgcgacggggaccagggggtgacgaatccggaggtcggggcggagatggatggaggcgtcgagggcggcggcagcggggtggcggcgcggacggggctgcgacgggagagagcgggcgagcgagaggagcgcggggcgttgcggaggaatagatgcggtcatgcagagaaagaggaagtcaggaacaaatgcggaggagcgtggaccgttgattctgcaggacgatccttccagcaatcttagccttcgattgtttaggactcaccaccaacactacgcttttttaaaatagtaaagattctccaatacaagtgaaactacattttttataactgagatatacgtgtaagaaatgttagttctccttttatttattacagtagtcgatgttcgaaatcggtacttaagaactgtcaacaataccacataggtgattagatgatgagatggagataagtagagagatgatgaatctattgtatatgttacctcttaatttgttgatatataatatgtatgaaaatagagataatagtcgcctctgctataaaaagtttgctcttggacagtaccagaataaattagagtggaccatgctttaaaatgcgtggcaaatattggcaagaatcaagatggggcctcgggaggttggcttcaaggccctgtcccatagattttttttttcccgctgagacctgattaatgatccgatcatattcagatacgctgctgctcaatccggccagttcgagaggactgattggccggtttgaaatgatcaagtgatcgttaaaacccccaaaactttcctctggcgatcgatgatactcatgaagttcccataggccatagctctgcgaaacaacaaaaaagtacttcttttcataagtgcggtatctagctctaccatacaaactgtataccgtgctacagttccttatgctacaaaaacgtccaaaggtgttcatatggtgctttttccacaggtaacatgctttactggaatgcgtgtaaagatgttcatatggtgcttcactgatgactgatctaatcagaagtataagctcactttgcagccgtcgttcgaacatttccaaaacagaaaaggtggtatgatctccatcatgccaattaaacatgacctgctaaatagcatgatggatctgacaaagtaagattatgacaacaaataaagcttcagtaaatgaccataatagcttgaatgcataattacctttatcttctaaacatgcgttgattactaaaattcagctaagctccttcagtgatctcagatagttctgtctgtgaagttggcaaccatatctcaatacgactacctccagtccctataattgcatcaggtctccgaggcgatatcacacgcaaaacacagccatagttctcaagtatctcacgggcaactgttaatcctgcaatgaaattccatgtcatattatcttcatgcataccatccgcaaggtctgacccgaatggagcaaggcaatgcatctgtgtctgtaaaatgatagaaatcagaaatttgaaccaattgtcaatgataaataaaaactttgctggacatgaaaatattcttacagtgcttgaagcaatacaagcaagtgaaccaaagttcaaacaaatttaggcctccaaaatatcgcatctaaaataaaatatctcaatctggtgaccatcagttaactttaggtttcactagaaaattgaaaaccgacactatatttcattattagtacattgcacaatagtttgaatgagatgctcttgtattgttgtcccaaaggaattctttggcacactgatgaaaagtcataattacattggattgatgtcccataattctccctatgttttatgttttcttttgtttcaaaactagagtgggtgtgtgttttggctgtgtgcatcttagttatgcagaggccaataaagtttccattatctaaaaaaacattatgaaacactaaagagccttacaaatgaaagaacaaatgtacttaccatgtattgcatgtcaggaccatcatcatcaatgacaacgagaatgcctcctgcaggtgcttcaccagcatatatctgaactcggccaccaagctgagtgcgtagaagagcaccctctatgagattactcagcgcttgtcttaaagcagattcctcaacagcaacttgaagcgggtgtgaaattcctgttacatctagagtgcgttgctgcctaaaagcaagcggttgagctgctccaaccaaatcttccagtacaacagagagatcacatggtctgcctgacaacaaataaagtgacaaataatgcacaattgaattgttggggactaacatctaagttattttttactcaagcaattaaaaatatggtaacttgagatgtaaacaaataaagtactgacatacaagtacacgggacatgggcgacatgaggtcctcaaaagagcaaataccccaacactatccaaatcgataaaagtgatttttttcaatatatacactattcatacaaacaccccaataaatcaaatgcaaaaagaaagatttatgggaagggacaagatggacgattgttttgtcttgatcaacactgtgaaacaagaagacagatgaaacaaaaattagttcacaaaagaacaaagaatgtcagaaaaacataaatcttttctagcatcaattgaatttaaaatttaaatctttactgatgatggtccacttttttctgactttgtttttcttcttctgtccaccaacatatgtgaaaaccacttctagttggtaggagggacattttttatctggtttctagttttaagagttaggagatgagttttgtttggttttgtagttgagagaccaaaattaaatcgattcaactgggtaagggaaaagaaataaacttttctggacaaaaacatggagttggtgcttgaggtaaaagaacagtttaggccgcgttctttgcaagtgctgggaccacttcctccagcacacaaaatggagcgacggattatcgcatgattaattcagtactgtattagctaaaaaaacttgaaaatggattaatatgatttttaaagcaacttctcaatatgattttagcagttcacaaaccgtgtgcacggaaaacaagcattgcgaatagtagtgtttaatacataggcattgatcaagatatatgtaatgaaaattttcagaaatttggtcaatgtaaatatgttttttctttggatcagtagatctttttttaagaaaatgatggttttattctccacttaatttcaatgctacatgctttcctgttccctttttagttgcatatttgcatagtacaatggatttagatttcacatatgttttgcataatatccttctacctttgtaatggatctcaaatgcaaaactttgtcagtctgaaactctggcaattaagataacataaacttgaaatgtacagtaatatttacttgatattcatggtaccacaatagaacttttgctagtacagaaaaacagaccatgaaatttagagtattatggttttctcaaatattgaaatataagcatggttaggaatagtgtagaataactaggatatgatgtttcatgaacccaacagctagatttatttgaaaccattgaaatgttatgtgcatttttatttcagtaaacaataaaatagttattacacaagaaatggtccagcataaaataatctgtgcaaacaactactacctccatccctgaatacaaggagttttagagttggacacggttattaagaattacttagaattaaatggtggaagattgtgattggttgagaagtggaggtaggtgggaaaattgcatggtgggttgtgattggttgagaagggaatgttggtggagaagttgttataatttggggcaaattctaaaggctaaaagttgttatattttgggacagagggagtactttagaagcacatgaaaactatgacaaaaataagttttactgaaaacaggagtgacactatgcattgggtactggtaatcaatagttattggtctgtgatagactacacttattttgaaataactaaaactgaactacaagtaaatcacagctacaacaatttcttggtaaacaaagcattcaacgcatgaaattagtctactatgtaactgagagttcaacatcttggaatggcaaattgaagcaaactgttacctagcgtcttggggttgaagaggggccagccagagaggtggcatgggtatcaccatgtctccattgtcagaatcatgtgatgacaacgaatcaactttctgtgaactattcttaggatctgattgatagtgtggtagagttcttgaagaaggtgacccctgaattttctttaaggtttcctcattgtacctaactatgttcacctgttcagataacatgacaaaaattcacttagggatacgtgaggaaaaatcataagagataatggaattatccttgtatgctaaaacattgtcttaattaagttttatcatttgggatgtacataggtctgctcattggcctacaccactgaactgatggttcacttttcacttaattttgttcccatttgtaggcacttttcccattgcatccctatatgtaccccattacccttggtatccatttccagcctaacgcttagtagcagtactttcttattttttttattttccaagctaataagaaagaggtgtatttaagtagagcacacagttttgtcagtgatttatgaaatgtcattacaatgttaccttagtcagataaactgcatcttgaatctgttgcaaagcatctttcaaatgatcaccttggatcataacgtcttcaacaatatcataagagatctgcaaaaaatcaaattaggatacccaaccaggaaagcgtccaagacaacttcaagattcatttaaacaaagtgaaaaacaatgaacagcttaatgagaattgatccacatacctcatttctctttgtatgaactgataacatctttgcaagagctcttatattagcgaggggtcctcgaatctgccaaagggattcttgtaagatgaatactatgatgtttttcagttggtactttgaagttaaaaacttgcctgttctactaagccactcattctaatattgttttgccaggaagcttgctgaagcaaatatgctttctgcgaggaatgcacttatgtgaataaccaaaatatataactagcaatgtaaactagagcaggcgaggaattcagttatggaatattttcttcagtttatcaagagcatatctgttacacatgcccatgttttatgaataaaacatcaggaaatatttcacatatgcctgctgtatatcaaaggggatgcctcaaaactgcattcctaattgcatgttttcccaaattccaaaataatatgtgtctacaagaaaggttataggcattggctggcaacagttaatgattccagtcaaaaacagttaatgaatgattttattttgaataaaaattatctaatggtcatgaacaaactacctggtccatgacataagccattgctaaagttcgagaaatcataagtgcactatttttccattcagtaactaactgagcataactattagcttggtctccagaagtttgaaaatcccaagtttcccctttagtatatggagttatatctgatgacttgtctaagaatgagtgtgatggtatctgaatatcagaagtctcggagttctttgtacatccaactagttctgggagctccgcaacaaggaaaccaacaacaaatgggtgtttcaccattggaaggactacagctccaaattcagttatgatttccatctgcagcatatgagatatagtaatcaatgaaattaaaacaaataggaagaactgacatgattaaacttgaaagctcaatagctgctgtaactaaaactggatgagcaggtgtggcctgacaatctctttaacgctaacattgccctactatttgccagttgcatgttcagttgattaaaaaataaataatttactaaaacaagtttatacactaagttttaacccacataaatggtaaataatgttgttcccgctgtatgcacaagtgaactctgcattggttcataggcacatccgcacatgtggtgacaagaatgaggtcaggtgttcgttaaccttttgtccaatcaatacaattcttaaacgaaataaggtgcttcattggcagtattacaactatgaaaagtaccatgtggattaaaaggcaatgaataatttacctggtgttttacaagaaaagcttccgctgctcttagtccagcagatatggtgaaattaccaactagaatcactgtatctcctttagaaacattagtttcaggatataaagcaactcgacgtaattcaagctgatccataatataactgccagcaggtcttacatacaccttcaaaataaatagataaaaacattttctttattaatttatgaccacataggttgaaataagcacctaataaattcctaacaagaaaagaatttattcatctaaatggcagataagctaaaaacgaaacaaatggtgacatgattgtttcagattaatcgcggaactagttatttgctctcatactttacacctccaaaggatgaaattcagaatttgctacaaaaaacatgaaaactgttggcactcacaaacactttgctactccatttttgtgggctgaggaatcctagtgtcatttgcaggggctaatagaaaatttccacaaatgaaaatatagcagttacatttccttttgaaagaagaaggggatgcacttcaaaaccttttctacgtagtctagaagaaaacaaacttctacactccttattaattattagagtaaatttcacgaaaccacatattttacggtgaaacttacataaaatccttggtattttgactggtggcacataaccccagccatcatggttctaaagtttcacaaaacctcgatgcatgttgactatggatttaattacttaaaattttaaaatatagagtgcatataattttttataattattgcgttcttgactaaggttgatagtttaactcttcactaatttgcaaaatatcgtttcagatatattgaaattaatcgagatctgtctaaaggtgggttttatgaaacataaggaccataaaacctgtggttatatgccacaagtcagaatatacatgtggttttctgcaacttaaactataaaacttgtggttttctgaattttactataattattattcagttaaatttaatcatcaactgttcatgaacaaatgttgtgcacataagcacaattggacctggatattaccatcctggactcctgatatcattttgttgtcatccttaccttattatatgttctccaatgtttcgatgtactttttgttccttaaaataacataagatggtagtacctattctcatctaataactatattgctcataggtgacttattttgagcagaacaagactgtaggagtagcaagcaaacctatatagtgctatcaatacatagggaaaaatatagcttacagagaggacggcgtcgcgggagatgaccacccggaacatctcgagctgctccccgcacagtcgccggaagtcggtgctgggctccgtgaagcctccctctcctcgcagcttctcattctcctcccggtgcaccctcctgaaacgcaccggcgacgcgctcgaagcacgccggatggcctccgccacggccgcagccgacggcgtgccgaggtcctctacctcttccccctccccctccgctggagccgcgacgtgacggagcggctggcacgcggcacgggcgagcaggccgtggggaaaggagtgctgggcttcgatggcaacggcgggtctgggattgtggggggtcgggaagcgggggaggcgaacgcggagggcgaggtagggggtgtcgaggagtggcatcgcggtgcgggaggaggcggtggcaacaacgccaaggggactattgggacgacgacgttggtttggccattggcgagccgcgagcgccagaaacgaccggcgtcgaccggattgcggagagcaccggacacaagtttccgctaccgcttcctggtgtggctgaacagtggcttcttgccggggctgcgtgcctgtgcccacaaacccacgaccgtcgcgttagccagagaaacgttatccttgtatggatggattatagtttctccctttttaaaaacttattttacaaataaattattaaaaatacctattcaataactaaactattttcatggcacaaacatcattatggccatggtcgacgctgccattgatattgcatcgtcccccttgccttccacataacctaaattacggttgagaaagggttgttgtcagtgacaccaatcacttgtttatgaaaaatagtttttaaaaaaactaaaatgtaaatatttttttcttataaataggttgtcagcaccaactactcttgtgctgagaacctatttgtaaatattttttattaaataagttgttatatcttcaatatatttttctttacgtttaacttgtcattgattttgtgttgaattgtttactgttgctaaagattggaattttttttcgatcactaaactaagttttaggcttagtatacgttgggagaaattttttcaggatttaaacgttaaacggagggttcattttcaacactagcataaacaagttaatgcatacgtatgtttatattaaagttctcatccccggaagttctcaagtacatctacagctatttcccgagcaaactcctaggcttcatcaattagctcaagtgcgtgctcttctgacgtcccatcggcgaagccatcctagcggcagttatatccactcggggatacaaagattttgtcatcgccaaggcctggctagctcccctggtggcatcctctttgatactcttgaaatatttgcttggagaacttcttaacttgtcaaagatttctatgccatcttccgagttggagcccaagctattttgaaatatggcattaaggactggggtcggtgcactagctatttcatcccgcacaggctcagccctttctacccttttagcgaagacatcaaattgtgcctaggtttttggctttatgggctacaagtcaagattgacattttatcacaaggtatataacggcaactatggtagcagtgggttagtatgcttacctgtcacgcccaaaaatttgaaaataattgaagaaatgatgcccccttaaaaaaaatagaaggaagatgaaagatgtgatacactttctagctgaagaacttatttagattgatttccatcaatttagaagacatgccttagtcttatgttcaggaattttcgttgaactttagttttccattcaattgtgaactcggctgttttgtggatcttttttttttggctgtctacgtatctgttgacagaaaatcctacctcctatctttcaaattaattttggacaattggatctgcttcaagattcgttcagaccccttaactctaactcctctcctcctcccccatccagatcgcaccgccactgctcctaccgtcccttgcacgatcccccgtcaccaccgccccaccgcgccgccgcctgcctcgccggctggatggagggcgtcaacggcgctggcgatgccccccggccagcctcctcccccttccccctccttcctcctcgagccgtcggcagcgtgatgcccctgccaccaacgctggcccactggtgtcctccagcccaacggctctagtgccaccgtcagcgcctcgccacccacccgatccgccacccactgccgggcatccctctaagcccggcgaactcccccttctttcccctccccctcccacccttcccaccccacccacccccaggaccctaattcgtcggcccttcgctagagtttgggttgtcgctggcgccggagaaagaagaggagttcgtcggagttggagaagaagcagttggagcacgaattgcgaagcacatccagtgaaccaaaatttgcaaggtttggaggtaggttttctgtcgactgaagtttagcaattctgttttttttttttcaccgtgctggatggtttaattttaactacatttttttattgtatacagagcgttgctattttacaattgttggtatttcttaacgacattacagaaatataattctcagcaatgccacagaaatacttctggtatattatggttacagagttcatccgcaagcgcacggatataccattgtaacatttcacccgagagtattccaagggtatcgtattaattttatctgtgggaag

SEQ ID NO: 5726 - DNA, 36527 bp, Oryza sativa
  unsure (1)..(36527): unsure at all n locations
aggtatgcagctggtgaagggaattcagaatcatcaagtggagaaatctcaggttctagcagtgggaagatggatgcaactcatggattgcagattattggtatgagtgctactatgcccaatgttgcagctgtagctgattggcttcaagtaagagaacttctgtaatttttgttcatactattatctgtttttttaagaaatgctgttatctaccataaacatgcttgcagtgtaatatcttacggtcattcaccatcattttgacaagaataatgtattatttaaccaaactgtctaatgaaatacagtagtaagtagtaacaagttatgtatgctgatttgctgaacttcaaagtttcacatgtatattttttgtgagttgattttccttttaatgataacaccaccatacttttgattattatgctgaaatgaaatagtgtactgtgctgaatgtacaagtagaaaggatgctgggaaccattgcattacagtgaggattctactgaattagctttttttttttccgagaaaaccataaaatttagcctgtcctgaggttccttgtagtgtctccacaaggtggtggagggctggacaaacactgtgtgcatcattttgacagttatgtcttaagggcctaattagaggcatctaaactacaaatgactgatgcaaccaatctgatttttatgctgcagaaggacgaagaatttactgctcaagtatttcactgaaaataatgtggaactgtgcgatgctctatagtgttactatatttgacaaacagtattagacatgctctataggctttcaacagtatttgacaaacatatttacagtggtacgggacattgacataggtgttagagtatgacttggattcgagtatctgattcagcaaatttggagaaaaaggattcgaagattcgtataatacatattttataaacatattatataatataaaatattaacatgtaaaatagtcggtcaaacacttaaaatacttttaataccagtgttccaaggagtattgtggacataagatccctttcctatgtctgttgtgcatggaagcttcgcttgtatgctcattggcttataagccacaggccacagccagaatttgaattttattagaacttaatttcagaattgattttgtagtttaattgttttctatttttcagccttggcttttggaccaataagaatagagtataaaagtcttaccctatttttttattactttgtttattttctaagcagtacctcaaaaggtgcaggctgcatgctctctctccagcctcctgcaatcctggaaaagctgcaacctttccgcctcttctttgtgcgcacgcacacactctctctcttcacttgctttacctcttaccgcaacttcgttcctctattatcagcagctgcaagcctgcaactctcctctctttcctttggactctgtcagatgggtgccgtcccacgtctaacatgcgttgacgcacgcgtgtcaacatggtaaaagaaaaaaaaaagggacttgcgagtcccagtaacactgcatatttatcaataacaactgtcatgaatattgctataaatatatctaagagaatttcacaaaattgcaattattttgtcaaaactatcactttgttacaattttacatgggtatttcacaaaactgcaacaatagtgaacgatttatcacaaaacaacaactttacctcctatgtgtgtatggcatttgggcccgacttacaccatcataagtattgcatgtgcgtatgacaggtaggctcaaactttgtgagaaataaagttgcagctttctggtaaaatcatacactttgaaatgtctagctgaaattgcagtaaattgataattttgacaaaatagttgcagttatctgaaatttactctattatatgaaatctgcaaactgaccttcaaataccagcttgagtctcaatgcatgatagaaattgttttctgtttgtttaagtcttgttgatttttatccagtctatttgttccttttattttgtgaccgtttaatttctttttttttgccgggccggcgaatagccggccgatgtatattaagagtaagagaccgtttaatttctaacacgcacaacctaatttgtaaggatttatacctgtgttttggttgttgacttgattctgcagcatttttattataatcttccttgattatgttgctttgctaattcttgatctttttggtcaatatgaaaggctgagtgtgacaaagtcttttgtgtttcaagtggcattttactttatcgtaaaactaaaattggatgattcatgtgtatctgatattctgctgcataattaggctgcactttaccaaacagaatttcgacctgttccgctggaggaatttattaaagtcggtaatcaggtctttgataaagatatgaatgttgttcgcgtgcttccaaaagtagctgatcttggcggtaaggatccagaccatattgttgagttgtgcaatgaggtaaatactttgcgctatttagtctccagtaaccgattccttactatctaaaatatatgtgtacacatctaccttgttttgcttcccaggttgttcagcaggggcattctgttcttttgttttgctccagccggaaaggctgtgaatcaactgcaagacatgttgccaagtttttgaaagtggcttctgttggatcaagtgacgttggctcagaatttccagatgctacatttgcagttgaagccttgaagaggagcccttctgggttagatcctgtattagaagagacccttccctctggagttgcataccatcatgctggtttaacggtattgtaattttactataatttctcatatcatgccatgaagagttggtggaccttatttatgccattgtcgttgcccctaagcatttagaatctgcactgcgtagctgaatgaccttttttttactacattttagtagatgctgttttgaatttattactaatttctaaaaccattccattacttcatgacaacctttatctttcagtaggactgtaggaaacatgaatgtatgcattgtacttttcttgatgtctattttgacaactattctcctagctattgatgatcgtgagcttataatatgtagtcatttctgtttcatacaagtacggctttctcttttggcaggttgaggagagggagattgtggaaacatgttaccgtaaaggtcttgtcagagttttggctgccacttcaactttagctgctggtgttaacttgcctgccagacgagtaatatttaggcaacctaggataggtcgtgacttcattgatggaactcggtacaagcaaatgtctggtcgtgctggtagaactggcatagatacaaagggagagagtgtaagatatgaaactttcatttatactagatgtttcccatgaattcatcagcttagtttcaattttttatttatgtatctggttgtgctgatgttttcttgtttatgaatgtctaatactttgatatttgaaatgtagatacttgtatgcaagcctgaagaggtcaagaggattacaggtattcttagaagtaactgtactcccttggagtcttgcctctcagaagataaaaatggaatgactcatgcaatcatggaggttgttgctggtggaattgtgcaaactgcaagtgatatccatcgatatgtgaggtgtacgctgcttaactctactaaaccttttgaggatgttgtgaagtcagctcaggactcccttcgttggttatgccataaaaggtttcttgagtggaataatgaaactaaaatatactctactactccacttgggctagcagcttttggcagttcacttaatcctgaggaatcgttggtaggttactttctttagttattttcaatattttttaaatttaatcttacaattttctatttctctgtgtaggtcgtgctggatgatctttcaagggcaagagaaggctttgttctggcatgtgatttgcatttggtttacctggtaaccccgataaatgtagatgtcgaacctgattgggaattgtactatgagaggttcatgcaacttacttctcttgagcaggtatttctgttgcatcttagaacgttttttctccaacaattagtctgagtacatgtaatattttcatatcctatttgtgtatatcaatagtaaaggaccacagactgattcttgctattgtctatattgtccttatagcctgacaggcaaccatccttttcaagtgaaaaatgtatatatttttctctttacccaagtaaaaaggtgaacactaagatgacatattgagatgatcagataacttaaaatgtatcaagtgatgttgtcaaggaggtggcattaaacagtatgttgttttactcttattgtaaaatggtagtgatactaaatcaaataatattcatgtaatgcatcacaaggccatgaactcatgcacccactttacaagttcatggcactatgctagaacttactctattttatctatagtattgatgcttgttggtaatgtgcagtcagttggcaaccgggttggagtaatagaaccatttttgatgcacatggctcatggggctgcaatgcctgttcgtggaaaacctcagcgtgctggtatccgcaacaggtcaccaacacgaggttctggtggaaatgcacttattaatgagcaggcacttcgagtttctaagcgcttttatgtggccttgatgttgtcaaggcttgctcaggtataattcaactctgcaagattgtatcatcaatttgcttactattcctgaaacctagtagtatgttaacgatctatctctgccatgccagcaaagtgcattactctaattggttttggatctttttttatttgtaaatatagtatgattgaatatttaatgaagctatttaatgtattgtatctttcaggaaattcctgtcacagatgtttgtgaggcattcaaagttgcaagaggtatgattcaagctttacaggaaaatgctggcaggtttgcttcaatggtttctgtgttttgtcagagacttggttggcatgatttagaaggccttgttgctaagttccaaaaccgagtctgttttggagtcagagcagagattgcggaacttacatcaattccatttgtcaaggtttgcttatgtcactttgcatgcatgataaatcctaagttttgtcccatcatatcttcctacttatttttatatgttaatatgttatgggatgcagggttcacgtgcaagggctctttataagtctggtttgcgtactcctgttgccattgctgaagcatctattcctgaaattgcaaaagctctttttgaatcttctacttggtctggccaaggtctaatactctagctatgtttaaactttctattaaaatatttgtgtatgttgtgttagtctgaggttctgagactacagtagtgctgcaatgatggtggtggtggtggtggtagcagtagctttactattagagaaatggtgaaagtaatagctcaaaagccatcaaactcgtaaattagtactcttaacaacctgagaacaagacttctcttcctttggagatggctgtaatgtgtagtccacattggcattcctttctattttctatttttgttttcctctctttttgttcaacattttggatcagtttagtatcaaggggtcagattcatcctattggcttatttcttgtgattttcctgccttgtgtaataatatctgttcaatggactaggtgattctggtttacgccgaatgcaattgggtattgccaagaagataaaaaatggagctcgaaaaattgttcttgaggaggcagaagcagctagagtagcagcattctcagctttcaagtcacttggtgtacaagttcctcagtttactacacctctactcccaactatcgatgaacccccaactcgagatagcatggtttctgttggcagaggtcaagctagtgatgatacaaataactgcttcagttatggttctcaaagggcttctacagagagaactttagggaacgatatgcaccctggttcttccatacaaataacagagagtgcaagaatagtgaataatgccaacatcgttgtccaagtagcatcacctttctccatagaaactaaattaagcagcagaaatgtggctgacaaaggccctgttaatgcatataatttcccaggagggtttgacagttttcttgatcaatggtctactgttagtgagttttcttttgatcttcattatgtcaagaagtcaattaaatcatcttcaacctatttcgatattcttggtttggctgtctgttgggaaaattcacctgtttactactgcaactttccgaaagacctaatgatggctggtagcaatgactccattgaaatgtgggacgaactaacgagaagatggaacagagtaatcgaaattatgcgacaaaacagtgtcaaaaaaatgacctggaatttaaagttccagattcaagcattgaagtatccctgtgtttcttgtcaacggctctctagacttcatcttgactacaaaatgttgaagaatgttgaagtcctcgacaacttgtatgttttcctacaaccagtttctgtccacagtggattggacatatgcttggtggcatgggttctctggcctgatgaggaaagtaaaacagtgccaaatcttgagaaggtataatatcttatgctgtgatatagaactcatgcttggtttcctctttaaatgttttcatggcaatctctttcaaccttaacatttcccaatgatttgttaattttttgacagaaaagatttcttaattttgatgctgagatatttcagaaaatgtactttatttgtaatttttacctgatattaattaatagttagtgaagagacgactacacaatgaagctgcagcagctgcaaatcgagatggcagatggagaaatcagatgcacaaagcagctcataatggttgctgtcggcgtgctgcacagacacgggcattgtgttctgttttgaggaaattacttgtttctcaaaatctcaatgatttactcgaaacaattgagggcccattggtacgttctacccttgccaaaatgcaatattgtcatcaaatgctttgacattcacattatatttgttgggcaggtaaatgttcttgctgatatggaactttggggaattggtgctgacatggatgcatgtctccgtgcgaggcatatcataataagaaagctgaaagaactagagaaagaagcttataaattagctggcaagagcttctcactaannnnnnnnnnnnnnnnnnnnnnngttctttatacacacttaaaactgccagttccaaaaggttgtgggaaaggaaaattgcatcctagcactgacaagcagtccttggaccatctaaggtataaatttgatctatttgttgtgtgtgtcatttctaggcattgcaaatttattatattagcaagtgtttttttttcctttcaatgtgccagtcacaaacttttcatgattcaagcatttttgaaatttaaaatgtatttccttgtatatctagtctcaacaatggttcactgacataatgtcttcatgttgtattatgtctggattgaagtatccttgtgtccattctagtttctgcatgttgaagatgtcattacggtgttgtcttgatctaagctggaattattggggtgccatcacattttattattatgtctgattacagtatgtttcaagagttgcatgtcatgtttggcttggtgcttcaaagaattatagtaaagtgagggtcagggaaggaagaaaataattcttacgcctttcagaatgtcatggcaatgctggctcagaatttgttgaacatgccaatgagttggccagggaaactttattacaagtagtgctgtaatctgtatattcttttgatgcttcactcaaccctcacgtaattttttgcaagtttcccaaggaaagtgtttgcactggtaacaataagatttcagtaaatgtggagaattgctcttgttgaacttctaacttagatcatcactccgtctaatagtcttttgctctgtttattcagggattgacatgtatttagagatgctttggttttgttcatttttaatacagtgtcatattattatgctctttttattcagggatcaacatccaattatatctgtaattaaggaacatagaacattggcaaaactgttaaatggcaccttggggtccatttgctcacgggctcagttgtgcagcaaatcacaaagatacatcatacaaggaaattggctccagacatcaactgccactggccgtctatcaatggaagaaccaaatctgcaggttatgttacattattgctagtgttttgtataatatgattatattcataggtcatagcaatgattgactgcattttttccttagaaaaaaaactgactgaactataatttgtagtgtgttgagcacttggtggatttcacaacattgaagaatgatcatgattccacaagcatgtcaatggttgatcatcatgaaatcaatcctcgtgattttttcattcccacccaagtattgctcactcaacaattgtttcatgctgtatatattttcctatcgcaagtaaggtaattttgtggtctcctttttgctaggagaattggttgctggtaacagctgattactcacagatcgagctgcgtttaatggctcatttttctaaagatactgcattgattgaacttctaagtaaaccagatggtgatgtatttactatgattgcttcaagatggactggtaaagcggagtccttgatctgttcaaaggaaagagagaccaccaaaagatttatttatggcatcctctatggaatgggtgccaactctctagcagaacaacttgaatgcagcccagaagatgctgcacagaaaatccaaagttttaagaggttctttcctggtgtctcttcatggctacacgaagctgtggcatcatgtcgtcataaagggttagtttgctttgtcatagccatttctgccttttatgctctgatatgttttccctttgatttttttatcttttcttttgaggtgaaacattaggggtagaccctactcgaagtatagagtaaattgcattggtggtacatgaacattttttaagcgagtacacaaacttataaaacacttattttgatgcgcaaacttgttttgtgcgtgcgaacctaggctaaaaggcatatctggctgctattggtaagttgggtgctaattaggatgcctcgtaggcacacacatgagaacatagtactgagtaaacgtagtactccctccggttccataattcttgatgttttggacaatgacatggttttcaaaatatatctttgactttgtttttctattgtaatatattcaataaataaatgcatgtttacttttcttatagtactttgaaagataaatctatatatgttgttctatttcctttaagctttatatttttaaagttattgatgatcaaagttataaaagtttgacctctaccttggccaaaacgtcaagaattatggaacggagggagtactatattataacgatgatactacaaagaaaacatataaaatatagacgaatgatgcagtggatagaaacaaagaaagaacaaactagaatcaaaatatagaggtgatttgcacatgtaataagtctcttgtcctcaggtatgcacgtaacatcgtacttagcgtccaactcggtaaatttagtcacaatgtgttgttttagcatcagtttgcgtgcattggacaagttcatgtaccaaaagaactgttttacaagtttgtgtacttgatcgtacccatctaacaagtttatgtaccgccaatgcaattaacttggaaatatatatagcagttttaggcaccatgttgccaaggcagaaagcacccacatagatacacccgttgcagtactgtgaggattgttgcattcgacgtgggcatcgtcttatacccacaagtgtttttgagatagaaattgtgaagaaaaaaatgagtatattgtatattggggcacctatcattgccaaagtttcacctattgatcgaatgagcaatgttttcactgagtgagggccaggtagtatttcctttttgttgcactttgaagtttgaaccaatccctccctccatcgctctcactcgtcttccttaactttggatggccatctccttgatcaatggcagcatgacatgaggtgaggatgggagtcggcaggctccagtttggcaacttacagcggtgtgaggtgatagggctgcagcataagtaatttacctgctgctaccttgggcgtggcacaccagattggaatgacatgtgtccagctggcacatctttgtgagctctgccactgctcccctcattgagcgtttgccactagtagccaactagccattgatcgaggaggctggaaaaaaaaaagaattcaacttgagttaaatttgtttgaactagtttcaattagatcaatatgttgacccgtgtcaatcatttttgttattttgaccagtgtggtagctggcaatatagcatgcatgattgttaatgaaatctaagttttccaagttaaaaaacatattgatgaagcacattttctggactgttcacaatgccttgtgcactactccctcatcccaaaataagttaacctagtacaggaaaataaggtaacctagtacaggtgcctgtccagattcgtagtactatgatatatcacatcctgtactggtttacttattttgggacggaggacggagggagtactagaagctgaggacaaccttaaacaagaaacagctaacacacgggtgaataggtgcatctaattcagttaatctaagaccagtgcaagaggtgtattcacagtgctatgaaaagaagaatgggggtacaacacgcatgaggttgcgtaacctacagggaaaggcacatctgtgctttctgccaatgtgtagaagtacatatcttataaagcatgaatcctctgcttcattttataaccacccacatgtcaatacttaaaggtagtgcctaagctattatcacttatcaggtatgtggagaccttaatgggaaggagacgttttctttcaaaaataacagccggaaatagcaaggagaaagcaaaggcacagagacaagcagttaattctatttgccaggtaatagagcaaccatctttcttaagctgctaggttcttaattcactgcaatacagtatttaagtgcaagtctttccagggttctgcagctgatattatcaaagtggctatgattaaagttcattctgcaattacaaatgggagcacggtgggagcaacagttgattcaattgatgtggctatgcagaacttttctgaaatcagaggccgttgtcaccttattctgcaggtatttgatgaagctatcatgaaatatcccatttttcctggtcatacatacatatatgtatgtatcccattttccatcgttgttctgttagtttgcttgtttagatgatggtaatcctcttctgtgttttaggtgcatgatgaactggtgcttgaagttgatccatgtatggtagcggaggctgtaaggttactacagactgtcatggagaactctgcttcactcttaggtatcactttctaatctgaagttctgaatcggatactgctagttttcattttcaagctgaaaattgaatcgctatttgtttctttcaccagtgcctttacgcactaaaataaaggtaggacaaacttggggttctttagaaccgttccatctagaaccttgacgcgatggtgaatgcttctttggagcaaggtcccaagaaatcatctgtttgttaatggaaaggctaaggtgccattgcagtcagaaaggctgggtcaggttattcttgcaaacttctctgaagccatgtttgatctgccaagtctgacaccactttggattcgaacttactgtagcacgattgatgttgccaggttacataaattgataaatgcattccttatttcataccttctaaattctggttttggaaatagtttttgttctatcaaatctgaaacttgaatcaggtgatttctctttctgcagggccttcggtctcctttcttttattacgtgccaccttgaatctatataaaacaggttacattgcttcagttacggagtccattgttgagaatgaggattgaaggacaggccaacggttccgactgaagctgcagtaccgcctatacaggattcatcacattattcatagagcagacaaggggaacatctcaaggggacatccacttctacagtatatatatattttttttgcgaggacttctacagtatatatgttgtactgtaaatggacagactgtaatagcttgttcattcttttttgcctgatgtcttgattatgtatatattgattatagaggtgttgctcgagttgaagacttgtgaaactgtcatgttgcacagtacttatcatttatgagagtaacatcgttcgttgctctttttgtgcattgtattgtacagtattgggttacattgcactcgagcaaacttttgcgagtcgtgttgcttgcttattttcaatctatagctgcatctttcttggtcgccctagctatatgtatggtcgttgttgagaaatgaggaatgactgccaaagcaacaaattgaccttatttacgttgaagggcagggtgctgctagcgctttggctatcaagaatgctagtattcttttttttcctatcctttacaaagtcaagtgtcacaaacgaatcgctgtgttccgttcttgattgtatgtcatcctttgcattccattggatgtaacatcgtcttttctttcttgccaaattagatattgtctgcgggaatgtaataagttagctgatgctatagtatccattggatgtaacagtcccccaaacaccgatcttttgggacggtgcacctccgggcgttgagggtttggttgccggcgattttgtcgctttcatgggttaatggaaacatgaagttttccttaaaaaaaaaaactttgcattcctttgtcgcgcagaggcggttcgtccgtcagcttttccgatgaagcaattgccatattgccataattgctactgatactccatcccaattgttcttggaaactatatcatctcatgttgttttcttaaaataaattatcataaccatctctcttttcttccatttcatctctctatcccctcatatattgaactggtttcttacatgataaatgatttcttcatctttttgttttctctgctcaactcttttgcaacatcattttttttcttcttacttatcaacatattaatgctataaaaattagttgaagtgaagggtttcggattgcactaaccatcatatattgcccatttgcattgatgttgatcggtgaaatcgtacactccattccacgcacacgacgcatcgtacattgcacaaattcgggactagatacgctacaacccactaacttaggtagggatgtgatcccttctagtacgatgaatctggatatccatatatcaaaattcattataataagggaccacctatacatttgtcgacaaattttctcctaaaaatttgacagatgtaattatagtataatcgtagtgtaattacactgtaacttatatgtaattacactgtaacttgcaggtaactacagtgtaacttgtatataagtttcacgtaattttgaatcgttaaatctattacaagatttgttttattgaggaagaaaaaaaaatcacgacacacacatatgtgtaaggatttattctcacaatctccattttatcgaaataacatattacacagatatttttgaaagttacatacaagttacactatagttacagtgtaattacatgcaagttacagtgtaattacactatgattgtactgtaattacatctgtcaaatttttgggagaaaaattgttgacaaatatatagcaaaatcgttataataaaaggggttacatcctttttagttgagttttttttttaaatggagagagtagcaacgagcaaagcataattttcgtactgtaccattttgcttgggaacgaacaaaactagagaggctgagcaaccaacaagacacggccagggtggatcgcccatcccgtccctgtggtccagaggataagccgcaccaccacgcgccgacacgtggctgccgacctgatgggcctgccagcttggccggccgcatcatccccggcgaagcggcagccactcctccccaatcctctcggcagccaaccgtggccatggatgaaatgacatgatacgattgctgtttatataagctgctggtgaaccagcgtacagggcctcaacagcactgctactggacatactctactactactagccagtaagctagctaactaactacgtggctatggcccccaccgtgatggcctcctcggccacctccgtggctccattccaagggctcaagtccaccgccgggctccccgtcagccgccgctccaccaactcgggcttcggcaacgtcagcaatggcggaaggatcaagtgcatgcaggtatatatgatatatacctcctcaggcttctcctttaaagtcaaggatcaaattaactcatgttacgaaattcaaattaacctgatttaaatttttacattatttattcaggtgtggccaattgagggcatcaagaagttcgagaccctatcgtacctgccaccactcaccgtggaggatcttttgaagcagatcgagtacctgcttcgatccaagtgggtgccttgcctcgagttcagcaaggttggattcgtctaccgtgagaaccacaggtctcccgggtactacgatggcaggtattggaccatgtggaagctgcccatgttcggctgcaccgatgccacccaggtgctcaaggagctcgaggaggccaagaaggcctaccccgatgcctttgtccgtatcatcggcttcgacaacgtcaggcaggtgcagttgattagcttcatcgcctacaagcccccaggttgcgaggagtctggtggcaactaagctaagatcaagcatcgcgctggtggattgctgcctataataatagtatgcagctttgttttgggctatgttgatgatatatcaatatataatatgctatatatttttattttacagtttggttatgtaccatctcaatggcctctgctcttaacacatatgtaataatctcttccctccctctccggccggttttattgtaagagtactacaattatcgttgggtgaggatatgtgaaaacaaagctccggctatatacacacaagatatgtatctagagcatatctgataaattcgtcgacaataaaaaaaatggatggtatcacgtaattatgtttgtttttaagtatttgtttgcaatgtttgtttctatgtttaaccgaatgtattgtgaatataggatctgacataattatttgtgtaagttaattagtaaacgaatgtatttctttttgagagaacaatgatttgatcttttgtgcaacggctgataagtccttaaaaaaatgaataaatcaaacaacaataatttatctcagcacagtacatctcagttcacctgactgagcacgttagcaacgagcacagcatatttttcatattttgcttgggaaaacaaacaaaagttagcaatcaacgacacacggccaggttggatggatcgcccgtctcgtccccgtggtccagaggataaggctgatagccatgccagcctgcccgcccgcatcttcaccggcgagccgcagccactcctccccaatcctgtcggtaaccatccaaagcgggaaatttaactatttgccactcttatgacatggtaattaacgatttgccacgttctgtcaataacacgtgggccctcatgtgtctatgacatgtaggtctagtgacaaatcgttaagcactattcgtaagagtggcaaatagttaaaagctccatccaaagcaacgggcatggcttacatttctaatcatttgagagggtgtttccttgtgtatctttttctaaattcaatacaaatagttacttctttaaaatattaaaaatatagagtatagtgatatacaacactctaaaaaaaacatcaagtttaaatacaacgtacacattgagaatcaaaagaaacggaagtcgaatgtaaatagtactcttttttatatatcaactatgaattgaatttggatataaatataaatgttattaaattgtttgagaatttttctataactatttgaatgatttttagaaaaaaaattcctcaagcaatgcttgagtttaagatgggggtattcacttaacctttacaaacctcatgtccctagctagtagtgtttagtgggaaaaagttagggtatttaagatagttggttaatagattagaagtggtgtgagataggagtaaaaagaagtggatttatctctattattataaaaattgaagatgtttttgtcgatacgttggtacgttatccgtgcatgagtcgatttttaattttgttcgcttttggaaatacatatccgcatttgagtcacttcgctcacttttagaaatacataaggactcgtataagatatctatttaaaaaaacccgcatgctaacttgagatgattagactcctaatgtagctcatgattatatatatatatatatatatatatatgtgtgtgtgtgtgtgtccaagccaattatcacagtgaatttcatcttaactaaaccatataacaacaataagattaaaataaccttcgcctgttgtgaggcacggacatttttttcatgttgagaaaaacgatcgagagtgacgtattagatgtagttaaatatatacatatgagatatatctatatatattaactttatttcatattttttttgggttttccggaaatgctcaggatcgatcccattgggtctgcccctgccctttgagatcgaaacagttccatagttggcgttatataaggtgctggagcctcaaattgagacatgcaatcatcctctctttatttctactgctaagcacataactactctagtactaataagctagctaactaagggtctgttaagattgatgccaagagacatgcaatcatcctctctttatttctactgctaagcacataactactctagtactaataagctagctaactaagggcctgttcagattgatgccaaaataagccttaccaaaatttatcaatgccaaaattttgataaattgacaatattaccaaaattttagtaagattggcttaataatgttgccaaaattatataaacattactaatatttagtaacaaactaaacgcagtcacataattattaattttaccaaataatgatatggttgaaaatgtcatcaatctaaaaggccctagctacgtaactatggctcccattgtcatagcctccttggccacctccgtggctccattccaggggctcaagtccaccgccggcctcccagtgagccgccgctccaccaactcaggcttcggcgacatcaccaacggcggaaggatcaagtgcatgcaggtaccatacgtcctcagcttcttcttcaaagtgatcgtgtaggatcgaatacagagaagcctattaaaggtagtgtaaatctctatctttgtttagcttttcggtgacatgcaaaacgtgataaactattagcatataaataattaagtattaattattataaacttaaaataaagtttatttgattctttcaagaaactactatataaaaattatttttgcaaaaaaaaaacaaaccatttaaccatttgaaaaacatactaacagaaaataaaaaaaagttgaagtttggagttgaaaaaaaaagaaacggctaaaagggatgaatgttagataaaatcaaagaaagtcagacagtcaaaagtttgaaaaacaaaaactaacccaacctaaaaatcctaaagaacatttctggcggtctgagcggacccatcgtactaaaaacatagttatgtaaaaacatgttttctctaaaactagctattggattaaagccaaaacttgttataataaagtagacaaaccatagaacaactccactgggtgaatttgcaaaccaatcaatgtttaagagaaaacatcctcaaaatgtctgttgcctcaaattttaccaaatctaaacatagcctaaaatttaagaaaatttgaaaccttccatatctgatctatgaagtattagaaatgttattaacttaaacaaaattgccgaaaaatgaagaatcacaaattaatgacaagacgaaacaaaatgtaaaacctacacaaccgaaaaagatcatcgacgccttgatgattgaatatgatctttattgtcaagcattgtccataaggtgtagccacaacacctctcacaaaatctctcaaaaccctaacacaatgagccctaatatctcgaatgtctcaattgtctttaccctcaaggcatatcctcactctctatttgtacccatggatgtggttgttcatagccacgagctcaactaaaaataggaatcataataacataggaaacccctcaaattaaggttacactcatccttttacaaatacggactcaattacaactcaaacttggacaccttccaaacttgacccctttccatacacatacatatcctcatgtatcctgcatgatctcctttcgcttgagcatcctacataatctcctagattgtctagacctcaacgtttcccaagtttactcccgattcatcagtgggaatactcccgttgttttaagcaacacctacatatagacaatcaagaaactatatccaagtacaagttctttccaacttaactcacattaacataaatgtagttcataatacacacatgaaacatctagaagtcataaacattaagcaccaaatgcaaaactcaattttaccccgaaaccgactccaaccaagaataccctggaccacctttagcattcctccagtcggtccaccatgtactagcttgaccatcaaggtcggtcctccatgtataggtcggaacatctagccttgtccagaacgcttcgctaatttaaacacttcaccaaagtcaattcaaacacttgtacaactagttgttcatcctaaaaccttaaatcagcacaatgattacacggatcaatcaaactaactgatgttcaaaagttcagagtgacctgattcaattgtttccatttgtttaggtgtggccggttgatggcaagaagaagttcgagacattgtcgtacctaccgttgctcaccgcggaagacctcctaaagcaaatcgagcacctgctctagtctgagtgggtgccttgcctcgagtttagtgatgtagggttcatctattgtgggaaccataggtctcctgggtactatgatggcaggtactggaccatatggaaactgcccatgttcggctgcagcgacaacagccaggtgatcaaggagctcgaggaggccaagaaggcatacccagatgcattcattcacatcgtcggctttgacaacgtcaggcatgtgcagtgcattagcttcatcgcctaaaagccccccgagttacaaggaaagcaactcctttgacgtaaaattagacggatagaagtccctaataggtggagcccatcctcatgggaccacacatcaagggcttcatggcctacaagcccctgggttgtgaggagtccgacacaactaagccaagatcaagcatcacagcacaaaagtaatgtctctttagcaatgcatagtttctaggagccaaaataatctatatgcattgcctttgctgttgttacaaggatatgtgctaatacatggttatgcttggtaataacgctgcaatgttgcaacggataagttcagctggaacactactttaatatacgtttctaccttctataattgccatctttattttgcattatatttttttttcagttatcataataatcaaattaattgtatgatataatattggaatgtttaaatcacatcaataggcaatgaacatcaacgcatcatttcattcataagtaggaacgatatattttttgggaatacaatataatcttacaaaaatgcttttgcaaaatcaaattaacatgtcccacacctgaatcgaatgctccaccaaggttgctagaggcgtgtcacgagtaccttcgatagaacctgccgaaattagtttggggctgtccaggcgaagcatgacaacaaaaccctgattgctgtgaaggcgaaggattagggcgaaccacgtggcaaagcccaggaccttcgcccccaagccaaatgtcttcgcccagtccaatggtcttagggcccgaaggggtcaactagacaacgaaggcccaccttgcggcccaagaagatgcccagggttaaattttctgtaattatcctcataaatgtccctatcgtaagtgtatctatgtaaattcccttgtaccaagtaaacctagggtgcatgcgtttgtactaagcctataaatagaccccaaggggcatttattggggggatccaaaaatttcaatattaatacataatttttacatttccacaaagagtgaaccacatccttcgacggacgcagttgtcattcgacaatagctggaaccgtctgtggggaacccagaccaaaaccactaattattcctccgtcagtttgattacctcagttgttggtagtggtcttttgttgttgaggttgtccttgaggtaacgcgcgtaggtgggcacttgcattgtgtccaacaatggcacgatgatgtggattttctggatcacctaaacaaaacgagcaaactgctcgtccaccaatggcttcttgtatctttgagggaatggcaacagccttgtgtcgcagtactcttgcggcaaggtcttctctggctgaacctcttcattaaccgtgttgtcagatggtgcttcccgagtgtggctagctcctgcaggattaggatatggcggatcgcgagtggacttacctcccctcatcgtgatcgccttaacattttcaacagaggatttgggttgccccagaatccttccagattcattagcaggtactagagcagctaattgtgccaaccgggtttcaatcattttattaaaactcagctggtcttgaaatgcagaagcgaagccatctagcttaacatttatattttccagggtcttgtcattagcagctagctttttgctaagagcatctgtagttttggtttgcgcaaaaacaagatccttcaaggaaggttggttagagaaattaccgttattgttgcctccttggaaatatgggcatggctggttctactattgacctccttgtggtcggaacccgttgttgttgttgttgcccatatacatcgcctcttcatgggtttctgagtagtcgttcctagaatgacccgtgccgccgcagacttcacacgtaaagtgcgagtctcatgccttgacggtgcctttaggtcatttctcgtggtcgtccaagcgttttatgatgaggtccagttttgcagcgagcatctccgtctccttgacggtgtgcattcttcgctgacgggtctagagtcgttcctcgctccagcacatgttggagaccttcttctctatgagatcgacggctcctctgcccgtcttagagaagaaggctcctccagctgccgcgtctaggtgatcacgggacgtgggagtgagtccattatagaagttctgcaggatcagccagtcgtccatcccatgatgaggacaggcagccacatactccagtagtcgttcccacgcctcgggaatagactcgtctcttgtctgctggaaacttgagattctcccacgtagggcattggttttgcccattgggaagaactttgataagaatgccgttgagcatttgtcccaggtgttggtcgtagcgaagttggcataaaaccactgcttcgctttcccaaggagagaaaacggaaacaatcggagcctgacggcgtcaggattgacgcccttcatcgtgtacgtgctgcaaatctccaggaactgttgcaggtttgcattggcatcatcgtctggcttgctacagaatgggctagcctgcgtcatcgtgatgaggctggacttcagatcaaagtccatgtctcccatgttgatttgcggcccagtggccatgttgtcaacagagggagcagcggactcgctgagggtcatgtcagccatggttttgaaggttggtggcacgggaatggctggtttctagtaacaatccggcccaggtggggttggccgaggcccaacaaattaaggttgcccggaccccaacagttcttgggcacatccactcggggaaaggcccaatctctctaaaagactagtccaataggggaagggtgactctccctttaaggtggcttcctcctcccaagctaagcaaggtgggattattcagaggctcacacggtcgccgcccgacttttgcgtctttgccatcgggtaatagtggaggatgtcctcatcagtttctttgtcgggagagttttctgtggagcaacgacccgcggcttgacgctccaaaagaaaacttctggattttccttgaaactttccggcaagttgaaatcagtcatacactaccctgtttccacaataaaagtgaaaacaaccaaggttagcatgcaaagcacaatgattatacagaggttaatataaagtattagttatgtaatctcttttataaatcttctccggcaacggcttaaaaatgcttattggtatttcttaacgacattactagaaatataattcccagcaatggcgcagaaatactccttgtatattatggttacagagttcatccgcaagcgcacggatatactattgtagtatttcacccgagagtattcaaagggtatcgtatttgtttaatcccgtgggaagattataatagagagaaccatactaataatttatatattacttgtgataaccaaagtctaaacaggggttaatgtaatccaaagggtagagtgacactaagcagaagaattaatactctcatacataattatctaaactaagtggaaagaaaatagagagaacctattcctatatttctagtgtttgatgaaaacaaaacaacgaacacacagaaataaggaaaccctgtattttattaatcacgattcattaacatgaatgttacaaatacatgagggctcccgtaggagttcgccttttgccttcgcgaggaatgcttaatagaaagatatgctgactggagattgcgtgcagtccgctgattcccggcgcctagcaatgagactaccggttaattacatccataggacgagcctacggaacacctccgattaagctgcgctttgtgattgtcatcttcaaaattaattactcgccgaaggttgaggttggtgcagatttaatggtgaatatagtgaatgtggaacaggtggctttatttcgccaaaacccgatcacaatacactaccaacacgtcggtgtgcggagagaatttggtgaagcgggtgacatttgcctcgtcggtacccagtcatgtatcccggccttcatcaaacatagattttatggtttcttttgcctcgtcggtgcccagcaacggtgtatccggctcccgtccattttagacgtgttaatagtatagtgacctggccttgtcggcactcggccatgatttcgtctagcctcatcggtaatagacaaatgaaatgaatgaatagcagtagccctgttagctttagccaatacgtcgcccggcctcgtcggtctcggacgtagcacaaatattgatgaatcggccatttcatctcgtcggtattcagccacgatgacgacgtgtattttaaatctgcacgcctcgccctcatggctagcgttgttttattgtgcgaataatgcttgtcttcaggaattgtgagaattgctcccatccatccgatagatttttgagagggaaagaattgctcccgtacatgacatgcacaaggcaatatgtgactcatctgacatgaatataaatatgtatagatcatggttggtctgatgctaataagactcaaactcatcctaagtttatacaaataaatatccacatccaatatttgatattgataatttagacggttcaaccctcacgagggtcaggctcgccttgtatttatttgcggcccatattaatcgcttgacaaaatgacgtgtgcgtctgcatgcgccactggggatacttatatccatggctacaattcacaacgcatccacgacatattcaccagtactccactttactgttttaccgtccaggctgcgcaactgcacaaccctacggtgtatatttgctccctctagaagataatgccgggctatgcataatatctgcacagtactacgacgctgttgtattgtcgatgacaaatagcttgacgaagaaattatgttgatgaagcgcggctcgacggaaggcgaatgattaatttagagttgcaccagcgacgatgaagcatactccttgacgttgacgattactttgccttctcctgattcctcccaaatatttgtgtggctataatattcaccatcaccagcacaggcctgcatcttggcgcagcgcctggcggcggcgtgtacgcgtgtgcgcccctcgcgaggagggcgatcaggccctttatataggcagagcagcagcaacggcgcggcctcatcctcgcgagttttcagcgtcgtcgacgtgttgtagataatcaatcaaccacctactgtagataaggaaattaacaaatcgcctgcatgcagaagcaatcacgacattaaatagctaatgacagtgggccccatgaatatatcatatgtgtttgtttgccatgatttatctcctcggcacagataaaccatgcacaaccatagagataatcttaagattaggatagcaaatgacagtgggccacacatgttgtttgccttggcttatcacttcgttattagagataatgcccaaatcaatcacaacaaaccaacccaagtacgtataatgctagtactagctgatttttccatttcaccaactcatatctcttcaatggttgattcgagaagcaacccctgattgccgagtttcttatgacaatccatcatgaccatccaaccggggctaaatacggaggagtaccctccccaggaaagtaacttaggactatatacacgcgcggaggaatacccgtactgagctgtcaccatcaacggcccacctcgcttccgcatcatataaccccaaataatgatatccagtaatctaaacaccacgcttaaattaccaaatactactctaatatcatcgtcatgacatagagtcatcgtatgcacgttcattatacccacactattgcatttcccagtttagctagcatcataatcaatataactcggatatatagtaaagttagtattcatatactcgtaaagtaatacaataccagagtagtataaagaagaatattctaataaaagtactaagtcttacaaaggaaggaaaactactagagctatattcgaactcttccgaagactctgaggattgaagattctattctatttctattccactgtactctagagactatactaaacttgagaaatgtatgaagcttcttgcttgaggtgtgtggaagaagtgagaaggtgaaggtcttatatagctttccaatgacggttgtgacggttggaatggtcggatataccctctaactgtcattgggagctaatccacaccgtccacgccaagccctgcatccaatggtgatgtggggggttcggtcgaacccactggttcagccgaaccatgggccggcccaaccagcccacatttcggctagtggcctcctcgtgttcttctcttcccagacttgtgaattttagcccaatttgagtatgccacttctgagttcttgccccaccttcctctaagtccgattctcaacagcgtccgattgatcgatcgtttattttgctgtcgattctcctccatttatgtttattctctgcaagaggttagtaatcctggcactagtggaatatttcttattttaacatgatatgcattgcaagtataactagtttttatttattaaggtaatattgatgggcgaaactgatcgataacgaccgtcaacagtacccataccttgcatctgtacatttgagatatacagcatagtagcaactcctgatcaacaaccaagtttagatttttgtgaagtcctttactcgggacaagaaaaggttcaagcttgggcgtttttgattatggtcgttatcgatcagttgcgcctgtcaatgttaccaaaataaaggagaactagttgtgcttgcaaagcatatttatattagaataagtgatattccactagcactaggattctaacatcttaaatacaaaataggggagaatcggcagcaaaacggacgatcaatcaatcggacgctgtcgagaatcagacttgaagacaaattggatgagaacaccaaatttacaagaaccaacaagcccaaaattcagaagtctgcggagagaagcaaacaaggaggccgcctgccaaagtttgggctggttgggccagcccagggtacggccgaaccctgggttcggccgaaccagccgcagcactgatggatccagggtttggctggacggtagagatcaactcccaatgacagttggagagtattaccgacctttccaaccgtcatcaccagcctataaaaggccttcacctcttccatttcaacacacacctcaagcaagaagcttcatacattctctcaagtttagtatagtctctagagtatagtggaatagaaatagaatagaatcttcagtcctcagagtcttcggaagagttcggctatgcctctagtatcttttccttcttttgtaagacttgtactatttatagaatattcttctcaatatatttacggtactttccttcattctgattattcgagtaccaactttatgaaatattattcgagttataattgtttagctaacttactcgggagatgcaatgctgtgggtataatgttcatttatatgattactctatgtcatgatgatgatggtagagcagtatttggtagcataagcgaggtgcttaggctattgaatatcattatttagagttatatgctgcagatatgtcgaggtgggccgctgatggtgacaactcagtacgagtattcctccgcgcgtgtatataatcctaagttattttcctagggagggtactcctccatatttagccccggttggatggccatgatggattgtcataaggaactcgacaaccagggtggtttctcgaaacaccaggagggcatcgtaagggggtattggctatataattatatagtagataatattgactaaagtgtatgtatgtatattaaaagtatagcaaatgactcttttcttattctttccacttagtctagaattaatatgtatgagaaaagtgaatgcttctgcttagtgtcaccctacccttttggattatattaactcttgtttagactttgattattacaagtaacatataaatattagcttggttctctccataataatctttccaaaggattaaacaaatacgatacccttggaatactctcgggtgaaatgctacaatggtatatccgtgcgcttgcggatgaaatctgtaaccgtaatatactaagagtgtttctgcgtcattgctggaaattatatttttgataatgtcgttaagaataccaacacgcggtatcctacaattaaaaccgcgaagtcatgatgtcacgtaacaaaatttaccttttttagctacggagtacgtgtgtaacgacttgtctttaagagctgctatagataaaatttgccttttttagctacggagtacgtgtgtaacgacttgctttaagagctgctatagatacataattaactgacaggtgttggctgccggaattgttataaaaatctgtcgatagatttttaacaaaataatctgtcaatttttagactacggtttaagttaagattagtgctagggtgctagaaaaatgcaaccgcgcgagagagctggagcctggagggaggaatcgagcgcgtggacatcatgcgctgctgttccaagctacttaccaactgagctagcaggtattgatggttttgttgcaaagatatatttatattaaaattaccgccgttacactatatttacaatgtaaatacactataattaaaaataaaacatttatttattatgatgtaatttttttatctggattgtaacttttctactacttggtgtaatttctgttgttgttaagcccagtagttaactagtgtgtttttttcttcctttttgctagcgtcagataaagttccatggtattagagcaggtacaatagtaggctattagccagctataaacatattttaataagataaaaaataagagataagagaagcggactacagatttatagtcagctgcagcacggactctaagatgcagtgtgtgtatgataggtgtgaccatatattaatagtatagtaagcagctgttatattgtgtgaattgactattagatttagctatatataaattaaagctagtagtgagctatcctattaaacttactcttaacacccgtacttgaatttgatagttttaatctgaggcgtacgtagctatttggtggcttgaaaatctgagtgatttagcagccagccagtcacccgtgctttggatcagcgaacggcagccactctttccacatccccggatcaaccaagcgctgccttccaatgccacctgcgatttggttatttatagacgtaatggattaccacacaggtcctcaagccactgctgcagcgtgactctgctctagcacctcaccaagcagaaagctagagagctagcaatggcgcccaccgtgatggcctcgtcggccacctccgttgctcccttccaggggctcaaatccaccgccgggctccccgtcagccgccgctccaacagcgccggcctcggcagcgtcagcaacggtggaaggatcagctgtatgcaggtatgaacaagccaacataggatcagtacaagcttaattggtatcttcatcctcatcacacacacaggaaattaaagagagctcatcaactttaacccatatgatttctctgcgcaggtgtggccgattgaaggcatcaagaagtttgagaccctgtcgtacctgccaccgctcacggtcgaggacctcttgaagcagatcgagtacctgctccggtccaaatgggtgccttgcctcgagtttagtaaggtcgggttcgtctaccgtgagaaccacaggtctcctgggtactatgatggcaggtactggaccatgtggaagctgcctatgttcggatgcactgatgccacccaggtgctcaaggagctcgaggaggccaagaaggcatatccagatgcatttgttcgcatcatcggcttcgacaacgtcaggcaggtgcagttgattagcttcatcgcctacaagcccccgggttgcgaggagtccggcggaaactaagctagttggcaagccagcaagctcactcgtgagctctatacagaggagactcgattgatctattcggttttggcagctttgaacgttcgaatcgggccaccttgcattggtttcccctttcccagtttgttgcttcagtttttttttttcatcttgtttgtgtcaacatcagctgtgtatgtatgtacatatgtatgtatcaacataggttgaagagcatgcatatgtgaatgctagcaccaggctaatcatatgcacatacacatcgtaataaatatattgtacaaatcgtcaaaaacgatacttatatgtaatactatactcagaccaaacttgatacctctggtttccatttcaattatgtgtggtaggacatgcatagcattgttgggaattacttaattcgtttccatgcaaacagttcaaagatacacgcgcgcaaatacgggcgccctcgttcacatatgtaaattattatgtatacatataactctaatcagataaaattcaaaatgaactgcgagtccaagctcgatcatcctgaaattgcctcctcttctacgattctatacgtagcactcatttctgaattgaaacttttgtgagctttggcttttgatcctcgggtgttcatctattgatgcatacattcatttgaactatatttaagccaaacttatctaacgcagttgaattgtcgccttctgtcatttcaaggaaatttgttgctttctgaacctttgtgctaaagttggaattttagtccattgttttggcgtccaagattttttttcccacatcatgacaatttttaatttaagaaacacgttaaataataattttataatatatcctcatagatctatttgcaaacatatagaccccacaaacaaattatttctgtaccatttgcaattccaaatttgccaacattagctaatagtagtgtgttgttctgatttagttcaaaaatacctgctaacgataataaaatttaaaagggtattccgtcgcaaacctgaactgtaccaattttgaataatgtactccctccgtttcagaatgtaagtcattctagtatttctcatattcatattgatgttaataaatctagatagatatatatgtctaagatttattaacatcaatatgaatgcggaaaatactagaatgacttacattgtgaaatggaggaagtacataataaatgattaattaatactgaacagagaaacaaaagttgtcatcatcttaatagtcctttctcagtgtccaactgttcaggagatagggttatgataatactagaccacatatgtccagtttcaaaggataggttcataaactagaccacaagtgtcccaactacaggattagataggaatcaacttgtgatgcctagaagacgtacgtaaatgacaaggacgtaggaaaacacacggttcattccatgtttctgggtagtggacatatcatagataccagcataggaagtcacgcatttgcacaactataaccatcctaattatacattatatatatgaaaatatactaatgatattagatgaacgaaaaatctgttttcattactgtcgagaagtaatcctctctagcgggtggtcgtgagacccctctttgtgagttcggccgggggagatggcgcgatgatcaagagacttccacttgagatctaactactggatcgttcacgagtatgcatggaagaccaaggattatacaggttcgggctgctgggaagcgtaacaccctaccctgagagcccgaggggtgtgacgtggcaccccgagccccctcagccacctcagcgctatccgaggggcgggggaaggcgaggcgcatggctacgtgactaaacgggaaggatacttccctttactgtgtgtacccccgggcctatatcaccgacaattatagtcacacttttgtgcaaccacaaccgccatctatatttatattatttagcttgatttatatgttgtatatgataacaaatcacccaccataatatattgggaactttaaattcatatgataatttaagtttacataactttatcattatttttcactgtcttcaccgctgcaccagtcgccgccttttcaccacctccactgttacatgacccttattctccccttagttttccattggtgtctgttttatagcttaagcacatagatacatttcatcctgtatatttcaactaatacaatacattaaatcataagtttgaaagtcatcctcaaaacagagcaatttgaatggtatttccaaacattggttctgctctttaaataccaagcaaatcaaactgactactaccaggctagaataagccaatcaaattggtgtcacaggctgtttgctatgctgatcttttcagcttgtatccaagcgtcaaacagttctgaatgacccaaaatctgttatgccagtagaatattactcagtcttccaagttaagagtcaaacaaaacagggaaatgagaacaaaatttcaactattgtacttctgtccaccatgtatccaaaatttcaactatcgtacattccttttctcgaacaacaaatatgtgccgattgtagcaagtattgttcagcatgacactgatgttgtctgaagatcttgattcatctgagataaagatcgaagaagttcagacttaaaaacaccagtacgtaatatacaatatatctcagatgaatcgtacgcaatggctattaagactttgtccatgattcagtcttcaaccaagaccattccatgtatatattttccaataccagtttcagttattaaaatccatagttgtggaagaaacatttaaatatgcacattccaactactccctccgttccctaatataagagattttgacattttacttgcactgtttgaccactcgtcttatttaaaaaatgtgtgcaaatatcaaaaacgaaaagttgagcttaaagtactttggataataaagtaagtcacaaataaaataaataataattccaaaattttttgaataggacgagcggtcaaatagtgtaagcaaaatatcaaaatcccttatattaggggacagagggagtatttagaagaggaggtgtattcgcactcataaattattgatgttaatgggctaacgacagatcattttaatcaagatttcaaattcagaaacgggcagtactaccataagtttgaggaaattgttcattagaaggattgatcaccttacggcattgcatgctaccttacagcattgcatgctattcgctgcagtcatgtagcaattcaccaacaccgccatcatcttcacagttgcatgggagaggtggggggcatgtcttgggcagccagaaaacatctgtgagaagcagtaatccttgggcctctactatagctatcaagaaagtgcagaagcaatgaacatgctatgcatggcctgccatacgttcctgatatcagttttaaattccttggtagattgtacttgatacatactcttagtttccttgggctaatgaggcaatctgatgactcattgtagacagtaagctaatgtgattacaaatatactggtcaagtggtcattatgaaaaaagttcatactaaaaaatcaaatcatggtcaacgtttatattagtcaacctgcatgtagtatcttctacttcgtccctttcagttacaagacattttgactttagtcaaagtcaaactgtttcaagtttaactaaatttatagataaatatagtaatatttataatactaaattagtttaatcaaatcaattattgaatatgtattttcataattaatttgttttgggttaaatatgttactacttttttctataaacttaatcaaaattaaagcagtttgattttgaccaaagtcaaaacgtcttataacctgaaacagagggagtactaaatacctcgatttaacagttctaccttttttgtaagaataatatgactaattattatacttgttgtcacatttgccatttgaacttttgttaaacatatcaaatgcctaggaatgcatctcagtatatcaaattaggtacatatacatgtattgatatgatttttactcaatgacaactgtccagacattatgtttcttaataagtaaataagaatctggtaccaatttcattaatttacttggcaaattatgtagtagcttacagtaactgtttgtcacaacatcttcatcagcactgtaaatttttctatgtaaaatccatctaatggagcaacttttttgattgattatcgcaaaatgttaagagccatcatcagaacatatgcagtataatatccctatttaaatagattcttgtgtcaattttgacagtttacctttgaatcaagctgtagcgttgatgtgctgtataatcgcacatcactgaaaacgtggtagacattaacagccgctggttgtggagaggagcaagaggaaggggtcgtcgttgccgtggctgtcggttgaaatgctgtgcagtgaccagatttagttctcccagacctctgaatggcgggatccagaggtgcacgccgacggggatgacgtcggggggtgcacgagaaggatagcttgttccacccctaaccatccatttggggggagggggggggataggaaaaaagtgggggaagtagagacgcagcgacaccggagaaagaggaggcgacactagctagggaggaggacgcgatgacaggggatgtggaggaagcggcggtgtgggtgtggaggaggtggtgaaggcacggtgagcgcgcgcggagcaagagcggcgtctcagcctcctggcttctccatttaattcggagaaaaagaggtatttttgttcatggaacattgatagagaaaaaagccgactattggatttgaaccgatgaccctcgcattacaaatgcgatgctctaacctctgagctaagtgggcttacataacagaaatagtgtaacaaatagaaatatgtatagtataggaaatccgtaaaatgtcatatcttaattattaatcttagctattaactagttcgaaattggaagttctacttagaaaacaatactagaacttcataaaataaagttagatagatttttttgaactttcttttttctctaattcgcaaatctatttttctaatagaatctattccaatttctatattgaatttgattttagatatttttaatttgatatggctcggacgaataatctaatacatggaaaagaataaataatatatatacgaaaacataataaagagaacatgcgaatttcttgtattttcagtccatcattatagacattttttgagatattttgttttttttgttatttgctaataatttaatgattaatatttcactaaggagaacatagaatcatagcaaatgaaattgctaattctgattagcaaaaaaaaagaatgaatatcaagcgttatagtatgattttgaatactctaaaaaaggaacgcggtaggtgggggagagaaaaaccttgggatatattgattcgcattgaattgcaaatacatcaacgatagaatcaattcaatgctgaattgcaataagcggagtctcacaactagagacgaaccgctagactacatagagtaatgaatccaacgattcaaaaaaaactaacagatggaggaaattgcacaagaaatcctggtctcaaagaaaaagaaaatggggatatggcgaaatcggtagacgctacggacttgattgtattgagccttggtatggaaacctgctaagtggcaatttccaaattcagagaaaccctggaattaaaaaaggggcaatcctgagccaatccatgttttgagaaaacaagtggttctcgaactagaacccaaaggaaaaggataggtgcagagactcaatggaagctgttctaacgaatcgagttaattacgttgtgttgctagcggaactcccttctaaattagggaaagaagggctttcgaaatctaatacacacgtatagatactggcatagcaaatgattaatcacagaactcatatcataatataggttctttaattcttttttaaaatgaaaataggaatgattatgaaatagaaaattcataatttttttagaattgttgtgaatccattccaatcgaatattgagtaatcaaatccttcaattcatagttttcgaaatctttttaaaagtggattaatcggacgaggataaagagagagtcccattctacatgtcaatactgacaacaatgaaatttctagtaaaaggaaaatccgtcgactttctaagtcgtgagggttcaagtccctctatccccaaaccctcttttattccctaactctagtatttatcctgttttttttattaataggtttaagattcaatggaatacatttcttttttattatagtatcggcaaggaatgtcgattattaactcgatatttaaatattattaaataggctttctttgtacaatgcataggactgacccctccccatttccaaattttggatattgacatagatacaaatactctactaggatgatgcacaag

SEQ ID NO: 5727 - DNA, 19017 bp, Oryza sativa
ggagggcggcagggtctacttctgtaaatattttcaccggtacaatatttctataaatattaaaaataaaaaatttaaaatgaaaaaaattctcacatgcgcgcgatttgttgcttcatcatgtgggttttgttgggccagagccagcagcccgtcttgggtggagaaaaaaaagcccacaacgttttgtcctctgtaaataaaagcccacagtcctagaaaagttgtgactttttttcggttttagatttttttttaatatttacagaaataatctatcgaccaaaaaaattgcagaaatagcccctgccgcccacctctggggcggcaagctgacgtggcaaacgggggaggaacgggcggtgacggagggagggttttttgcaggaaaacccttgccgctctctggtggggcggcaaggggcccgaatgcaaaaaagccagtcggggccggctattttgcaggcagccccttgccgccctctagccgggtggcaggcctcgctgcctataaaaggcctgctgcccagcccccagccctcattcttctctcctcaattccagtgaaaaaaaagaagagaggggaggagaagagaagaaggggcgaagccctgccggattcagacgccgatttcaggtaatattcatagatcctatatgtgactattgagttaaatagtgtgtattctttaaaaatttgtttgaataaatgcattatatttttagggttttagttttactaatctagaagtgcgtattgtagatatcggtaactacgtagatctgctagtttggaattaatacattaccgttgcattggcttacacaagaagatattacgttgtagatgtttattgcatgaaagagtaatatgatctagttatttcgttgacagatatgtcgaacaaacaaatattccaagtttaccatggaccaggaaacgtccgttacgggccaactggggtagatctgtcagattttattgtatcagaaaggggaattgatagaccggctgagaggagtgtaccttctataaaaggattgttaatgaggggcttgagagttgatccacagacaagtgacataacaatcaatgttatagtaagtcgggcaactgagggtttttattgggaactaatgccagttcaaaactctcgagtgtggagatggtatttggaaaatgcattgcaacgcgggtggcctctagctttggttccgtttgttcacccgaaggatccaggtgtgcagacgaacatggatgatggtgagggaccaagtgctgaagtaaacgagacttctgtggaggaggtcaacgcacgagaggacgggggcgtagtagctctagtgggcattcaaccaggtggagtggccgacgagggggagactgtcggtgccattgtggataaaatggagagggaggattctgacaacgagcgtgtagaggaaggtgattcgtcagatgatgagacggatattaatccagaagaatgggctagtgaggatttttctgggctgatcgtctctgaagaggatagtgtgagatgggagtacaaagaaaatgaggttattcagggagcgatttatagtaaagcagaagatatgaaggaggcggtaaaacattttgcagtgtcacttcatagagagttttgggttgccaagtcgaaccggtcgcaatatgaagttcggtgtgttaaggaaaaagatggttgtccctgaagagtgcacgcgtataaggggaaatggaaggattattggatagtgtcagttgttaccaagcatacatgttttctacctggtgttcagaaataccacaggaacattacatgtgcatttgttgcatctgagatgtatgcgcatgtcattgataatctcacatatgaaccaaggtcaataatccgacacattgaagagacatacaagtatactattagctatgccaaggcctggagggccaaacagaaaataatagagatgatatttggaacttacgaagcctcgtatgacaatttgccacgcctgcttggtgttatcgaggaaagaaaccctgggagctcttacaaagtgaagaaattaccctcaattgaacatcctggcaagagtgtgctgcaaagggcgttcttagctctacatgcatgcaagatggcattcgtgaactgtcgtcctgttctctgcattgatgggacattcttgacaggaaagtatcggggccagatactaacagcaataggggtagatgggaacaatcaggtattgcccttggcatttgcttttgttgagagtgagaataccgacagctggtactggttcctaaaattggttaaaacaaaagttgttggtatgaggccaaatgtatgcctgatacatgataggcacgctggcattctgcgagcgataggagagttgcagtttgggagtatggaacgaggataccccggtgtttgggaagatgtacagagtaggtggtgcatgcatcatatgggagctaatttcttcaagcaattcaagaacaaggagctcatgaacatgttcaagaggctgtgcaatcagaaccaggagaaaaaattcaatgagctttagaagagattagatgagttgacagccaaatgcagcgatcagcgtgcagcggctccatcgaccgccgttgctgaccctcctcaagctcttggacctctcccaacggatagtccaacattggttagaagaactggattggagattcggaaattttctcagtggattctgcatgaatcaaaagagaaatgggccaaggtgtatgacacaggtggtgctagatatggaataatgacaacaaatttggcagaagtttacaactgggtgatgcgcggtgtccgtggactgccactagttggcatagtggagttcattttacatgggacatgcaggtattttagggatcagttccaggcagttcttccctctatgccgaacaacagcattttgtttggagctttcgtgcagaaaaagctagaggagttgcgtaaaaaggccatgaaacatcgagctctagtgcaaggtacccaacagctcatgtttgagatactatgtcaagataaggcaggcaggggtatctaccgcaagagtgaagcaggagtgtgttctcaaagccgacggcacatgtcattgctcttgtgcaaagccgaagctgctccacaggccatgcacccatgtcattgctgccgcagcggagtgtggcataccagatgcagtatatgtgtcacagtacttcagtaagtaagcaatatatcatacatggagcggtgagatttatagtttcggcatagctggggagttcacagagactaacgatgaagtactcaatattcctgacccatcgaagctccgaggtaaggctggaaggaggaggactcgtcgcatccgcaacgatatggacgagtcggaggctggcagggtgaagcgttgcagcaaatgcgatgaacatgggcacacctacaagcattgtcctaaagacaaggagaaaccaagtgcggcggaggcaggactatcaggatcagcagcagatggagctcgccctacgggtgaaggcactacctccactcgaccacgtcctaggcgtcgtcgtgccacgcctggctacgtggtgtagttcttatgttctatgtcggcatgtggatttgcttgtaattcgtttcgaacttatcgatgtgtttatgtttcgccgtgtaatgccagacttcggcatgtcatgtctttaggtctcgtgatgtaacgtcggactaaggcgcctaacgtctttaggtatgctgatgtatgtcggacttcgacacgtaatgttatgttatattattgaactctacatatatgttaaattgcacgtcatcgttatgtaccactagtaacgtttgctatatttaaatagcctgtactcttgttgtacataattaatctcatgattttattactatttcataattttgcaagttatcttttgttttacagtactattttttgaattgttctaacacgaaacactatatttttcagagatggcacgtcaggatacacctcagttgttggacccggcgatagatcaccgacaccggtctcaccttactgcggtgcagggggctcagcttgggacgatccgggcacggacgtgcggtgagctactcacagttcacgactcctttgtcgagaggtacgaacagtgttttactataagttagttgcactgtaatattttttataatgacattaatttgttattgcaggctacgtgaggccggcctcctaccgatgtgtcggctggtggaggctgcggccggcgacgcggacccggccagacgatggactgtggacaggtccctcctagcagctttggtcgattgatggaggccagagacgcacacttttcacttgccgtgcggtgaggtagcccctaccctacaggacatatcgtacttgttggggctaccgctagcaggagacgctgttgggccagtgaccacggctgtggactggcaggacgatctgacggcacgtttcgcactagtacagcgcgcaccgcacctcccgctcgagccgttggcacaccaccgcaacaccggacctacgaagaggtggctgcttcagttcactgtgagtgtttttgtaccgaaatgacaatcgtattacatatttagtccgcagttaaggtgcctaacattttatcgacggcttgctggttgagcagctacaggcggaggccgacgagtactcctacagccgatgtttggaggcgtacttgctctggctttttggctgggtgatgttctgtggcggtcacgggcactcggtcgacaagggactcgtgcactacgccaggagcatcgccgacgccgcggtaggcgtggtgcctcagtggagctggggttccgcgttgttggcggctctgtaccgtgcactttgtgagtcttgcacgaagacggatcccagcgcgacctttggtgggtgccctctctttctttctatctgggcagctgagaggattgcgatcggccgccctgaggtggaccagcacgcgtacgaggagtcactgtacgaggagcgaccagaggtcgactaccctacgatgggtactctgtggtgctgtcgtcaggtacgttgcatcgatcttatcgtattgttaagttaattgttaagttaattgtacatcacatcgatcgtctcgtattgcagcgccgatgggcccacgtccaggttaggcggtcgtatcctgagtttgttatggagttcgaccgccttctgccgactgacgtcgtgtgggagccctacagtgccacggctacccaggctcgtgtgccgttgggtctgtccacactctgcaccagggaccaggcgtactggatgactacagttccgatggtcttcgacatctgcgttgagcctcacgcccctttccgcgtgatgcggcagttcggcttccgtcagccctttccagtaccgtttccgaccaccgtcccagctgctgttcaccggtaagatcttgcactacgctttccgttgttgcattaaaatctgcctgttcacaataatttgtaacatctgtcgtttcacactaatattacacattaattcgcaggtactcgcgcaagggtcagcagtcagctggcgactggcccgccaagttggcgacttttgttgaggactggttgctcgcaaccgaggaggtcgtggaccacgagggagagccacacactgaggagtcgtaccaggcctacctacgctggtaccagccacgcacccgtactagggtcaccttcgctcccttggagcagcagccccacgttgcgagcactagagacctctatgccaggcaccgcgaccaggacttcgctcgtgctgtgagtaccctgcatcgcaccattcctttatgttttcatgtctttctcttcgtcaaattttacgaatatttacgaacaaattaaccatgcaggtcgacgacatcaaccgggtcgtcgttgacggttcaacgacgaccaacgtttaggcgcggggattccggtacccatagaggagcacctgacgatgtacatgcggatggtggagtcgatgcgctcgattctccgagtgctcacctgtcatgcagacgacgttgctcgggcagacgcagctgtacagcggccacccgtaccgactggtccccgtccagctgcgcacgttcctaggccgactccccctccgcacggaggtaagtatttttattactatttctgtacatgcctcgcacatataagtgagccgtttcacttgccgattgcttcagggtttcgtgcaccgttcagcaccccaccttcctcggctaggccttctgttgtgccccccacaggtacttaaaaaaacaacattacttcgacaatcaatttacatacattttatgtcttagcttacaagggtcccgttgtcgatgtgtaggtttcgcccagttcgctatgacgcaggccgcccacttctcccaggctgcagggtcagtgtctcaggcagctgtgtcgacctcgcactcagcgcagttctggcagtacactgggacttcgtcacaggcagccggcacgtcgagtcagggtccaccactggaccatgctgggacctcgtcggactgcttgttgccttccaccttcctcttcgacatcactgacttcgacttcgcttcaggctcgacagaggacgtcatcggcccctcacagctgggaggcgcaccgccggtgcagacgcaggaccaggcgtaggccactccttcgcgggacactcgtgttacccgtgctgtgccaccggatcatttcacctactcccaggaccacgtgcgagcacaggcccggaggatcaagcatggttgcggcgcgtggcagggccagtagagcagtcttctctttgtttacttgcttcactttccagtactgtatgcttgtgtaatgactacgttgttgttatatgtgcacgatacctttcggcgcatgcacgatacctttcggcgcatgcacgactactttctgccgcaccgatgcagcctcctttattcgcgtgtgatacgagtatttgcccgccatttggcgcatacgaccaatgtaactttcggcgccgatcatgcatgtatctttcggcgccaatcaggcgtacccaccataccccaccacgttcacatgtcaggggtatcactcgattttttgcgcctatataagtcgccttaacgagtgaggcctcacaatctttcagaactcagtcacattcagtactctcttccccacttgcttcattacaaatccgaccgactttcgtcaatggctagacgccgaggtgttgaggatccaaactggtgtagcgatccttgtgtatacctactaccaccttggtgccagcgtcctctctgcctatgcggtgatcgatgccaactaatggcttcgaggaatcctgatattcgaggaaggcgcttttttaggtgccctaactatgaccgtgaggtattttattatctgcatatgcttattcattccgtatgggcaatcgctttattcttcgtaacactactctattcgacagacccgcactacggcttgcgcatacatcgagtgggtcgatacagaaaatcccgttctcgacttaaccacttgtttacaagaaggtcgctggtatttcgcatccgaaagtactgagcaatacttacagagaaaagcggcttatgaacgacaatgtcgtgaacaacagagcgactggcgggtgctaactacggcactccctccatgggaagcccgtccaagatgcaggtgtggtgatcattgtcaggttcttcgttccataaatcctacaacattgggtcgaaggttctttgtttgtccaaatattcttgacgacgattttatggtaagaatattttgattacatgaatccttattttctcacaacatttactaactttgcttgctttacatctattctttcctcctaggaaccaccaaggagatgtcaatatagagaatggatagacaccagaagggttctaactccacctagccgtgttatgcagcttgaactaccagagcaatacagggttactaaagcgcggtttgagagaggagagggatcctcacgtaggggttagctattatcggacaacttggcatattgaaatttctactgtcatgcttccttgtcccattactacatcgtcgttgtgttcaactattgcactacctctctcctagttcgaatctaatatcatctatgtaaccgcaatgcaaatagttgtatcatgttcaaattgtactactatttcttcatgttacataattctccttgtttaagtccatataatgtttctacgacccagactgcgataggcctatataaattatccgagtactaatacgtcgaataaggtacaaaataatacctcacttaacatatgaaattgcgcaacaaccaacttcaatacatttttataacaatattaacaagttttaccaataaatacttctttatttattattaacataacatagaaaaatcttttggccgtacttttttcatctgggtcccttgccgctctctattggggcagcaagggacccggatgaaaaagtacggccgcaagctctttatgggcggccaaaattgcaattagccccttgccgccctctgtacgggcggcaagggcctaatcgcaattttggccgatggcggcagatggcgcggtcgatccaccgtctgccacgtcagcttaccgcccaccattagggcggcaggggctatttctgtaatttttttggtcgatagattatttctgtaaatattaaaaaaaaaatctaaaaacgaaaaaaattcgaaaagttgttatctgtgcaaacaaaagccacaacccagaaacgttttgtcatctccatttggtttcttcaaccagaaatttgtggtctttctttgattgtcagatcagaaaaaaagagatcaaatccaggctggaagaaaagaagagatcgaccaaaagagaggagccaaaatagatggagaaagaagaaaaaactcataaaaatcatcgaatatattcagagagaaaaaatggcttcatctctgatctagatgccctgcaagcctgcctgttgcatggctgctgcaatgcactgctatgcatgattaccaaagccaccaaatagaaatctaaaaacaatggtggtgtttgaatcggctgaagatgaagattactccctccgtcctataatattacaacctaggactggatgggatgtttcatagtacaatgaatctggacatgcatctatccagattcgttgtattatgaaacgttccatccagtcctaggttttaatattatgggacggagggagtaagtgtttcacgcaaaacgaggtggtaataatatgtgattaattgagttttaattattacaaacttgcaaaatggagtaatatgatattttagaacaactttcatatataaagttttcgcacgaaacacaccgtttagccctgcttgcagtggaatcgaatgcagccaatgtgtaacttctgcatagggatgcagtactgaaaaatatggcaagcaatatgacaagcaaatatcagcattaagaacgatttctagtggttaggctatgacataaataagtgataaactgattaatatgtaccaaaattataaaaatagaaatcaggcttatttaggaaatgtcgacaaaagcgatacaaaatgttactcctatctactttgagatgaccaaatattttataaaattctatctacatgaccaagtagatagactaggaacactcacttttattttctgaagtaaacttcgaagtaatctcccactgccccgcacgctgcaagcgcttcgcccaatcgcacgcctctatgtccaaggcttatttgcctaatcgtgggtcctcaggtaggcttctgagcattatatccttgcttatctcttcttccgctccacctccgccgccgcagggcttgccatcagttgttgctgcgctgctttatcggcacgaattcttgtatttgctatgttttctggtcaaacacctaaaaattgggcaacttagaaattagtaacaaaatatgttagctttagtaaaatatggaacacaatagaaagatgtagctaaaatttaataactgaaaaagacaaaacaaataatatgattttatagttgctatcatttagatagaacaccagcttgattaatatgtgggaagattttaaaatccgacaaagacaaataagacaaacaccaacaaaatacaaaaccggtagatgatagggctatgacctagataatatgatttcatagttgttattaagatagcgcattaggttgattaatatgtaggaaaattataaaagttgcaaagacaaagacaaaatacaaacacaatacgacaaaagtttaaattgtgagatgctgacaaaacaaaaaatgataaaaaaattttaaaatacgttcgccgccattaaacgcatcatggtcgcgtgccgcgtcgacgcgattacaaaactggaatgggcttaagcccttcatatgaaattaatatagttttctcggtagaatgccaggaacaaagaagcccactaattaaaagcacttgggcgttggacctttttcagtgactttaaaaaagctcactctatcaaacgattaaaaaaacaataaatggatttaatcacaggagcaaaaatcatacatgatacaggagcaaaaatcgtaaagcagaaaaacttcatccatggccttgccgtatccatgaccataagtttcaaatccctcagacatcatctaatactttatctcatgaatgttatgcttgccatgtatagttctacaagctatcgtataaaacagtgagaatttttaattacagaagaagagtacaacatcaacccagtagggtaggtttcagtgatctcacctcagcggttatgcaaatacttgacatcagaccagcaaaatttcatccaaggccttgcctcaaccctcccaaaaatcttagcttctgaggaagcattcaacacattattaagcagtggcaaaaatatatcatcctagagcaaacatcaagttgttagcttcaaaatgaaatatgtctgagaaaacatcactgtcagaaaaccccaaacccagctagataaacataaagatccttgatccaacttaggcaagcataaatggtgcacgcaaacacctatgtcaaagcatctatcacatggaggaacaacactagctatgtgctatattcaacatgcttataaaataaaaagtaggaaattaattcctatggctggccatttatgtactacagaaactatgctcatttcatctaaagtatattgtgcaaaagaatagcctaacagccagataaaccaatagatttgtagtagacagtgaacatctgaattggaagaaatcaggatttctgaaattcaagaacacacacaatttttatagcagaagatggatcagcaccaagtttatagcagcacctttattgtaacagtgaactagtgtgtcgcatacatgatcagttccatgtaacaagaacttgccaagttagtgtactgcataccagaacttgacaaaataaaataaaaattttaaaatctgacaaaaacaaaaaacaaaaaaaaatacaaatatgaaaaaatgacttattttgaaacaaaacaaagggacaaaactacaaatgggacacacaaaaggtatttctttgtaaaaaaattttaaaaaagcccacaacgttttttccattatgtttgtttctgtccgattgttatatttttgctacatattaattaggttgatgcgctaccgatagtaactataaaatcatattatttactccgtttcaggttataagacgttttgactttggtcaaagtcaaactgctttaagtttgactaagtttgtagaaaaaggcaaaaacattttcaacccaagacaaatttattgtgaaaatatattcaattattgatttgattaaactaatttagtattataaatattattatatttatctataaacttgaaacattttgattttgaccaaattcaaaacgtattataacttgaaacggagggagtagatcgtagcctatcttctgttggttttgtattttgtcgtagcctaatttcacaacactgaaaattattagttcaattgaacggcaagtttaatggtggtagctatggctaaggagttcacacatatccttaatgaagagataatttttgtgcatggcataagaaaataaggattgtcactggcagtctatgaatgtatacaaagtgatttgagggtctatagagaagaaagacttgctgtgtaataactatttcatcaaatagaaattctagctcaaagttacgtaacatgttcgtcttatatacagacatcaggaggagagtgtctcaaacaagaacatgcatagaatatatgattagagcatacctaatcttaaaaaaagatatgcacagaacatcctcacacatatcctgtgattaaatctatttattctttttataaccgtttgatagagtgagcttttttttaagtcactgaagaaggtccaatgcccaagcttttaggctgtgttatttcccatgggttaataaaagctgtgttctttcccatgggttaatccatttttcaagtttttataactaataattaattaatcacatgttagtctgtcgctttgttttccatgcagaggggaggggttcccaacccctccaaaagaacactgccttagtgggcttctttatttctggcattctacgaagaaaagtatatttgatatgaagtgcttaagcccattccagttttttaatcttttgttgttgctgtttttttctggacgtgtctttcttggagataggtaaggctaatttttttctcatatatattgatatgatatctgtactgggaactaaaacatatttttttatatagattacacgacagacgcacatgcacacataccactacacacgcaacaccacactcacacccctacgaatacgtcacttaacacatgctttaagagacgaaaaccagtggcacatccctggtttcactaaaatcctgttgaaagtccacctgtatgtgcataatatttgtgggcattgctccatatacagtcaaagtggaaaggtagggataatgagtgagcactgcatttgctaagctctacattgagataaatgacataagtaatttgtatcagggatgttggttcgttttatatcattgggttgaaaaatgaaagtggagcccatgcttttcaaaaaatatcagcaccctcccacctagaggagctgatacaacattatcagtacgtaagcaagaccctatttagttggcgagacgaaaagttttggcgtgttacatcggatatatgtacacacatttaaaagattaaacatagtctaataacaaaataaattacagattccgcctgtaaactgcgagacaaatttattaagcttaattaatctgtcattagcaaatatttactgtagcaccatattgtcaaatcatggcgcaattaggcttaaaagatttgtctcgcaattacatgcaatctatgtaattagtttttttctatatttaatacttcacacatgtgtcaaacattcgatgtgacagagtgaaaaatttttgtttgggaactaaacatggcccaagttaaagacatgaatttcacccgacattgaatttcactgatcactgctttctgttcccgacatggcctactttatcaatcacaagcagccacccttattgcgagtaaagaatagtagtgactgttttgttttacaaaatcaaggtgtcaaattggcattatcaatgaatggtacctgacctaatgttttttcctgggtttcggatctgtgatgtgaagaaagctggatgtgtagctccggaattcaggtattgctttttgttcaggggtgtaggaatgtttagaaaacaaaaatctaaatgcactcgcacatacttcatacaggagttgataattgattagctaagcaaatcatgtggggattctgaagcacagattgaaaaagagcacacaaaaagttcatttggaggttctgaagcacagattaaatctataacatgcggggatgaagcaatcaagaggatgaggatggaagaacccaagttgggcttcaaatttttttttgaatttgttttttgtggataggtgaggccgtgagggccattttaagcccgtttgtttgtttgttgggcatcaaatatgtatgatatttaagcccgtttgttttttgggcttatctaatagacaaaacgaaaaagggcttcatgctttgatctgacaaaacaaactgcagagaaacgctatgctacgtgcagcgcgcgcgatgcaaacacgtgttgaatccgacgtttaggaattcggctgtaatcacaaatattttcagccgtgtgccacatagacagtccattaaatatccttttggtcatgaattaattcgatggacgttctcactcgtcgccgcaagtccagtggcccactggatgcttccatctcctccttgataatatggctctcttcgtccacaagcgaagaccgtcggtggatcaggcaccacatgcttggataggcaaaccatggccaatccttccacatccttgcatccacgaagcattgccttccaaccatccaatagtgacctcacccttggttatataatgacgaatctgtgcagagagagcctcagtactcaagccggaggcagcacactgcaacttaagtttttctatagctcctagcaagctagcaatggctccctcggtgatggcttcgtcggccacctccgtggctcccttccaggggctcaagtccactgcgggcctcccggtgaaccgccgctccagcagctcgagctttggcaacgtcagcaatggcggaaggatcagatgcatgcaggtatcagaaacgatacgtttcaatttctccttcaaagtgctcgttgttcatatatattaaatgttggcccgattctattatctgcatcaattcattcaatcaggtgtggccgattgagggcattaagaagttcgagactctgtcgtacttgccgccattgacagtggaggaccttttgaagcagatcgagtacctgctccgatctaagtgggtgccttgcttggagttcagcaaggtcggattcgtctaccgtgagaatcacagatcacccggatactatgacggtaggtactggaccatgtggaaactgcccatgtttggatgcaccgatgccacccaagtgctcaaggagctcgaggaggcaaagaaggcataccctgatgccttcgttcgcatcattggctttgacaacgttaggcaggtgcagttaatcagcttcatcgcgtataagccaccgggttgcgaggagtcaggcggcaactaagcgctttcgttccttcgtgcatgttctttctttttcttttttttttgtgtgtccgtgttaagctgcacgtaattgttctctcgcgctccgacctgccgttgttgcaagagtactactacaactatcggtctatcgttcggtgacggtgagacagggcacgtgaatgcaagatctccggctatacacacgtactcatgtaatatgatgcctagagcatatctgaatccgtcgacaatgaaattttggttttgcaaaatgctggtatttgtttatcatcctggcacgtgatatttgcctagagcatctaaatcacttttacgaaatgtgcgcgtcaacaaactgatacggcccaaatgccagaaattaccagcatatatagccatatcaacttttgattcgtatatatgaaggttgatttagttagagaaattcggttgtgagagaaggaggctagcaaagattcggttgatcaagctgtaccgccaggccaggacgtgctgtgcgcgcggctgtgccgcttgaccgcagaaccatacggaattgacggaccaattgtgcatacggacttagctaaaataattgttgatttttggcaataagaaaagcgagtagcacataaaatctaaagtggatgagtaaagggacaaaattttatacatgttcaggccttctcgatgagaagtaatactatactcctgttttggggattatatttgtcagatgttgtatcaatctgacgatcgagttatggttattgttggcggctgttaaatatcgattttatgccatcaatacctgtataatttatacagaaataataaaacattcaacatagtggtaggctttaattctaacatattccataagtgttggtgtatatttggatgcaggtaataaaccaccgaattaggaggaaatctagactaagttgaaggaaattttcatccatacaagtgttgggctttttaactccattttaacaccaaaatgcaagcccaaaaacctgcgaaatggataaggcagactgagaaggaggcccaggccaaaacttgggccagttgggccaagccaggtttcggccaaatcctgatcatcgctgttgatctcagggtttggcatggacgctcttgatttactcctgatggcagttgcagggcatttccgatcattcgcatgctctacaaccatcatacctacttatttaaggagctctcatcctcacttcatatcacacactccaatcttgagctgaattataagaggctctattgtattttattgtatactagaattagggaaagattaaggtcgtagaagaaatcggaggaattccggagttatcggtgatccttttctatttcttatactttgttatttgctttaatagaaatatcatttcaagtaattaagatttgtttagtgagaactattattggctagttcctaattagcgtatgagatcactgttcactataatccgttaaaatatagtgattgctttagtgagttacaaacactacagtagttattgattgcttaaacgtggtgtttagatagttaatttctagtggttgctgcgtatcccatagtacgttagaggcgggtgtagaggtggtgaccgccctcaagagcacttaattcctccttgtttgtgtacgtggtagagcgacatctgggaacagtgggttaccagtgcctgaagtaccatgttaggattaaaattgtaacattgtttctcattagtaaatcttctctaccctctacccacatttgctttgtatccttggtgaacctgaagaggaactgaacacacacgttccatgaggaaatcaataccttggaatactcctaggtgaagtgctacatcggcatcttccgtgtactaggggattttacagtaacattaagaaataccaacaaacatttttggcgtccttgccagcgaacggttgttgtttatctccgaaccatgttcatcctcatacccttttttatttttctttcttctacctttacccctactaccctagagaagtattctcgtaaaactcttcttgaccatggagcaacccatctttgaattatcagtgttggtatttcttacgatcacagatagaatccgcaagcgcacggatataccgatgtagcgcttcccctacggagtattccaagggtaccaaatccaagagaacatgtataattatctcttcctcccgttcatccaaggacacaagataaatatgggtagagggtagagaggatttcttagtgagaaacagtgtctaaggaaagcttaagtttaatcctaacacaatacttcaggcacttgtaacccgctgttcccatatattgctctactatgtacccggacaggcaggacttaagtgctcttaagggctgtcaccacctctacacccacctctaacgtactgtgggatacgcagcaaccactggcaattaattacccagacaccgcgtctacgcaattaattactactctagcactagccaagcactaaagcaaacactatataattaatggactatagtgaacaatgatcccgtatgctaattaggaactaaccaagaataattctcactaagcaaatcttaattacttagaatgatatttctattgaagcagagtaattaccaaagtacaagaataaagagagcattaccgataactccgggattcctccgacttcttctacttcactctctccctattctaagtatactatagaacatgtaaagaagctaaagcatatttagagcctcttgtaattgagctctacatcttggtgtgtgtcaaatgagggagaggagaggggtatttatagtgtggagcttgcttgggagtgtggagatcctccatggcatccaatgagcatattcactctcctcatgccaagtgtccatttggatgacggttggagcgccggaaacggtcataaccatcattgggaagcagttatctaccaaactggacttgggccggggcgaacggcctctaccagggttcggccgaactcaggggttcggctgaacccgggacgactccgttcgctccggttttcgtcctggacattcattttgggcccctcatttcattggtatgaatgtttggcccatttggaggtgtttaattgggtttatgggtccaaaactccttaagttcggatacgagtttgattctcatcctccttcatgtatatttcctctcaaccttggtagtttgtcacctgtatatgaatatataccaacactcgtggaaattgttagaaataaaccctaacactatgttggatgttttgtagttatggttttatgcaggtattgacggcgttaatttggtactaaacagccgtcaacaatcagcccctaggggcgaattctacgagccacctccttcataagagccaatttttacaactggctacgaaattcgccccaaattaataagtatggttagggaaaaacctttctttggtcttgaccaagaaaactcctaccatcatctgcgggaatttgagcagctttgctcatgcc

SEQ ID NO: 5728 - DNA, 46315 bp, Oryza sativa
  unsure (1)..(46315): unsure at all n locations
cttaatatatttatcatcaaaccgagcatataccatatacgtaccaaactttgctagtagtaccaaaattaccaaacgggtcctatatatgtttctgatggacgggagcgtatcctatacacacaggccctcgcgtgtacacaccgtgtataccaactaaaaattatcacaaaaaattctagaaaaattcatacatgtactttcaatagtattacatttacgtgcaaagtcgcatcttcaaattcattctacatagagaataacaaaaaagataaaattctgacaaaattgcaaccttaaagctgtcagattttttgttttttttgttacggctaaaatataatgaatttgatgttaagattttaaccctaggtgtaatacaattgaaagtatgtgtatgattttttctagattttttggtgatattttttagttggtgtgcacatgtgtacacgtgagggcctgtgtgcataggatatattgccctgatggacaccacataataggtttcagaatagtcggctaatcgatccaagtggtgactggtgatgagcggtgacaaattaagcgaaatgtgacatcaacatatactcccttcgtctcacaaagaacacatttttaggtttctgtgtttaacgtttgatcatctgtcttatttgaaaattttataaaaaaattattaaaaaatagtcacatataaagtattattcatgttttatcatctaataacaatataaatactaatcataaaaagaatttagataaaacgaagagtcaaaaactaaaatatataatatttatgggacggagggagtaactgtcattatcttgttggaacatgcaggtgttgcttcccagttctagaccaactatatatgattggtggttgagttgactgttttctaccttcacttccagtgtttgatactccaccaactaaggtaggtcccgtttagaacacgagatattatccatcagtcttgaagtgattgaagttcaatcattcaactgtttactttgaagcagcatgtaaattaagatggcttagcaaatgggtagtgcaccttatcttaatatagtttacggcgatgatttatcattttgggaattttatgtcacttgtcgagatgcgataaaaccaccttggccttgcatattgtctttcatttttacagagatgatttatatgtaaaaaaaatagtaatacaaaaaacaacaaatagtaaactaaggcttcatagaactaagaacaaacaaaaggcttgaataggctccaagagtgtaatttaaaaatcatcagttgatggtcgagttgacaagaataataatctatatgtctatcaaaactttggaaatggcatggatcaattattcagattgtaaggtagatagatatatattgaagaaaaaataatatatagacaaaattagataaataagtaattgtaataaaaacagagtaagtgggcatatagaagctatgtggtagctagagtatatttgaataaataatggcacattttccccattaaattatatatatcaaccacatatttcgccttccttaataggggtaaagaatgccaagccattaccggtagggatatcaggtcatttaggatgacatgaggagagtgacattgagtagagagagtgggaaaagagcgagaggtgtgatgtattcatctacaaaacactgtaaggactgcataaagaatcaagccattaattatacaaatctacctgcgtaatatataaaattaacatggaaattatattatccaaatatgatatgaaaaacatatgtatgagttgttatgcgtattacctaaatatgaatggagaacatgttttgtttttgaatggaaaacatgttgtatgagttatttacatatagatataatgtaaaagatttacaagtggcagtacaaaatgtttttatgcatgatgaaatcatattattttgctaaatttctttggaaaaccgctattgtttttgcttgcaaccaccaagtagtttctctcagatgtttggtagttagtttgttggtatcaattaaaaaaacaaaaaaaatacatatcttaatagggacatatgttttattttaggctctatggtttaagtaattaagaatggtgtggttttggataaaattctaactaaatcttatatgcgtacttttcaagacaacacatttgttttggctccgagcccaactacaaggatatgatgagaacaaatacttcattcatgttgcatgtcagaatttagagacaacaattatgcaaatattcgttaacttcggatggcgatttaccaatagaattgttgtctaaataagttgtatctactcactattgttgatggttcatcactaaaccattgatcacgccatacaacttcgaaggcaaatgatagacctgtgtgctcatcatcagctgaacacttcctttcatggtttctcttttcctttcggcttattcggctgcctattttggacgcctttaggctctagctagtgtgctccatggtcaaccaacttgcagtgccttttggcctgacctcgtgatcatgaaattcatgattctccaatcatgtcactgggtgcaattagctagaaccatggcatttctatagacttttaccctacctacctagctaccacccccactaattcgatcgtgacatatattcagttactcgtacactgcctagattaagcagagatccatgcatgaacaaattaaagattgttgcatctcaatgtgcttcccagctttgccatgatttgcagtttaagatgtggacacctgacttgactcgatatcaatctggtaatcggatatgtgcatcacttcatgcatgcacaaaattcggctcatttgtttcgatgaaaattggctttcggcgcaccttgattaattccaaagcaatttaagtaaataatcattacaaaggaatatcatcatactagtacccaataggacaaattaacctttttcttttgcagcaccagaagggaatgaatgagtgaaggatcatgaaattattgtcttttcggcctttttgggctagaacatgtaaggaaaagagagtaaagtgtgactcacataaagaccagtaatgatgatgaatctctaacaattaaaaataagatttattataggtcatgaaaattgtacaaagataacagcaggaatatggaactattgcccaacttttttcttctggaataaggatagttcatgccgtcacgcatcaagtgtgcaaaacatctgcacgtattatcaaattccattctttttcaacaaacggaaaaaaagttaatggccatggaattcggattacccgagaaatatatgtggctgatagagcgtgaacataaacagtctttcaatttctagatgaatttctttcataagtgtcaattcagccgagtataaccaaagtcttgattacaccgtttaaccaatgttaatttgacaaagagagatttgagatagtttcactacaatttacaaattcaagtattgtacataaatgtccacaaaataaacaaaagtgtctcacaatgcttactaaggcaacaaagcaaaacaaataggaattattactataaaaaaatgatcaagaaacatgtaaaaacaagacgttttgctaggggaggaaaatgggatagacatgttacatatggctgttgtatctagctccatggatcgtcccaacctttgggcccctctctcttaacaaaatctacaatggcccgaactgcttcttgcaccctattggagagagcatggtttccccattctatttcaactttctccgcgttgcccaatgcgcgacataatctgcagtgaaacatatatagagcattagagcatgatgatatcatatcaaaattgtatctggtatgtttggatttctaatttcacctgtccacaagtgcctccttatcaacgtattccgggacatattcatcccccattgagaaaataacctgcagccaaagcacttgcaagatataaaattcagcagctacagcataatgtcatcgtagcttacctcatttggcaacctttaactctacgaacaaaaagtcttttttttgtagaatgcattatacagtatgccaaagagaagcttctgggatgtttgttatgctcaaatttcgctaatttccttaaggttattgattttcacattctaatgcagattttaaatgtacttcttttcctgatttctattccattagcttgcttaatgtggtcaaaaagcaaatagaaccaaaacagcccactgggaaaattaccccatttacaatctatgcatgtataaattacgaaagcccaatgctcaaagttaggttcaggacccccatcaatatatatgagttcttcggttctttctgtttttgtatcttcacacctttcaattacttaacatgcaagtcaagtactaaacgtaatcaagcctagttttattacattatagcattgaggaaaccaagtctaatatatctatgcatatatggccaccaatgcaaatgcaagcattcaacctacaagctgtaaacagattcaaggaacaacataatttaactacttggtgaattaggcattaagaaaatatcaaatatctgatagtgaaacggttatttttcttagatcgatcagcttgaaattgttgctttaagtagatacagaaacaaaggaccataaaaggataaccatcactaatccctgtattcatagtcatcagaacagaatgataatgaaaatgtgaacgcaatatttaccaccaattctgggctctggctatgaccaaaaaaagtggtgtttccatgtgtgttgacaaagtcacaagtagaaagggacaatacctggcactgtgttgttgacatatgaccaagtctctgcctcaactgatcttcactaagatctgagctgaacatgtcatcatcacccatatatgcacaaagggagtgatacctacacattatttctatggcattagagtacaactgaagaaaaaatgatgtttgattcgttgcagataattttttaagatcacactgactaacaaaggatactaggagatatgctggtaaatagatctaataaaataaaagatatggaacaaaaagaagtaataggatattggatcatttgaaacaatacagaaaggttaactttgcatcatttgaaaagaaaaaaggactaagaccccactaagagttggtcatgagaaacataagtgggagacaaaaacatcaggtttgttacatagtgtttcattcttatcatgtttgttctattcatgtggttcaattttcatcatccatgattttaacttgtatttgcgagtttctttgctcaacataacatagataactctcccatgctacatggtccacagagtctacgagcaagaaattttgtatcattggtcatcatagccgaaggaggcgcaacaagttgtgtcttaggtcatcatcatcacaatctagagaactataagggattctacaaaattctcaagtcccaactaaagtttttcagaacataggttaaacatccaatagcaataacagcttgtgactcctcatctaactctttacgtagtggttgaagaatacatgatcataaatcaaaatactgaatcccattaactatcatttttcagtaatcatagtatgagcggttattgaaatttttgttgctaacagaggtgtagatcttgcgacatctttattaatcccagaggaagacatcactgacacaaaagtatatctgagcatctcaggcatggaaattgatacctgtaggcagtaatcggagcatctggatttgcttccctgggcatcaaatccattccacggccctcacttaacatttttgctgccaaatctatcatttctgcagtttctggaagtgttgctctatactccctgtcacttactggggcctgaatatcatagaagttgaatcaagataccgtttacatggatttacacataaaaaagcaattattctcaacaggttacaaattcatcagtttggtctgttatttagggaggaagtccctaacttcctatcatagttcacattcaaatattttcacttcaccccttcgcatccaaacaagaagatagggacagggagaatacctgcaaaatgaccccagaaactgccttggaacatgcaaaatttgtccgcatgtaatgcacaatatcctggcattgacggaaaaaattgtgttatctttttctatgataaaaatacaatgctgaccataaacttgtctcaagtggtcaagatgtctaaactttagaaatgcatataagagcctctgaatttgtttaaaatggaccactcaaggtcccaaacatgccaaaaggagcacagtacctgacctgacaaaccggactaagttcaatgtggatgttttgcccacatgagtcttccatgaaaagtgaatttgagatgaaaatgtacacataaacccctaatatggaatccatgggcattatgtgtgccccactgaaaataatgaaagtgctcttggctaatgagaatatgagacccagacttctaggattctcgagcaaagttcacaaattgtgtgttttctgaatttcagaatgcattggaaattggatagctaaacagcaaaaaggctggttgtttagagcgggaagacagacagagatagttgagtaaatcaaaatgggagctggtcaaccaaaagtgagataaggggaggatagaaagagggcttatgataagtgattcattcccttcttcacatgctttaatttctactatgaattaatactaaactccctttgtccaatctgaacatgataagcttgaaactcagctacaattcagcgcacggagaaggaaattatgataggcaagtgaaaaggggaagcagaatggactaggacaggtttggggcaaggtggaattggaagggatttgcatgcaattggactagtatggggattaatatcaatacaagtgcttatgtacctacagttttaacaatactggatgaatttgctttcgtatatgtccatggcatggctggtaagttcctacagtagtcagtaacactagacatggtcaccactcagcacatcaaatcagaaattatattaagtgtggcacatctgtaatctaaagtgaaacacaggtgccaagtccagtatgcaattctcaagtttagggatccacttgaccactggggtaagtttataaacctatgaagcattactatttagactataaatagtaccaacatatcagtgagcatacctggcaaccagtactgtgaccaagcaatattactccatcagaattttctttgtttatcaagtaactgatgagttgatctagttccaatgcatcctttgacaagaaaacatatattcaatacttgattccaaaaaagtagggttaaaatgtaaagcacccaaaaaaacgaataaaatggacaatccaatcaaacgtcctgcagtagaataagaaaaacacagaagggaaaaaagaagtttaccaccaaactagcagatagctcaagcaaccacattctgcatacagtactttcggatggcaagtataaattaagatctcatgactactttggtggtcattggaaaatacaaatgagattctagaactagcttcctgggtatgagtgaatgtgtagtcaaatcatgtaagtaagtcgatcaaagtgcggaatgacaagattgaaaaactgaacatattatgtaaaaaagaatatgaaaattaacttgagaacattaaaatcattcttaagtacctcaattcttctttcagcatgccactaagaccatgaacacctcaatgtatgcaaatgcggttcttaaactctaaggatgaaaaggtccatgttacagatcatacctgctctaagctggaaattccatacccagtgtatgatgaagaaagtaacggctgtaccagtgaccatttctcgacctctagtgcaagtgacaaaggctccaagtagctgtaatgttccaacatggattagaataataaaattagttccagtcttaaccaagagaaaaaaaaatgataacatatgtattatgattatatacttacagaacttattgtgttatttttcctatccttctccaattcatcatttttcagatttttctcatgtttgttactctcaacatataatgaattataacttgaaattttatacatatgccgagtaaataataacaacaactagattatctcatactgatttggtgagagggaagtgattgcatgaatgcatcatgaagtactaaatggtgattatatagtatatatttccatgtttccatgtatgcatcatgctatgcaactcagtacatcagggcagcttccatactgaggagtgacatggctgaagggaaggcactttaggatagggaggagaccacagactaggatgaaagaactttcagggagaaaggcatttcactccatgcttcagaacaactattttatagactaatcaaaacaataacttgactaactaacagtaaagataccaaataacgttgttactgaagcgcttggacagtaccctaattggaaactcatgagaactttcactatcaatagtgtcttctaattcaacaaatgatatggaaaaatatttaatggaactgcatattgccaacttactcggttgctaaaaacccatccgtcaaaccaccgatgaagatcacctggtggttaaaatcaccagttttaaatgcgacctgcaagaagaaatttatagaagaaacaaaacagtaatgacaagccatatctaattagaagttaatatatggatggtgaggctgtgagggtttcctttgtatatgcaaatcatcagaaaatgaagggtgttacagaatgtacacaacataacaaagcatagtgcatagacatctgggcctctgaggtagttaaaacaactaggttaaagaccatgtttggtgcttgaactattctagaagtcctttttcatgctaaactcaataaccagttttttttttcattttttcgccctcgactctcaaaagcaaatcaataacactctagaccatattcacagtgtttttattgacatggtgatggttttcactagtgcagactcctactatacatgtcttgctaatgtggatgccacttaggtccacagttccacaccaacaaagtttagtacctgaaggctatgtcagttgtcatgtcaatcaaaactaccatggaatcagcttttgggtgttatttttctggttttgaaagttgagtgtgagaaatgactgggttttaagttaacggtaaaaaatggaatccaacaagttttgagtgccaaaaatggactttaccttagaattaaaatgataaaacttccaagagatttcaaaattccaaccagattctataatgtgtaaaagggtacatcttaccggcagaataagttatctagaaaccacaatattgcaaccacatcctggcatgatataatgctgatgttctataggcttactaccaactgatcatcttaataaggtcacaaatggcaatgtggcactacgtggtccaaacaaaggaaagaatgcaggtacattgtgacagattatcccattcagagttgagaccctcacttttgtactacaacaaaaggtgtatataaacaaccttgcttgtagcaacaaaggatcataacaaacatagctggcagagatttgtacacttatttcgtcgcaatttcaaagtagaaaacaaatcctctacacgcagcaaaaggaactactatgcaaaagggaccataagcctagatagggtcaaacattgtatattcattcagtaggctttcttccacgcgagaaatgatacagaagcaaggagacaagacgcaaaaggcctagctagccgtgttaacatcagcaaaagaaaactaagagaagaaaattattagcacacaagttgggctcccaaaagtgcaacccctctaaagaaagaatcgcctgcgcttatttccattacaagccctggatcatgagtagaaacacggctatgctacagaagcttccttattccataagcctctatctctctctctctcaacaaccgcacgcacccagcggaaaagggcagaaggacgaatccaacgaggagatccccgcatcgcatctcgaaggctgggcggcacgaacgcggtaaccttctagaagattctagaaccatctcgacctagggaaattcctcctcgtcccccgctcaaatcctacaccatttcaaaccccccacgacgcaatcgcaggatttctacaatgcaaagtaataaaccctcgaatccatcatcccgagcaatcccaaaacgatcccccacagatctcccgccgcaagccgcacgcgcgcgcgccccagagagagagagagagtacctgggcggacttggggccgtacttgaacagcgccccctgcacctgcctcctcttcccgcccgcgccaacgccagcaccagcgccaggccccgcagcaaccacggcggcgaccactcctccacctccacctccacctccacctccaccgcccctcccacccgcgccatcggagaggggagcggccgcggaggcgacgccgccggggggcatggcggaggaggcgcgggcgatgccggagaaccaggagggggaggatgtcatggcgcggccgccggcggcgaggtcaccgccgcgagcgcgagggcatcaccccgcgatggatcgatcgggagggagagagcggcgactcggagagagggatgagctgctgctggtgcgggaaatttcgtcgggtgattttttttctttttttttttttttgggttgacgggatgtgggttgcgagaattttcagggtgacgcgtagccgcatgatttaatctcggcggttggtggccttgctgtcatcctctctttgtttgtttgtttgtttgttggtgttttgacttttgagcggttttttctttctcaaaccctcctctttgaaacaaaacttatgagcctgttttatgattaattaattattagtaaaaaaggaaaaagtatattaatatgactttttaaagtaactattatataattttttaagaaaattgtaccgtttagcagttcgaggggcatgtatgtgaaaaatgatggagttttaatggcatatggttaggtggcagtctcccatttattgaaaaaattattgccacacatattggggaaaatatgtggtggaatatatatatatatatatatatatatatatatatatatatatatatatatatatattggaaacttggaaactaccgttggatcgaaaaatagacatccgtgattcatccatgtcatcatgagtaaaagttttacttgcgataaaatttttacttatgactaaatccgtgagtaaaatttttattcgtgatgacgtgaacaaatctcaaacatctatttttcgatttaacggtagtttccagatttccactacatatatggtttccaccacatattttccccacatgttgaggggatattttgctagttggccatatttggcacttccatcctcgctcgatgagtattatcctcgatacttctaccgtcattatccaacatgtaatacaggttttttaccatcgtactaaaaccaaaagtacctttttaaataatataaaatctataaaatgactaatactacctccattttagaatatatgacgccgttgacttttcgcacaaagtttgatcatttgtctcattaaaaattcagtatgaatatgtaaaactataggttaatattatattttatttgatgataaaacaagtggtaacaaaataaattaaatttatatatttttttaaaataagacgaatggtcaaacatcgtgtaaaaagtcaatgacatcctgcattttgaaatggagggagtatatggttagcccaaaagtacaattttggaatatataatattgactaatacatagtccaaatagaaattacatcagtatttctttttgaaaacagaaattacatcagtatattgtcactatggctgcgtttagatccaggggtgtaaagttttggcgtgtcacatcggatatgctgacacacatttgaagtattaaacgtagactaataacaaaacaaattacataatccgcctgtaaactgtgagacaaatttattaagcctaattaatctgtcattagcaaatgtttactgtagcaccacattgtcagatcatgtagcgattaggcttaaagattcgtctcgcaatttacacgcaatatgtgtaattagttattttttcgtttatattcaatacttcatgcatgtgtccaaacattcgatgtgacaaggtaaaaatttttgccaggggatctaaacagggcctatgtaatcttgatgtagtgtagttaatcacaacgtgcttatgagcgcgtaaacttgaaacttaaaattctatctactatatagacataaggaggaagagatggaaatatttttattaaggttacattgaaattggtattgatctattcccatataatgtcaaacatcaatgatataacctacctagtattgataacataacaagggtgttctacattgacatggatgcaatcaagtctcccttgctactttgtacaatctgattttatattccccaggcatgcacatagaacaaaagtacagtacgatagaagatttaaaaaggatgtgcatcaatcatcttgggtaagtatgatgtagtagtaatggattcatgatctattttaatgccctgttgatattatttttcaggcagaataatacatacaggtagactttcttcaaattaagttgacaatacctcaccgtagatgttgatttgttaaaaaaaatcgttttcttttatagaatattcagatcaaacttgataaataaagagacaggaaacactagaatattcagatcaaacttcagtgattgaagtggcaataacaaattcaactttccatcgacaggttcttgtgcttgtgctgatttgtcacatcatcaaaacatcaactcacacaccatctgtttcacaaaactcatcattcacaccaaacacatataagattaaagcaatcaccttccttctattgttgcaactcatcatgataaagcctacaatatttatcaaatatgaaacaaaaaatacagttccctctttcaaataccatgtaatgtaaaagtaaaactcctatatctatactacgaattttaacaacagtagctcaaaaaggatcattcttttttttttaatctcggcaccacaagccaaaaatcaatatacaacaactaatcaacctatgaacataaacaaaaagaaagaaagattacaacaacaaaagaacttatattattcatccagttggtcattggtgtgtgcaatcgaccacacgcccttgaacatcccagctgactgaagtgagaaatccgacacaactctgaacagctccggcaaattcgtcctgagaaggctgagggacttctccctgaccaccctgcactgcttgacatacatctcctccagctccttcatagaaagctccaacttttccatggcagccttccgttccgccatcggatcggggcgtgcaccgtcagggttcctgtcctcaggaaggatacccgcagtttggtggatgtacttttgtgcccagtcatcgaattgcctcctcttcttcccataatccctcctggtatcctcgatcttcatccggagcttcagttcgtcttcctgatgaaccaggattgtctttacgatctctgcaaacgtgtttatcgccttcttggcagcctcatcggggagctttccgaggatttcatgccaagcatgcagcaccctcttgatgggaggtgtggtctcatgtggctgtgatgaatttggcttcaagttggtgtcgatggggatcacattcagcttgatccaggtgtagagggatcccacatactgcttctggtatgtcatgaacttgtcgaactgagtgtgccactcatgtacaacattccacagctgcacggtccggtcatggtgttgctcgcttgtttcccgcggggcgaccgagatgtccaacgacttgagctccaagatgatcttgagctgtgttttgtgatgaaggtacattgcatcccacatgtgccacattctgccaatgtaagaaaacaaaacaattaagttctcttgagtctatatctattgttcttttttgtttcgttagcaatgttgttattcatagtagaaggagaaatcattgaaaaaggcttaccccttcacaagttcaagaagttttgggtataattgttgatctctgagacggttgatctctgcaactgttgactccattgtttgcagatcaactacatattttgtgtgcaagtgactaacaaccgacttggtcttctcaagtgaggaagaagtgacaccacgctgcttctttttgttgagaacagctagcttttgttgatattccctcctgataacctcaaaatcctggctcagatgtacaaacataacagtttagatcaagaaacaagtgacaatatggtgttgcttcaatcattttcacatcctaggagtctaaaacatggaagcaactgtcctttcaaaggaaaaaacaacatggataggtaatgaaattggattaaaatggctagaaaggtttacagatcagatgattgcatgaacaaaaaattccacaagaacaggaaaataacttaacaggaagaaagaaaatactccagcaaactagtagcagaggtcgtctttatgtgctgaacaaatcatattgcaaaattattgtcgtaagaaagtgctattgaatttagcaatctataagattgtaccaataaatgagtgggtggttgcaaagatttatattttgaactagtggtaaacaaaaaagaaacaccatgtaccttgacttcatggtatagttttttctcccatgcaagcagcttatcaagagtggtagcatgtgtctcccattcgtcatcgtccatttcattcctcacattttccggttgaggtatccctttaaacgagcgattccaagtgattacttgcatcactctggcagaatggtccacaaatcctagcaagaccgaagagggatgccatttaacaacagaaggaactcaaatatgtaattcctatttttttcgaggaatggttctcaaatcctactaagataggatgcaaatggcatttacgttaacaatggaaggaaaccaaattaacctgagagttctcaaaagaagaaaaaaaagaatgctgagtatgaagaaaataatcacagcgagcactaaaaaacaagcaagacagagactgctcaactgaacttgaaagtgaatcatgagaatacaggtcatcaacaatttaaatgtgaaccccaaacaactcattcccctgtaccctgtgacccatatgtgattagatgctctgtccggttcttcgctttacccgctaaatgcggctccactaccataaccattccattggcccattccaataattaaaacaatgcaatcattctgttgttcttgacagtgcagattagtaatctattcaaagtcttaatacaatcgtgtggaacgggttaacttcttccataatcaccaagtcaccattaataaaacgtatctgaacttctctatccaatcttgctaaagcatattccccgaaacaagtgtactgattattttactcattccaatgagtaatctgaaatggtagataagcagcaagtgttctatctatctagtatcacagtgaaaaattgaaaaagattgtaaagaagatattttaattttgctgttggtttgaaagtaatctgaatcgtgaagtgaattcatcgtgttggtttgaaaattgaaattacctcgcgtctcagcgaagttggagtggtagtgcatcctggcggcctcgagcagcttggacacctcgtgcgcgctctgcgacgccttgaggaagtgttcgtccagggcgcggaggatgtcgccgacgcccagcttggccggctgcggctgcggcggcgccaccagcatcaccgccttcgccttccccttcctcgccgccttctgcgtcatcgcccgccgcgtcgtcgccgcctctgccgcggccggcctcttgccctccgccacctctctcgccgccgccgatggctggtgttcgtccggcgcggggggtggtggttctctccgctcggccgacgccgaagacgatggctcggcggcggcggtgtccagagtgggcggcggcatggagtcgaacaaggagctgatgaacccgccgggggtgtccaccttgtggtcattctccggcgggaggggaggcggggagcgggagggaggggggcgctgcgaggggagcggcgggggtggcttcagttcggcgtcgtcgtcacctcgccgtcctcccgcgtcgccgccgtcgccgccctcgtcgtcctcctcctccatgatgggcgcctcgccggacggcttcttcttgatcggctgctgcaggtgcaggtccggcgcgctcatcgacctcgcgagcggcgccgcctcaacgtcgccatgcggaggcagcggcgggggcgggggaggcgggggaagctcgggcggcggcggcggcaggatagccagcacgggcttgccatcggaggacgccgtgacgagcgccgccgccgcggccgaagagtcagccgaccccgaccgcagagccccgccggcgtgggcctcgccctcgccggaggcgtagtcggagagcgcggcgccgacgttcttgagcgcggcggcgtggcccgcgtgcgcgcccgccagcgcgtggcgggcggcgacggcgtcgcgcaggaggtgcttccgctcgcggcaccgcgccacggggccctcgccgtcctcattggactgcgcgcaccccatggggtcgccctcgccggcggctggagtgggggtctctggtcggtggtggtggtgggcgagtgattcgatggaggtgttcgtccgatggatcgaaaggctggcgaatgatccttttgggggaaggggagatggtggtggggggcgggtggttttgtgctttggaataaaggtgggaatgggatgggatcagtggagggccacgtcgttgcgacggtgaagaggaccccggatgtgtcatgtatatgtccacttgtcccacacgtttaccgtgtcagacacacaaatttcatatgaagaaaatttaagttcagttcagttaacctcagttttttttaagtagtatatccatcccataaaaagttcatttttcagtttttaatacaacatttaactcttcgtcttatttaaaacctttcataattaaattttttattattagatgataaaatatgaatagtagtattttatgtgtgacaaatttttttaaataagacagacggttaaacgttagacagagaaactcaaaaataaacttattttgagacagaggtaggactcatctttcttgttttccacgcatacgtttttttcaaactactaaacggtgtgtttttttgcaaaaattttctatacgaaaatagttttaaaaatcatattaatccattttaaaaaatattaataattaattaatcacgtgctaatgagttgctccattttacgtactggagggattagttcccgtcccctaccaaggaaccttaggggtggttggtaagaacaggtataataatagactataagccatctataaacatatttttaggagataagagatgatagagaatagcattggattacagatttgtagctagctgtagcacggactctaaaacgtaatatgtgtatgacatgtgggaccaggtattaatagtgtagtatatgtttatagctaactattgtatgaattagctattaaattgactatagataatttagagctggaaattggctatactattaaatttgctttaacccttctttcctggcaaaaaaaaaaagtagatcattagcacatgattaattaagttaaaaacttgaaaaatagattaatatgatttttaaaataggtttcctatattatttttttaaaaaaacaaatcgtttagcaattcagcctagtcaacctagtcaaaaaaaatattcatctaaaaaatagtttaatatgggactcaaccaagtcaacaaaaaaaattcatctaaaacatactagggtggatggactacgcttgtttatttgtttaagctctttcagacacatggccgaatgcttaaaataatagataagatttctgtacttttattcttaagctgttgtaaagccaatgcttaataaacgaatctgatggagaaaaccttaaattaatttaaaagtaaagtaacataaaaaattggatgtggtttcggtgatataaaaacttcgaggatatagcgaacccatttcctggctccaaccaatgaattgcacctttgattatgtctttcaaagggacttgatcgtaatttaacattttcattagctcctctctaaagcttttctagtatggatccagtcgcttgttcaagcctttcaaatccaatttatggatcttactttatcatgattttataatcatccatatttcaaaaccaacactttgtgtcatgctcgaaagttagtcattctttttcttgctaaggggtgaaagaaccagcgtgataatggtcctgtttgggggtgtttggggagtttataacaattgcacctggtttcagaacctccgagtaatacagattttcattaaagttgtgaaattcgtagcaataggtctatagtgttatgaaacctatcttattatcgacgaattaaattataagtgggaagtttactacagaagaaaacttacgccagaagccagcttacagaggaagccagtttacagcgtaagccggcttacggcacaagccagaaggtccaaggcttacgatgtaagcctccaccctccgcctataaatagggcccataaggtccaaggcgaggacaaccgatcttcggtctcctgcttctcctcttgtagcttgtactcaaatccagaagaaataaagcttccactcgctcatactttttgtgttccacaactctgtgtttggtttgcttgtgtgctgatcagtagaatcgactggtttctcaacacgttatcagcacgagactctaccaagctaaaaaggtaaacatgtgagaaatcagtttctactgatcatcttgctctttatgtgcaaatcattcttctgttatagttgaaataagcagaagaacatggtacctgaagtaccatcccccgatatcctctcagcaatacacgataacatgatggcggctctgccgccgttatcattcaattgctagagttgatacatcctcttagcaacgcccggtaacatgatggcggctctgccgtcgttaccgtccaaaggcttgagatggtacatccccttagcactatttgataacacaatggcggctctgccgccgttatcgtccaaatgctagaggtgatataggtgcctgaagcaccggcatggcaacttaatggacggctctgccgccgttgccgccaaatatcggaggcaaacgaaccttctacacgaccctgaagtgtcgttatggatgtcccttgatttatggacatcatccatatgggcccttgatgccgctaaggtcggctctgtcgccatgaagcgtgggctcatagtggggaagtactatatggtttatcttactttttacagtctgcacaatatgcatgaagtgcccatgtatgctcttcattttgttttacatgcttactttgctgtttgcatgactttcataacatttattttattgttatgaaattgatttccgagcatgattaataatagttaatcaagcaatctgtaatcctgaagattacttaagttaatttgctaggaaagattctatgggaaactgtgtgataatcctaaagattacacacactagtaatcctgaagattacgcatgaccaatttatgtcgaccctgcacatcgtatttacctgtcgtaaatactaaatgatgttgcagaacatgtcggacatagtaaagaaggaattcaccgagcttgccttggatggtagtaactacctcacttgggcattggacgttgagattaaactcaactctatgggtctcgatcatactattgtgttgcccgaagttggcactgtggagtctacgaaggccgagaaagaaaaggcattgcatttcttgcaccaccatctccacccaaacctgaaatctgagtatatgaccgagaaagatccactggtattatggcaatccctgaaggatcgctttgaccagcaagggtcaattgtgctcccacaggcacaacatgactggatcaccctacgcttccaagactacaagtctgtggcggcgtataactctgccctccataggatcatttctcagttgtgtttatgtggcctgaagatcacttacactgagatgatcgagaaaaccttatctacctttcatcccaacaacatagtgctgcaacagcaatataggaactcaaagtacccgaagtactatgatcttatctgagtcctgttagttgcagaaaggcagaatgaggttcttctaaagaatcattctgctagacccactgggtctatggcagtgcctgaagcacatgccaatgttgttggaaactcgcgtggccgtaaaagaggccatggtgagaagaaagggaaaggtaagtgaagtatcatattcatgggcaagagcaagggtaaacccagaggtaaaggcgaactcaagaaggttacaggtgaatcatctggggtaaagcaggataactgctatagatgtggaggcagagggcattggtcccgtaattgccgtgtccccaagcacctggttgagctctaccaacaaagcatgaatgagaaaaagagccaacatgagtcccacttcaccattgagcctgaagctcaaattgaaagcatgatgacatgcttatcaatgttaaggatggtggggacgttcgtatggacgatgattgggacaaccttcttgaaaaaagatgatgacatattcggagacgtgaagtaatctcctatatgtcagtcatatgcagtgttccgcatgactagcacatgtagaactttggtcatgaataatgctcctgaagagcacgcttagtctttaactgggcctaaagtccttgtaatgtttcccttaatagaatcaacttactccatgtttaatttcatttatgtttatgttccataaacagacttgggtgggaatcccatggcagaagaggatatatgtctagtagacagtgccaccactaacacaatcttaagggaaactagatatttccacaccttaaataagaaaactggaaatattatgaccattgccagaagcaatgctcatatagtaggcaccggaagtgctactctagttctccctatgggtacccatatctttgtaaaggatgctctattgtatcctgattcaaagcgtaccctcttaagctttaaagatatccgtgcaaacggtttccatatagaaaccgagattgagcaagatgctgaatatctgctcataacaaaaatagatggatatcaaaagcaagtggtggaaaggctcccttcatcgccattgggtttgtactacacgtacataaaacccactgaggaatatgtcgcgatgaagaccatatttagaaacccagagtcatttagagttcagcatgacagactgggtcatcctgggttgggtatgatgaggaggatcatcaacaattatgctggccacaatgttgaaactaaagacttccctaaccctgaagattttagttgccctgcttgtgcaaaagggaagttgatcactaggccatccctcctgaagattagggatgagtcacctgttttcctggcaaggatacaaggtgacatatgtggacctatccagcccctgtcgggcccgtttaggtatttcatggtactgattgatgcttctaccaggtggagccatgtggacctgttgtccacaaggagccatgctttttcaaagctaattgcccaaatcatcaggctaaaagctagcttccctgatagccgcgtacaatccatttgaatggataatgcttatgagttcaggtcaaaggcttttgatgattattgtttagccatgggcattaaggtagaatattcaggaccacatgtccacactcaaaatggcctagctgagtccttgatcaagaggatcaagttgattgcacggccactgttgcaggattgtaggctgccaaccagttgttggggccatgttgtgttgcatgcagcaacactaatccaactcaggccaactgcatatcatagtacatccccccttcagctagtgcgtggaaaagaaccaagtatttcccatctgcgtaatcccaccaccacagcgtacttctatgggacccaaccggaagttggggatatacgttggttatgagactttgtccataatcaagtatcttgagtctatgactatggatcttcatacggctcggtacgctgattgtatctttgatgaggactattttcccagcatttgggggagaaaggcatccagaagaatgccgagatataatatggaatgcaactggtatgcagtccttagatccacgcgctagtgaagctgaactggaagttcagagaatcataaatttgcaaaatattgcaaataagttgccagatgccatcactgattacaagggagtgacaaggtcgcatatacctgtagtaaatgcaccggaaagagtagaggtaacccagaaggttactgactctgctcttaccccccatcctaggaagagggggagacctccgggtgctcgggacaaggttccgcggagacaaggacctgagccacttgttccactcaaagaatcggttgaagaagctcaacctgaagttgagaaagccccagaagaggcaactcaacctgaagttgagatggtcccagaaggacaccatcctgaagatggagaacccagtgccttacgcgcgcaccttggcactggaagatcggaacactccaactcggtcgttatgggaaatcacgatgagctggaggaaataaatgaggagatttccactaactatgctgatacaggagagtaacatcatagaaagaccactattgtcgacattcactttacctcaaagattgctgtcataatggatttggatccagaaccaaagtccatggctgagtgccagaagcgctcagattgggacaaatggagagcagcaatagaggcagagttgcgctcgctttataaaagagaggtttttgggcctgcagtcccaacacctccaagggtcatccctgtaggatgcaaatgggtcttcctccggaagaggaatggctaggtggtgaggtataaagcgaggctagtggcacaagggttcacgcagaaacccagtattgactatgatgaaacttactctcttgtaatgagtggaatcacgttccgatacttgatctcaatggcaactaatatgaacttggatatgcagttgatggatgtagtgaccgcatacttgtatgggtcactagattcggaaatttatatgagggtccttgaaggactcaagattctgaatctgaaaggaaatcgcaacatgtatagtgttcgcctgcagcgatcattatacggattgaaacaatccggaaggatgtggttcaatcggttaagtaactatctcctgaagagaggttacttaaacaacgatgattgtccctgtgtgtttataaaatccctgaatggattttgtatcatcttggtctatgtcgatgatcttaatatcattggcaccacagaggacattaaagaagcaatggcttatcttaagaccgagtttgagatgaaggacttcgggaaaaccaagttcttcttgggcctgcagctcgagcacctccctgaaggagtgttcatgcaccagtctacctataccaagagggtccttggtaagttcaatatggataaatgtcatccattgaaaacccccatggtggtccgatccctggaagcggataaagacccatttaaacccaagaaagatgatgaggaaatgttgggacctgaagttccctacttaagcgccattggagcactaatgtatctagccaattgcacaagacctgatattgcttttgcagttaatctattggctagatatagtgcaaccccaaccagaagacattgggttggcgtcaaaactatcctcaggtaccttcgaggtactcaagatcttgggttgtggttcccgaagaaccaatatccatccatggtgggatatgtggatgttggctatatgtctgatcctcataatgccagatcccagactgggtttgtatttctttgtggtaatactgccatttcctggcggtctataaagtagaccctagttgcaacgtcaaccaaccactcagaaataattgctctatatgaggccacacgagaatgtgtgtggcttaggcggatgatcggtcacatccagaagtcatgtggtctaaacattgataacacccccaccattatctatgaggataatgctgcttgtgttgcacaaatacatatgggctatgtgaaaagcaatttcacaaagcatattactcccaaattcttttatccccatgagctccagaagagcggggaaataaatgtcctgcaaactaagtcatgcgaaaatctcgcagatttatttacaaagtctctgccagcatcaagcttttacagatgtgttcgtggcatcggcatgagacgacttagtgaattgcaaggatcagggggagcaaacaattagcccatgattgtgatcctgaagaatcacaaacaagtcctgaagacttgatcaactgttgtactctttttcccttggtgaatttttttcccattgggtttttctcacgcaagatttttaacgaggcaacaggtgcaacacaatattcaaagtgccatgtactcttttctcctaccattttttcccattgggtttttgggaggagtttttaatgaggcatgtgcataattcaaattcgtccaagggggagtgttatgaaacctatcttattgtggacgaattaaattatgagtgggaagcttaccacagaagaaagcttacgctagaagctagcttacagaggaagccagcttacagaggaagccagcttacggcacaagccagaaggtccaaggcttacgatgtaagcctccaccctcctccgcctataaatagggcccagaaggtccaaggcgaggacaaccgatcttcggtctcctgcttctcctcttgtagctcgtactcaaatccagaagaaataaagcttccactcgctcatactttatgtgttctacaactctgtgtttggtttgcttgtgtgctgatcagtagaatcgactggtttctcaacttatagaatccagtttttttagatttttataagccggttatcaaccagatactctctaaacaggaccaatatcctatttgaaatggcgattcttttgttaaggggcgcaaagcgatggatagcacctagtctctcctaccaattggttgccacagacttgacaattagggaacaacttaaagctgaaagagttgtaccccctaaaccatggctaatgatgattcagttaaagtgaattatgccccagctttgagccaagtgctgctcctactagaggattcagactacaaatcttgttaagttactgcttaattagtacaaacagctagaacctacaggaaattaaaagaaatcgataaagagccaggacgactctagtcattgctggattcttttgttaggtgctgctttctgctgacctggaacaaaaggattgatgtcctctcttccaatttgtttttttttttcttgtccttcctataattcgtttcttcggaagaaagcaatatggacaattgcaacacgtctccaatcccaacagcactacaaactgtatctggctatgcaatacgaacggtctagtttaggtcgatagtgtgaatggattatggggtgtgctctggggtgtggcaaaattggcgtgttccatcttttggatattggttgtttcggatagacctgttagtttttccttctttttttttcgaactttgggtgtctgaatatttttatttaggtagattttttttggaaaacatgtcgaaaacatttgacgtgtagaacatgattttatcgaacttttaaaattttataaccattaataattttatatatgattagttttcttaagaaaaaaatgagttgctccctgaaataattactgctataaagtagtagattttcgtaagtatccctaaaccatacagacggttcgatcagaagggaaatcgcctgggcgtcggtcaagaaccacctgcaaacatgatctaccacatgttaaaacgatcgaacttttattggataatgctctactctgggtgaccgatgcgggggagccggatcgggcgctccccggcgcgcccctgccccacatgcgtatctactggacccacctacttctccttccttttttcacaaaagatgtttcatctagtatatttacaatgtttcactatttatacatctaatgttgcagtgaatttaaatattcttttgcaacaaaaaaacccatatattttagaaactctctattaagggaatttggtttatttttttgttccatcagaaatgttttacctaaggtactcacaatgtttcactatgtatagatctaatgttgcagtgaacgaaacattccattgcaacaaaaaaaacccatatattttggaaaccccctattaagggaatttggtttattttttgttccaccgaaaaatgtttcacctagtgtactcacaatgtttcactatgtatagatctaatgttgcagtgaactgaaacattctttcgctatttgctgaaacattgtttttatataaggtaaaacaacacctgatttaaacgagtgaaacattttcgatctacttagttaaataattccgatatacatggtggaatatcgtgcaacatttaaaaataatttaataataagctaattttttttcgtcagaatatatccatgtgtggtcttgttttgaagatttaattacaataaatttaatggtataatcggatcatgatttgaataagtaatttagaagaaaaatcagtttaaagtagtgttacccgtaaatcggacgccgattttactacaaacggataggtcgcccgagctcgtccacttttatttacacaagcggccgatttcattatccgcctatatttatgttaatcactattattaccccagtgaacggtggaggcaccgaggcccgagaggatcaaggttattttttttattttctgtggttctggtttttgtgtgatgattttttttccgatacgtactaatataagctgttgcacgtaggggctgatttagttttcatgactttgagcatttcgatgatttcttcttagaaaatagatttttcattaattcagtctctatatttataaaagatatacacagccaaaaaaaaaaacatgcacgagttcttatactccaaacctcacacagagcaatacacgcaaaacacaaaagaagaaaagctagaagacttaggggggagtccctatcacatcgaatgtttagatgctaatttagagtattaaatatagattaattacaaaaatcattccaaaatcctggactaattcgcgagacgaatctattgagcctaattaatccatgattagcctatgtgatgttacagtaaacatttgctaattatgtattaattaggcttaaaaaaatcatctcgcaaattagctctcatttatacaattagttttattatttgtctatgtttattacttcaaattagtgtccaaacatctaatgtgataaaaactaaagtttagtctctggatccaaacacccccctaaccctcaaccttcattgatgagttattctattcgtcccagcatgagaggggggaataggagaaacggaactagtcagtgctaattgtcgtcgcaccatctccgcctctatagaactcaaccaccaattgctgccaactgctaagtctgttttctgtcgtcgccattgaaaatccccttatgcggttgctgcatttcgaacggccatagagcaccgggaagccgcttgccaccctaccaccgtcttccgcagactattgaactcaccatagttcctaaagcatcgtggaaccatccaacatgatatacaccttgtcttttctgccatgagcttgctgaaagatgcattgttgtcattcgcacctacctgtaaccagaccttgacgccgacactcacgtgacagttgccacctctaggacgcctccgtcaagagcctccgttgccatcgtccttatctgcatcagtaaagtcaatggccatcgcacaccatcaacccagcctcgtcacggagccatcgacgaccatcgtccactgccctcgcctgaccatggtcagaacgtggcaccgaagctcaccaagttaccgctgcccctaggacaccgccgctaagaacatccaccgccatcgtctcaatctaccgtggccgaaccaaccgtcaaccacaggcgctatgctgctgacccgccatcacaggtgcagggctagcctccaccgttatccgtcatcgccagtgtctgagtaagagaagaaggactagtctcgttactgtccaacactaccatcagcatcctcagcaccgccaaccgccaatgggcaccatcgccccgccattggcgcctccattgccacgctgccaccatcgaaaaaataaaggtatgcagttccattagaaaaaaaaaatcaaaatcacctactcccctggttctacaatttcttacagttttggataataacatggtctcgatgctatattttttctattataatacatacaatttgtatatttattacaatatttttagacaaatctatatacgtcattcaagtgtctttaagataaatatttttaaaattattgatagttaaagttataaaagtttaacattaactttatctaaaacatgcagaattataaaactggtgggagggagggagtattccgtttgagtgcaacaacgctagacgttcgttccttgagttcaatctccgattggcgcgcgcgggaaaatcacgcgaagccgttaaataacggcctcacagcgccgctcccctccctatcctgcgtcccagtgcccaccactcatcacctcccccctctcatcctctcctcctcctccaatggccttctcctccaccgccgccgccgcctccaccgccttcgtctctgggcaccgccgacgcggcggcgcgtgccacctgctgtcctcctctttcctcatcgcgttcccgcgcgccgtcgcggcgaggaggtgcggcgaggcggccgcggcgccgaggagggtgggcgcggtgaccgtgcgcgcgcaggcggcggcgggggcggggaagaagagcgtgctgatcgtgaacacgaatggcggcgggcacgccgtgatcgggttctacctcgccaaggacctgctcgccgcgggccacgccgtcaccgtgctcaccgtcggcgacgagggctccgacaagatgaagaagccgcccttctcccgcttctcggtaggtaacattatgggggttcgagggctcacggcggcgatggtgaatgaatggatgcaattaataatgcaggagctgacgagtgccggggcgacgacggtgtggggcgacccggcggacgtcggcgcggcggtcggcggcggcgcctcgttcgacgtcgtcctcgacaacaacggcaaggacctcgacgccgtcaagtacgtcgcctccctcgattattctcccccctcgctccgagcaagcaggcgnnnnnncnaaggtgnnnnacgcgttcccgcaggccggtggtggactgggcgaaggcggccggcgtggcgcaattcctcttcgtcagcagcgccggcatctacacgcccagcgacgagccgccgcacgtcgagggggtaaagaaacataacaaccagattcgccggaggattggctcgatgagttgagttcactgactgactttctccggccatgtcggctcgccggcgacgtgcaaatgcaggacgcggtgaaggagagcgcggggcatgtgggcgtggagaagtacatcgcggagcagttcggcagctgggcgtcgttccggccgcagtacatgatcggctccggcaacaacaaggactgcgaggagtggttcttcgacagtaaaatcacccaaatccccccaaccaaattctcccaaatttcaaaccgccccaaacaacattcttcaatttgaagacaaaattgtcaatttttttactgtagtcttttttaaaactatcgaattaagacaaaactgtcgattcttttttctttaacttttgaactatttcgaaatatgaataaaaaattggcaattttttatgtaaattatgaattgtttgaatttgaaaacaaaactttcaaatttttaactgtaagttctgacaaatccaaattatgaggacaaaaccatcaattttttttttgctgtaaactttgaataaatccgatttgtcaaattgtcggtgtaaatttccaagaaatattcgaattgaagtcaagttatttttttggtttcaaattgtttttgcagggattgtgagggggaggccggtgccgatcccggggtcggggatgcaggtgacgaacatatcgcacgtgcgcgacctggcgagcatggtggcgctcgccgtggagagccccggcgcggcggcggggaggatcttcaactgcgtctccgaccgcgccgtcaccttcaacggcctcgtcaagatgtgcgccgccgccgccggcgcccagccggagatcctccactacgaccccgccgccgtcggcgtcgacgccaagaaggccttccccttccgcaacatggttagtactactaaccgttttttattcatgcagcggcacattgctattttgctcgaataaagaaaatgtgatttttttttatctcgggggaatatcggatgaaaactatcggataagcaaggactcatctgtcttataaaaaacccaatcctgaggatgtatttggacaatgtgtatgttcagatatatctttaggattgaattttttttagacgcaggaagtacgtgtgaaaaatagacttagaaaattttttgaatctattcatttcgcaggaaaagaaacaaattttagacgagtagagttcctttttcttacttcaaataaagtcgaggttggaaaacgtggttcattcttgtactgtctctagtaatttctttttatataaatttagaaaaaagaacttttaggcccgattcttaacgggttttcacccgatattttggatgtgaattttatcttgatatcgatgttttttttcccaaaaaggatgtgattttgatatgttaatggttgtgtgaaaattgttagcacttctacgcggagccgagggcggcgaaggaggtgcttggatggaggagctcgacgaacctgccggaggacctcaaggagaggttcgcggagtacgccagcagcggcagagggcagaaggagatgagcttcgacctcgacgacaagatcatcgccgccgcctaacaacacccatctcatctcacctcgtcatggtcaaatacaaatacaaagtgctcggggatctcttcttctcgtgatttattttcttctccctctgtttctttggttcctcttctcataccggaagcatagagaaatgcaaaactgaacaattatatatgtaaatgctaggaaaatgctgttacaaataagtgaataagatgagttttcgcttttcgtttttcatttttccatcacatatccaatatgagaatggaactttgcagagtcaatcagattcagcacattttcttggtcttacctcttttttgtctgaatatatagctgagtaattttgtctaactattcgagggtataaaaaatgaattaactattataaagttgaaaaaatggatttgaacagtttcataagaaattcatatatattaagttttcttttccgaaaatcgcatcgtttataagcgctggaaataaatggttgcattccttaagaacagatactcctcaacaagatctgtgttgtgaattgttcaccttgactcgttcttaacaactgaattcaactttgattctgacagaccagaacagacagcaatgctgacaaagaacatcaggatttctttaccccctttctgcaatattcttttggagaccagtgctcacgaacaagccaactcagaaggagcattgcagcacattgatccacaaagccttctttgatttcaggtatttttgcgcacacacaaggggcaacacaccagctgatactgcatggtgtaaaaagaaataaagaaccaagaggactgataatggtagcagcgagaatcaattaaaacttacaattccagcgattctcgacatttccagaactaagattggtcccatctcgacatttccagaactaagattggtcccatcctaggtagtaatatagggcgatcggaactactgaagcatcagggagcacacatacgccgaaatggtcatgtttctgaaaccactagcatggtaaaagagagcatgacccctggccctgatgcttgaggtgcggtcatcttgaacttgggtcgacatggtcgtccccgttgctccagttctcatgccaggtggtgaaacccgttgtaagggcctctcgcacccatgggtaacggctccgctccaccgcctcactgagagtgagccaggtcctcttgcgggtgctctgctcgggccaggaggcaagctcttccttaactcgaagcgcgaacaccgcagctctgcacatcccctcggggcagaacttgtcttgatgcgtcttgctcttgaagtcgtagaagcccaataattgcttatgcacagaaagaatcgcaaataagtagagtttgatggcagaacacatggaagggaataagtgatgttcaataataagccacacgcaagccacaaggactaaggaatcacagaatctatttaaacttggctacacattaaatgtagactatgcaagtacaacctagcgacacaatattcctttgacttagcttgctttcctaaataaacttcctataaaataatccatttataatgcaagattcaggtcaaggtttattggctgcactatgtcgtgtgctcttatgctctgtctagtaccaatagtttcattaaactttcaaacaaacaacttgaccagatgtgcaaatgagcaaaatcagtgtcaacacagtagcagagtagccagcattaagcagttcaggtctggattacaatctaaagtgcgagttagcaacacaagaatcctcccttaacttacaagtgcccttcaaagtttgtgtttactgaaagtccaacaagtgctatttacacaatgaatcttataaaacagtatacaatgatgaggtccaaccagcttgtttgttagtcaagtggcacctaacacttgtcaaatgaccctagttctttaatgcacaaaaaaaaaggcctagtaaagaacaagcagcgttgcatattcatatgctaaagtatgaacatattaacacttaacaaaatggatgctgactctgaatgaacagataaggccggaaattccatagcccagactcagactatgcttaaggatcaattttcaggttaagtgaaggacacagctagttatcagaaggtagtaggtctccataggaaagaagattatatctaattgtctatataaaacacaaaatcgcatgcatacctcaaaaaagacctgaggtcttggacacaaggttgaacaacaaacatatggctataggatataataatggggcttttttctaagagaagatcaaaaagtcaaggtaaaagtgccaaagggtctcaccactaaatctcctcgaactccagcttcttcaatagcttcacgagcagctgcctcttcaacagtttcatcattctcccatcctccctaaagcagtatggcacatcaaacaaaagaccgcatgccacagaatcatgtactatataataaacaaacagatatatttatcccaataactaactagtacacctcgcagacaaggttatcataagattaactctactaatgagtcctgactggctcaaaagtcgactctacggcacctgatttcagtacctacttaatcaaacatttcggagggatattgattatcttgctcatgcccgttatgttagagcattgaggttacaaatcaaggaacatatctttatgtaatggtagatggataacggatattggattatagcctaaataatttcccatcaattactctggaaatctaaagcacaaacagaataacatcacagatgttttcatataccatgttctgagaattgagtgactcttaggcatagatgtttaaaatgttaataccttaggaaataggagaccagatccactctgggagttgatcatgagaacttccacaagtttcttgtgtccatcatcagaagtttcatcattgttatctttatatctaaaaggtatgcacctacatatataagaaacaagtatcagatgaatttaaagcatgacaacattcttctctagggtctttaaccatgttgtcttacagcaaagataagagcagcacgctcacagatacatactaatgtagacagtactgtttaattgagttcataaaatcctgttctgaagtgagtttaagtagaagcttgactatcaagcactattcagatgagtaataactttactaatgttggtaaaatgtttaactgctactccaaataaaatttgacctcaaattttgaaacaaataaattaattctcatatagcttatatcactaacagtaataagcacttaatgcaacaacaccagtatttggaacattgtgacaacaggacaaagcagcataaacaacaggtacaaccagctattctcctagttcggtttttagtctccagttaatacaaatatcatttttcgtatttgttaatacaaatatctaactgcacacatgggaacaagaggaccctggggtcatctctatgatcctgaaatccatctccctgtgcccatctcacacatatctatgtttttatcaccactttcttttcttggaaaaatcaaataaaaatggaacctctcccttgaacaatttaagccaaagggataccaagtctgcacagcaccttctgacagtgctcataaaaggcacaaactaatccacacctgcaacaagagacatccattatcctaaaaaaaaaaaactctagaccctccaaactgagcctagaatccttatccgcgaaaatttccctatcgacgccggcccaccaccgatgccgaatcaatatcaatacaaatctttaccaagattcacctaattgatggcacatcctgggaccaaacagagataccccaacctccctttttttccccacacacaggcacaccccaatcatgtggagccggtaaagaacaaagcacactgagaatcagtaaagaacagaaaacgataagcaggtcgccatcagcaggtgcctacggatgaattaaaggagctaaattttaatggtagccctgctcactgttcattgattaagaccaccccctcccctcctcccataatctagccaccaaatagtcctcctacttcccctccacagcagcagcagcagcaagaggtgaaaatttgattccaatcaagcagcatatcaaaacaaacctaaattacggcaagataaaaataaaagtgatattttttcttggtggtgggggatacgaagatgatgatgatgcaggaggaggagaggaatgggggagtaaaaattggggctttgaggatgtcccacccggccacgagtcgacgcccatgctcgtagcgctgctggtgccgccccgttctcgccaccaaatcgcacatggcttcttcctgtccccgccgccgccgccactaccggaaaccgcctccgccgccgctcgagagggagagagaggggtagggttggtcgccgccggcgacgagcaatgcggcggaaggaggaggaagaaggggagggtgaggggctcgagagatgtgcgtgcgtgcgtgcgcctaagcgccttgcttcgttccttcctgggtctctcgctgttcttgccctttttattttgggaattttttgccctgttttggtcccctttttaccccctttgtgtagcttttttaggactttttctctggtttctatggtttttggctttggtatgtggttttggtttggtaaacattttcaacttcatccctctttccaactcaaggttgttctctgattttgtaatacaatgtgccgtttagttatgaaagtgctttaccgcttccgtctatgtcggttgtgtctttcggtttaactcgtcgacaatatattgtttggaccgatttacggagagcaagaaaacgtacacggtactatgttttaaaggtattgctttacttgaaaaataaactaaataggttgagcgccgttgaaagacgccgacaaatcaagtctcacacgagggggaggaggcaatgctatgtaatgcttcatcgtgaaaggaaaaagaactttacaaataataccttgataaaaatttttgttttcattttcgtcacgttttctgtttaacttggcgacgatgtgctttagcggagcaggcgtgtgtgtttagtatcgtgtgttgcatcatatgaaaaaaaagtaaatgaattggtcgtacataagaaaagagtgaaatacatgactggtccctaaagttgtgtagtggtatcacttaggtccgtgaacttgaaaattacacgtttaggtctgtgaatttggtttaatgtaccacccggtccaaacgtcctttgactgcgtttgatcgctaacgtggcatgccacctaggcaacacttttgctctcagccccctccacatcacaacacgtcgcatatatcttcttatagttatatagtgacaccagaatcccaaaaaaattctcacatcgttcttccatctcattcttctccttgcatgtatagaaaatgcggttctgattagcaattgccattgctctgcactccaaaataaccttatccttgcgcaacgggcacatgattaacaacactttcttccagcgacttcaagacgaggacgagcttggagaatccatgggatgcctagcgcgcaagccgtattgcactgccttccgccgctaatacggccgccttgtgctaccgctaaccccactgcactgcgctgcctcctgccactaatcgcaccgccgaggccaccacagctgctacctctcggcctccttcccctaacctcaccgtcgaaaccctagccgatttagggatattttgagggatttgggttgaaatgcacactggtcatagcaagttatgtgcgaaagtatatgtggagggggctgagcacaaaagtgttgtctacgtggcacgtcacgttggcagtcaaacatggtcaaaggacgattggaccaggggtggtacattaaaccaagttcacagatctaaacgtgtaatttttaagttcatggacctaagtgataccacccctcaagtttaaagactggccatgtatttcactctaaaaaaaatcggctctaacttgaagtgaggtttttgacctcactgaacttgccatatattttaggcaaattttgctacaggacattgtaactgtgtgtatttagctcaggacaccgcgaaagtgaacttttgggggaagacatcccataatcgtggatatttgccgatggacaccgcgccgtctcctctccacttgacgtgctgacgtggtagacgggaggctgtttttttttatgcggtcggacgtacataacatcatatgaatacgttattctcttctgcttcattagaatccgtttgcaaagggtctacaattacaagattgctcaagcgatcccatgtgggctcgggagtatagacactatattttaaaagcaccacatggataccttgatttctcaaaatttacaattatatttttattctctataaaattataaaaaaataaaactatatgagttcataatggaagtctattaatatcattttcatatatcaaatactaatatttttacttctattaatgaaaatatttcaagttggacttatctattgaggaggattgaaatgatgttagaatttcacattttacgcaagtgtcctcacttccatcgatttgattaatcgaacacttatcagtcaatatgtgcacaattaacatatggtaacgactagaagtttatattctctgccaaatcttcatcttttgagtcaatatctcgatcacaatatctcacttatcgatttctcaactaaatcttcatttaaattgatcttcaacccaacccaacacaagttagtgaaagaaaggtaacagagtgatcaccatcctcaactaataagtgtatatgttcggttgtgtttttcagtttaattcgtcggtaatatatcatttggctggatatacaaattaaagtgagagaatacgtgtacgtggctttcttttaaaagcattcttttgcttgaaaagggaaattaattaaataggttgagtggtgttgaaagacatatacaaatcgagttagacacgagagtgagaggaggcaatgctaggtgatgctttacgatgaaagaaataaaatctttagaaagaatgctttaataaaaagttcttttttaaaaaaactttcgttacgttttctaactcactaacgatgggctagttgggtactttagcaggtaggggatgtgttcttgttttgtgtttgaaaagttttgcttcatatgaaaaaagagattaaatgcattgatcatgcatacaggaacaggaagccaaacgttttcatttatttcatttaaggaaagtagggttgttaatctgtataggcccttctaaccctagctcgaggagtgtcttttatgttcatatcttgtttttaaccaacgaaataccttcataagagcactataacattttaagaatcaataaatttttaaatggaccaatatatacaatctttgaatgggatttgactttggttttaaggtttggcaaaaagaacgaattggctctcacttgaagagaggaggttttggggactccaaaactagccaaggacagctttgaaaggaaataaattcaaaacacacgaatatgaaaaatatacccttaacctaactaaatttatattgaaatcacatccacatatgtaagcactaggatttcattaaatgtagtgggtgagtaatcatacgctgacagctctatcgccataccttttgtggggccagtcagtgctgagaggtatcaatatgtaacgaggaagattattgtctatcagtgtgagctcgaggggtaccgacagatgttagataacaacatgctcgatcgtccagatgtacgttcactgattaattttcaatttgtaacttagttgactgctcgatcgtccagatgtacgttcattgattaattttcaatttgtaacttagttcactgcaaaaattcgtaacttagttgtctgcaaattaattaattaaagtatttgtataaaagaggatatatactatttttataatgaaatgatagaatagaaatatgtaacagtccaaccgttgtataaaaaaggatatataatatttttataatgaaattagaaatatgtaacagcccaacccaaccgacgggtggggctatttacacttctatccttgcttcaaaggcccaaacgtccccgtcgtccctatcggtccaattcacctatgtagccacacgacatataggctgacgggtgggcccacttacccacgccaccccactgcctataaagttggatctgagaaatgtgtactaaacatactgcgagggtcggctctgagcccactaaacatactgcgagggtcggctctgagcccaaccaatggacggataccactccacttacaggctctgagcgcaaccaatggacgggcctacgaacctacttatactttcgtcctcgcttcgtgtaaaagggttaacctagaagtgatatgattggaaggaagatgtcttataagttggttccaaccttgttaaactagtaaggtggtactaaacatgagcacataactcaaggtggtactaaacatgagcacataactcaaggtggtactaaacatgagcacacaactcttataagccacacaggctaaattctaattggactgggatattaaaaaaccatactggcctacaatggtaataagctgtctgaatgatgatttcaattatgttccttggtaataatagtacactataattgacgatgctacccaaaattcaaccatctccgcgcttgttcatcatttggccggatgctttaaccgtgattatcctgtgaaggtgaatagtatagtccactatcggctgcaattttttccatgtcatgtatagccaacacgatgggctgtaatgcatctgccattttacttcagcaaatgatatttaattctttcatttatcattttctctctcctttgcatttctgttccgatacccatgggccatggggcgtcgtcgagcagttcctcccgcgcgtagaaaaacggaccccactttttcttcaagggcgcgtgtaggcgggcgacaatttagtcgcacgctcgtcctctctctcatccgcgcttagcaccaggtcatcttccgaacctacgtggactgcttatagccatttctagttctgtgcatgctctaaagtttaccccatacccacacggcatgtatatccgactaggtataagggtaccatatacagatagaataaatttagtaaaggactcggttgttatgttaacttgtgtatcaaggaaacatccgatagttctagtcggttacgattgtaatttatcttgtccgttaggaacatgggttgtatcttgtaattccggctcctcctcctatataaggaggggtccgggtgcctctaggggcataatttttctccctgatcatacgatcaataatacactcggcggatcaatccccggacaggagtagggtacttctcatcgagaaggcctgaatctgtataaacctagtgtctcctaacccatctacttttccagcttgatagccaccccttttagtattgccaaaatattgtttcgacagttggcgcaccaagtaggggtagcgtcaagttcttcgccgattagtgcaatgggatttgtttcgggcatcgacgacttcgccttccctcccgggcaggcataccgatttggcagcctcaacttcatcaccgacgacttcgacaatatttctcttctcggctcagattcgaaccagtcgggaggggatgccatctttgctccattatgtctcccaaactcggctgaaatctattctaagaccatctcatctgagttggattcaaaccactcggatgaggtctcgtcaacttcttcgcaatcaaatcaaggagaggcaacttatccgtcaatcttgatgtggcttcccgacgatctggctgctgtttttactacaagagcgtcttctccccgtaggtccagattaaactcggcttcgacctcagttcaatctggctctagggaagtcggcgtgatacttcaacgactcggaactcactacaagaggaaccctctttagcaatacatatatgtattgctaaaagtctctataagtattgctagggtctgcaccaacgcatttaatatgcgttgcctatgctgccgttgctaggatcaattacaacacatagacaaccgttgataacaagtggaaataagcgttgctacttagcaacaattttaataggtttcagcaatacttatatatgttgttcccttgagagatgaacagttttatataatcttagcaatggatataatcaagttgctgcaacatgtacaaatattgtaatttgagctatccactgtaggtggcctttgaccaattattttgtcaggcaagagacccatgaactcaaagcatgcacaagtgacaatagtccaatcaatcatgataatcgattatatattaaatatagtattttgcattacatagacaatcatcagtataattcatggcattaaacctttgttcagaacattaatgcagaaaatagaatctaaagtatataaaaaaaacacatcttgttgcccccattctccaccttgcagccatcatcattccgtgacatgtacaggtgacctagttgcgtactagcagtcacaaaatttcccccacatcttcacccatttatcttgtcaacctataatagaaaaaatatataagcattaatataccattatgaagacgaaaagcacatctccgaagtaagaagtaagagataggaacatataaaaattgcaggccacgcaatttcaagtcctacaacatgaccaacaattttgtagcctttgtatggcctaatcaaatcttcggattttgccaatgcaagatcgacatgaaccattaaaaattcatttcctagctcaacacctccaactctgcgtgttggatcacagcttacaatagtggcaagagccacgtttgtattccgatttttccaactttttaagaatactttagttccaacctgaagtgcataatacatccatcaatattatcaatatactttaagaaattcaagtatcataaataatttcacagtaaaatacctccattgaattgtcagtgataaagtccattttgctgcactgttgtttctataaaaaaaaattggatcatggtttgcaatttaaccacaagatagaaagaaagaaagaccaaacagagccaattattgttctccaattcaatcataatactagtgaatcatgcatgttatagtttgaatggactgatatttgtaaacatggtgaataaaaaaacaaccttgtatgcaccaccaactttatgtgcatgtaccatatggctgtcctgattgtcaggtttcttgttctataggggagggcaacaaattagtgctaaaattatatatattaagaaattttactttcaaacttttctatcaaataatttttgaactcaataagaagtgaaaactaaccttggcacaaataatctccatctgtttcccatggtcatttaggccaaaggttcgtttgttctagaataaaagaatacatcacattgtcatgaactatagtaaacattcatagttagttacaaacaataccaaataatataatgctatgtatccatgataaccatataataggatgcaaccatggtgagttcagaataaaaatataaattgaaagacaaggaccttgtgtgcagtagcatgcttggttggtggtgtcttatcctcatcttgagcatggctttgtgaattctgttgtcaaagagagcatatattcccagttacaaaatagtgcaactattcccatgtataaaacaatgaaatttatgtatattaccatcacaatgttttcctgttcaacatgacaaatttcttgcaagggaccgtcaccatacactttctatcacagtggaaaataaaaggacattaagaccagattttattaaactatttagactaaaatgttagcaaggtttaccactgttgaattgtcagttaaaaagtctattgtgttgcattgccgtttctgaaaaaatagagagaatttacagtaaaaaccaacatgctgtgtgtgctattttagttgttgtgtagtgttcaataaacagaaatagcattttgaacttgaaacaattagactaaccttagaagcagtactatacttgtttaggcttggtctaacaagcttgcgggtaaggttctctttgttctgcaatacaattattataactagtaaatcatgtgtgttatagtttcaaagagcttatatctgtagacatggtgacttaaagtgatgaaaaaataaccttgtgtgtacttgtaactttgtgtgcattcaccatatagttgtcctggttgtcaggtttattgttctacagtggaaggtaacaaataaattttacaaatctatatatacatttatatatcgaaattaaactactttcaaacacttattgactatggcattgagtttgaaaggataaagagagaacttaatcaactcaccttgtatgcactagaaatactcttccctggttgcataagctcattatggtccaaatttcctttgcgctgcaatggaataggtcataaaattggcacaaactataatgttccaattatttgtttatgtttgcacaggaagtaatcttcctttgcttcccactgtgattctggcccaaagactgtgtattctagagtaaaagaaggcatatgattataatgaatgctatgtaaataatagtgaatatatatataataatattttaaatgcaaaggcaaggaccttgtaaacagtagaatgcttggttggtggttgcaaattctcatcgtgcacatggctttgtgtattctattgtaaaagagagaaaataaatgctattcccaagtaaaaaaacacagctattcccagttataagatggtgctatatcacattaccatcaaactgttgtcctgctgatccataatgtttccctcctcaaacatacaaatttcttgcgaggggttgtcaccatacactctctgtccataacagaaaatgaacagagatctataccacagtttatgagataatgcagaaaatgttatgatatttcttccataaagatacataccctcctttttgaattaggtacgtcatcacaaatagcttttttatttgtagatgctccatctaaacctccctgtaacttcaattaggtaagttagatgcattcattgggtcacacacaagttcatataatttttttaagactcaactcccttaaattcacctgattcttttgtgccttttccaacttggttgccttctcttttaattgtaaaagttcagcatcattattctcaacatggcgttctaacttttccatctgcagtctaatagccattacatcttcactggagttatcctccactgtagtaagatttatattctgcaaacgtcgggaagttggcacatcaagcacttgtttaggctttggaactagtccaagaccatgcacacgcccaggcttgtcatctcctagtatttggttcaatgcatctcctttccaagcagtctttcctttactagcatccgctaaagctggttgttcagctataagtctcttcaaattatcctaaacatatgaaaaattaatacgaataaaacaacatatgagaataactgaaaaatatctatggttgagtgttaatagtataccacatgcccatttatattcttgtcacttttgcgcttgtgtgtgtggacataaacaacagctctatgtgggttcttctttgcaggatctttttgtctctatggaacacatgaccaaatcagtaaagtcctaatagtagctatacatgcttgaaatggaaatagatgaatactattcaagacatgttttaccatctcttctcttgtgcgagcaaaactctttgtccctgctgtgtgaattgccttcttcttttggcagtttttcttattctgctcacttattctctgttatggtctcgtagagttagcaatcaaaaaagaatattgcattgttttgtttagtacagagttctaatttgtaagaccattacagaaatgaatatggtatatgtaccttcgatttctcgttcatccaatgattgacaagagcaatccactggtcagaaagcacaccttctgggacattgttgcaattagcttccttagtctcattcacatcaaaatacaaatctttagttttgctttatattgccgccatctttctccaattttttttaatatgaactcttccatccgaggagcataaaggaatctcatctacatatagcaacacagaaactcatatggccatatggggatatgcataacataatacaagaagttagcaaaaatgttgatctgaaaaggaattacctttact

SEQ ID NO: 5729 - DNA, 76885 bp, Oryza sativa
atcttacaaggttctttgtgtctttatggaacacatgaccaaatcagtaaagtcctaatagtagctatacatgcttgaaatggaaatagatgaatactattcaagacatgttttaccatctcttctcttgtgcgagcaaaactctttgtccctgctgtgtgaattgccttcttcttttggcagtttttcttattctgctcacttattctctgttatggtctcgtagagttagcaatcaaaaaagaatattgcattgttttgtttagtacagagttctaatttgtaagaccattacagaaatgaatatggtatatgtaccttcgatttctcgttcatccaatgattgacaagagcaatccactggtcagaaagcacaccttctgggacattgttgcaattagcttccttagtctcattcacatcaaaatacaaatcttttagttttgctttatattgccgccatctttctccaattttttttaatatgaactcttccatccgaggagcataaaggaatctcatctacatatagcaacacagaaactcatatggccatatggggatatgcataacataatacaagaagttagcaaaaatgttgatctgaaaaggaattacctttacttgcttaagtatgtcctttttaacttttagttcatttgtatttttctctctctttcctattacatatctccagtctgtgtagcctaagctacacagactaccattcctagatatcattccaagaaatttacccaaaattccatcttcttcccctaccgcctgattgagatcattgcattgtaccacaattctaagccctttcggaaggttccaaacatctttcagttttgtcttgccacgtgtttcaggtgctccattttcaactgttcggtgttaaattgcgaagacaaaagtgatccttagtaatcagggatacgagtaataatgtcattatttgttaccattaggactattaaacttagcagttacctcgaacattaatatcaacatcagtatcttcattgccttcatcatcaatatcaacatcgtcattagtgtcttcattgccttctccatcattgatattaaaatcgtcatcagtgtcttcattgccttctccagaatcatcacatacagttttttgttcagatggtgtggcaagctgtggaagggtattttcttcttcagtctgttcctctgacaaatattcctcattgctctgaacaatacgcctttttctactccttgccatatctcttgcacccaaaaaaaacctatctgtcatttatggcatcgaaagtatatcattctcatttcagaagtaggactgtgctgtacatagtttcaaaaagaataatttcagaattgattataccctgagccattttggatttgtttttgaagaacaacagagtactgttgtcccaaaagtaatgctataatatggatctgtttgtcatactcactaattcatttgtccattttataggccaacaatttgaaacaagtaatgggtagaaataacaaaatttaattggctgcaaggtaaaactagatcacatatttattgcttacagttgtgtgaagcctagctgtacgtagaccaggctccttcagctatggacggtcagtgcatctgactccaaacctgaaaatacaacatatcaaattggtaagtattgtagtcctggaagggaattagcctccattgcaatttggcgactcagagaggtagtaagatgtgcagagggaggcagagattccggggcttggaaacattgccgccagccgcgcagcgtggagcagagcgaagtggacagccggtgtcgggaggtataacccgcatcaattgcagtgccccggtcacccggcacatcggctgggggcgtctccggcccgccgcatgccctacatcatccatggggcatgggggtcgcctgctcgtggctgttaatcggcaggaaggtgcggcagcagtgatggctggtacagcagccgacggagcggagcggtggaagatctaggagcgcctgcttggggcggtgggtcagtaaagcgcccggcatcttacctacagatcaacaccgatgaagacgaggaggagaaccgtagaacgacaggagagttcgtaggaaaggggaatcccacaacagaggaaagagatttactcagggagtcaggatagaggaaagagatttttaggggcagttggcttgcttttctcgatggggaaggtgggggcaaaaaaaaaagttggcggcaaaaaaaagaaaacagaaaaaaattgcgggagcaaaaaaaaaaggagggaaagagtggagggagaagaaaataattttcggagaggcataaattgctaaattcagatcgatttggggttgatttgtccgtcaaactagttatttaaattatattagcacaatcaaaaaatcacatgttatttcattgtcgatcttgtccggacagaccgcatgaaaaattatatataattaaataacagtgatttaatttttttagcacgaccaaaaaacaagtgttttttcattgtcggcccggtccggacagactggatgaaattcggacgtaacatattttggttagttatttaatttatctaagcacgactgaaaagacacgtgtttttccattgccaatccggtccggacagaccgcatgaaaaagacatgtaatatatttttgtcctaaaatatagttatttaaaaaatgttagcacgataaaaaacacgtgtttttcgttgtcgacccggtccggacagaccgcatgaatatatatatatatatataattaaataacagtgatttaatattttaggacaaaaataccacgtgttttttcgttgtcgacccggtccagacagaccatatgaaatctggacgtaaaatttgtgttaaaatagtagttagttaatttataacgaccaaaaaaaattgttgacccggtccgaacatacgggatgaaattcggaagtaacatatttttgtcttaaaatagtacttatttaatttatattagaatgaccgaaaagacacgtgtttttccgttgtcgacctggtccggatagactgcatgaaaaagtggcataatatattttaggtcttaaaatatagttaattaaaaatgttagcacgacaaaaaattcatgtgttatttcattgtcgacccggtccggacaaaccgcatggaaaagagatgcaatatatttttggtcttaaaatatagttatttaaaaaatgttagcacgaccaaaaaaatcacgtgttatttcattgtcgacccgttccggatagaccacatgaaaaatatatataattaaataacagtggtttaattttttaggacaacaaaaaccacgtgttttttcattgtcgacacgatccgacagaccgtatgaaatctgtacgtaaaatatttttttgtcttaaaatagtagttagttaatttatcatagcatgacaaaaacatgtgttttttcgttgtcgacccggtccggacagattggatgaaatccggatattcttaaaataagtttttgaatggtttatttttaaaattttaaaataaaaaagttcaaaaaattaaaaaatttctggggcaacagaatttttttcccgttcaaggagaggaaaaagtttttaggaattgacactagagaagaaatgaaacgattatgcatttgctagttctcgaactagagttgtcaatacagtagaagaagctaagtaccactaggctatgtccccctttatttattttttcacgttagctgcaattgagaatgtaaatagacttctcgaggtatttatataagatggaaatttaaattctgttagcacgaccgaaaaggcacatgctatttcgttgtcgacccagtgtggacagaccgcatgaaatttttcattgagacgtaaaatatttttggtcataaaataatagttatttaaattatgtttgcaaaactgataaaccacttgttttttcgttgtcgacctggtctggacaagccgtataaaatcatgatgtaaaataatttttctttaaataattgttatttaatttatgttagcacgaccgaaaaaccacatgttttttcgttgtcgtcttggtccatactgactgatcgcatgatcaaatccagacgtaacatattttgtcctaaaataatagttagtgtggccaaaaatatttatattgaaaaaataagttttcgatcagtttaattttaaaattaaaaataaaaagttcaaaaattctcattatctggccagctaagaaggatagggaaaaaaaattaggaatcgcccctagaaaaaaaataaaaaaaatctaggctggcatatttgttttcctcgttatctagccagctaaggagagggaaaaaattttaagaatcgccactggagaagaaatggaaaaaaaacgcatttgttaggatttgaactacagtcttcgatacggctgaagaagccatgtaccaccaggctatgtccacttcatgttggagttgtccgttcgacttacttattcacgttaggtgccattgacaacgtaaatagtttccattcacaacgtaaatagttttctccaggtatttatataggtggaaatggaataactgaacacaatagatgcaaagattataaacgcccattcctttttctcatcatataaacaatatgatatcctagatatttaaaaataagatctaaccaccaattctgtatataactaatgtagaacattattacaggacttatgtatgcaaataaaaagttgaatcgatctggctcaatcacttagacaatccaaggaaatatacgaatgacattttcatccagaaaagctattgtggtgaagaagccttcatcgcagtaaatctccatccaaaattactgccataaaaataaagtgctccccaagtgaagatataaacaatataaggaaatcattgataatggacagatagatagtgaaaaaccttcataacctcacctttaattagttaccatgttattgacagttgttccttctatatctcttcgaatccatgtctgaccatcatgtgcactgtcaaatagctccccaagattattgacatggtatggttcgcattccacatcattccattcttcgcccagttcaaatacatctctaggtttcatcttccttacaatagaccaccctggatttaaatggttttcaatgtaaaacacttggtcgacttgatttgcaaatacaaagggctcatgctcaatcttttcaccggtatgaatttatttgagaaattcacaagtgtgcagccaaacatatctattttcactccttttcctttagttacatcgacccattcacatttaaacaacacaactgagaaatttccgtagtagtctaactcaattatattaagtatccttccgtaatacatgatatcaccaaggacagggttagtatcactggcggacgtgtagctcgatgtttttgcagtcacaacaactccactgttttgagtcaccctgtcataacgctttgatatgaacctatacccacgggtattgaatgctctatgtcgttttgctacctcaattggtccacgtgccagccatctaatatcctcatcaatactatcgatacctctttgattctccaactgcaagatctacaccaaaccaaaagatgtattagttgtactcatatttgaaaaagagaaacctaaattttgagacttacatgatctctgaaccaatcagggaattgttcattttgcatgttctcaatgttttttggagttagccttttgcgtttcttcctttgcaaattagcagcatgttctctgcaaaacaaataaacataaatttgaagcaaaacacttacaacacataaaaaaaaggctatgttaggacaatacgtactttagatatggcactacagcatcacagttgtatagcacatatctatgtgcttgcaatttctctctatcagttaaggagtacgccgatggttttcccaatggttttcctactagaggaaacaaagtggattcttgcctactcatgggagtctcaaattgatctggtttgtcattattccttgatggtatgttatgcttggtagggaaaccttccaagtatcgcgaacaaaatgccatgcactcatctgccaaatatgattatgcaattgaaccttctggacgcgctttgttgcgaacatacgacttcaatttacctaggtacctgtaatatacatacaaggcacaaaactaataagttagtattgtatcatatgacatatgagaaatattataaattgtatgctaatatatttttagtacctttcaataaagtacatccatcgatagcaaactggcccaacaatcttacattcagtagctaaatggacgactaagtgaaccataacagtgaagaatctaggaggaaatatcatttccattctacacaatgtgattttaattgcttcttccaaacggtcaagctcatcaacatggagaacttttgaacatattcctcgaaagtaagcagataagtcaaacaagacagatgtgacttcattgggaagaatacccctcaaagcaattggcatcaattgttgcattagaacatggcaatcatgtgttttgagcccatgaatttttccttcagcagagttcacacatctagatatgtttgaagaatagccatcaggaacttttatatccctaagaactttacagaacaattgcttctcacttttggacatagtaaagctggcaggtggtaagtagaacttgcttgaagttctttgttgtggatggagctcccctctaatgttcatttccttgagatcaagacgagcttggagattatcctttgactttccttctaaatttagaagtgtaccataaatattgcatcacatcaagattatgctgaagaagattgacatcctagtaaggtagtgtgaataaactacttactgccttataagtttttgacttcttaaaatcaccgatagaatttatttcatccaataccggacgcccatagtaagtcataggctctgtactaatctctgtggttccatcaaaagaatttctatcaaaacgaaattcatgattaggtggcaaaaatcgacaatgacccataaaacaagatttcttcccatgtgccaaacgtttggaccatacatttggaccacaaggcgggcatgcaaattctccatgcaccatatgtgaagcaagcattcctaaagctggcaagtcatttatagtccacagtacagctatcctcaaattaaaagtttcatttctaaatgcatcatatgtggaaatgccattggcaaatatgtctcttaaatcttctagaagcggctggaggaaaacatgaatgttatctccaggacttttgggcccaggaattattaatggcattagaagattaggttccttcatgcagagccatggtggaagattatatattactaaaacaactggccagcaactataggtagagctcaacataccatatgggttaaacccatctgtagctaacccaaatcgtatattacgagaatcagatgcaaattgcttgaatcttttatcaaagttcttccatgccggagaatcagctggatgttgaagcacaccatcctctactaagcgctcttcatcatgccaacgtgggagcgatgctgtttctctacacatgaacaatcttttcagcctctcctttattggaaaatatcgtaagactttgcttggtgttgctttctttctttctttcttcgttaacttggtttctggttttttatctttccatctagaagccttacaagttgaacaaaaatcatcattaaccttctctttccaaaacagctgacagttattgggacatgcatgaatttgttgataatctagaccaaattttgaaaccaccttcttagcctcataaaagttttttggcaattcttttccatttggaattgccatgtgaagaatatcaagtagatctccaaatgatttatcactccatttgttcatggatttcatattgaacaaaagcactagtagagataagtgtgatagttcacatccatcccataaaggcttctttgaatctttcaccaactcataaaatgcttgagcttctaaatttggtccatcagtgtgtgtgtatggcgaatctgcagaatcactcataggcatgtcgtcatacacagtcctaagtgcatcattaattaattcgtgcatgttagcacgcatgtcttcattgtgaggctgtggttgttggttcctaatttgctcctctgaagactcaccatgaaaatcccattggttataactctgaagcattccattgcacaccaaatgatcatagacatcattttttgaaagtagcatagtatgtacgcatgtttcacatggacaataaatctttgtatcctctaacttatctttatatgcaaattcaagaaatccatctactccagctaagtactcaacagaacctctagggtagcgcaaaagaatcttgatggtttctaaatccatttcgacctatataaaaaaatttgatatttcaggttcttgtagataataacaatgacaaggaattgtctcttatgatcatgatgtagcaaaaatagggcaattagaaaaataccagtataaaatcagtgtcagctaattttgtcacaacctaatagacctcctttatacactgaaacaaaagcttttactctgcaaaaatagagaagagttaaatcaatttacagaaaaaacatccagcaatctaatgtcaaagctgtcatctccaagttaaattccttactataaattacctctagttaatctacagatgatgactctagaagcacatgcgtttaaaacctatgttccaaatatccgttcggatgaacaagaaaaatctgcaggtgttattaaactcaatcagatagactcatgatgcaacaaacctgaataattaaaaaaaaagttgacattgacctggatctgacactgacctggatttggggccaaatggggaatcaacctatgagaagtggctaagaaaaggaccgtgcttgccgttgacccgctgtcgtcagcctcggcccgtcgccggcctgccgcggccgatcccctcgcgggctcaccgccgccgctgctgagaacgcgccgctggccgtcggtgtgcgccgtggcagtgatgtgcgagtgcgtgagaagaaaatgagatgcggtgtgggaacaagatggggcggcgctctcgtgcgtgttgggtgaggtgagagacacgagaggagaggagagaaagtgggagactaaggttgcctgctaaagtgctaatttcacagatcgtattttagttgttatgatataaacacctaaagaaatcatttaataagaaatgtgattagctcagttggttgggttgcgcacattctatccttgagacccaggttcgaatcctctgtttgcatctttgcccccctaatttattcctatcaggtatcagcagctcgctcaattattattattttttaaaaagcatgcttagtccaaaagttttaacaggaaaaaaaagcaactcacttgataatttcttttaaaaaacagttcgctagaggtccgaaatgaaaaataaatatctcactcgattattttaaaaaatacaataagttcgcttattccaaaagtttttacagggcatcaagaccattgcaacgcatgatatctgttgtaaagtggattcggccgttgcaagatactcaatctctgcaacgcatgttctgcaacacatattatctattgcaaattgggctcacccactactaagcgttgctagggtcgcattttggcaacgcatgcttaatgcgttgccaagcatgtattgctagaggggggttcttgttgtagtgactgtctccacggaagaactagatggctacctcagctctcccggcgtcgactcccgtcaaccaaccgagattctcgactatgacgacttcggctacaactatgacttcaacaacttcgacgaccttgatgaagactacgaagacaactacactcctctctttttggcgtctttatggccgacaacgagacagaagaacaacgtctggcacgcgaggccgatgagctgtgcacatgataggaagccaagcgccgccggttggaacaagagcggcaaacccaagagcaagcccgactgctgcatgagcagcaggagcccgagcgattgacatgggaagctgaggagcgacgacagcgtgctttggaatcagggcatcgagcgtgagctaatcagacaacaagacatcgaaggcacatcagtttttcgcaccccacagcagaatgcggttgcggcgattacaattttggataccctccttgtcgacgggtgatacccgtagaccggatatagagggtattggtgtacgctggtacaaggatccacatagtacgacatcgagcaatcaaaagacaagaattatattggttcaggccccttgacaggtaatagccctaatccagttgatgtgggattatatggtggaaaacacaggttacaaaggaaaggatggaacttgtcagatccgacgagattgtagtcgagctgattcgactagctcttgacgacttggctcctcgcaggctccgacttcgtaggctgtgtgggttatgttggcactgagattcgatgatctatgccctccccggggggtcccttttatatcgcaggtctggtgctctccgagtgggactcgaacataccagacctagcacgatacgtaggtgacccagttcttgtccgagaaggacttttcccatctattgatctcgtgaaaggtttccttagatcataaaggaaatatccgcgtgcgcgtgggtatgccatgtcaatacgtaacgtatatcgaagggtagggggtatgcctgacccgtaaccttgacagtagccccccgacttctgctcaaaaaatgaactcgtgcgaccattcgcgacttcgggtgtcgagaacgttatcattcctggtgcaagaaccgcggagatgatgtgtaatcgagcataccgtttgaaacccaacggtcacgagtgaattttgaactgaagtccaaaaactgccgcgcgtaatggacatataaatttccggcgggaatttctctcagttccttggaattcacaccatcgggggtgcgcctatttaaagggattttgggtgcgcattttgaaatccgccaactccgtcaaacacaccgcctgttagcactcctcgccttctccgctgccgtaaagaactctagcttcgccagctctaggtccatctccggcgatcttctagcaacgatggatctcggcaaatcggcttccaccagcgcaaacctgaagaagctccaggaggatggcgcccttcctggccgtgaaaaggcggagaggaaagcaggaggtactaatcctcagcccatcttaggtcgcatggttgcgatcaaagattatattgtctgcgggtttctccctccaccctccgaattccttctactggttttgaatttctatgggctttctcttctgcacttgaaccccaattccattgctttccttagcgtctttgtgcatctttgcgaggcctacattggggtagagccctttcttaatctgtttcgcttttattacgagttgcgctagatggaacccaatagggtatccggttgcgtcgggttccgacttcgtgatggcatgaagtcgcgttatgtccccttccagtgtccatcttctcgcagcaaatggcggaacaggtggttttaccttgaaatcaaggattcaaatcctgtcctcgttgttcccgaggaacaaccggacaagattccggtctggaccgccaagccccccttgaccccctctctccaatcatttatcgacatcatcgatgatctccaagaacggggcttatcgggatatgaagtcgttgcagacttcgtcggtaggcgaatccagccgctccaaagtcaggcccatccagcttataactattccaggccagacgacgcgacccgggtttctcctcggtgtatctttctcgcattcatttagacatgcttgtactcgcgttcctcttcgacttatcaaaaattgattcctttttgacaggtctgagcagcgaaaccgtggagcggcgtgttggtcaggtgatgatcagcggcccgaccacggtgagcaacatccccacgcccctttgtgaaaagggagcgacggagcgcgacgaagcgatcaatatgagttcattcgatagcgtcccgccttctctgctcgaaatcagcttacgacatgatttagcataggcccttcctttgactgatgtcgtcggaacgctcgcggatcatcaggtggcggcatctctgaaggagaaagtcgtcaaggaggcgtctgacgctgccaccaccagtggtggcgaagctccgaccaaggcgaggaagttctcgtctgtgctcagacatcgccgcaaagcagcgactccctcggtaatttcaccttgtcgctaggttatgtagcaaggaaggtttattctcatactacattggttgtcttgcaggcttccgacgcgtctcctccacctccgcgacgtcagagcattgtgacgatcggcgagaagttagtacacagacttttggattctcgtgtcttctgttcaaatggagttttgattcgtggtcgtttgtagggaggcgcgggcgaaggctgctcgggccaaatctgggggaacgtccagcgcatcccctaccacggtgtcgacagatgtcgtgcccgtggtcgggagtcaggaggtgacgccaagcggccctatcagcgatcccgctgggggtcctagtctgccagaggccgtcctcacctgggaggagctccaagtcgaaatgggccgccttctcaaagctggtgctcgtggcatcggccgcgagatctcagaggcgagggcggagacggcagcggcaaacgcgcttgccgagcggttggtgcgggaactagctgaggcccgcgaggacctcacgaagatgagggagcttgtggccgggaacgagcgccaaagcaaagggctcgaggaccgcatgtcggaacttggagacaatctctccgagatccgtggttcgctgcgggtcacctacaccggcctccaccagctcgccaaggagtgcggcgtcaagtccacgatcccggtgaacctcgatgagttctcgttgacttcttctcttgcggagctggcgacagcaatgggggaaatcccctccaagcatacgtccaggatcgcggaggagacgtccaacggtatctacaccggggtgtgtcacgtcctcgcgtgtgtaaggttgtcgcgccctgaactcgatctgcgtgagatcttggatcagggggcggcaagcgacacgcgtaaggaggtgatggaagaagtcagtgacctgggggagtctgtcctccccctttttgaagagtaggacttcttgtattttttataatttgtaaatcttgaactctggttgccttcgtgcatatatgattaccacccttgttcaatgttgatcttggaagtttttcttgtcgattgtagagatgctgatgacgaggatgtccagcagcgcgggcagcccgagtcactggcgataattccggtactcgaatttgaaccacacgtctcacacgacgtcgaggaccatactcttgatgtggaggtcgagatggcgacagccacctcaagtgagtagcctttttaactccgttgggttagtggtttccagcttgtcttagtggtcgttatgtttagcaggtctcaagaatgcccttgcaacccaagatcgtcgtatccaatattggaagactaaattttaagtggcggaactcgagagaaccatgctagccgtgaagaaagagcaagccgtggaaacgctccgaggccgcgaggtgtggtttgtgtcatatttaaagagttgctgtacctcaatggcctgggtatgcagggagcttcgagtagtccacagcgatcctgaagagtcggcggccgagtacatctcgtggctcaacggggcctgtgcccaactcgatggcatcggcaatcgcattgacgaagccttgaagcaagagtgtcgtcgaacgagccgatatgccggaggacatgtgctagcttgcctgcgagatcaccgcccgcgcctggatttcgaattcctccatgaagggtttgctcgttctcggaggacttcggcggagatagaccaccttgcgaggtcgatgtcgccgttagccgagaaggtattccagtctatgaactggcattggccctcttggtagtactcgtggcctgctacagatgtcttaggaaaaagtgtaatgtagtgggagatctatgtaaaaaacagtaagaattattatgtgaataaagaaatattccttaaacaaatgcatcttactctggatgttatgtgttagagtgtgttatcagttaacgacctcggccgtttgagtcgtacactctccctagcccctagccttgtcgtcggagaaattttctcggatgataaggctcttggacacttgatctgccttggttgaataagctctgatcctagcccccagccgtgaagttggaaagctcggtttccagttacacggcttggttaatacgcacggcgagaactcttacatgaccagatcttacatggtctttcgtctctgaaggatctgacaaggccttatcggctttgggcgtccccagccgaagatcccttaggttccttggaggccttgtcgagacggcgtaaagggtcctaaggataggtttcaacgctaggtattatcagagtaagggatcatcgggtgaaaacactttggtcgtggtatgaagcctagaaataggctttattgatactgtaagggtgcttacaggtacggcgttattgactcatacatagaatttacgtagttggtcaatgttccacaaatttgctaattcgcggccgtcgccgtctgcgattttgaatgcacctggccgcaagacttgtgtgattgtgtagggtccttcccattttggtgagagtttgtttcgtcctgcttggctttgaactcgtcggaggacatagtcgccgatcgaaagtatgcgtgctcggatgcgcttctcgtgataacggcagagggcttgttgataactagctgctcggacggcaactcgctcacgatgctcctcgagaaggtttacatcgatgtctcgctgttcctcctggttctcgtcgaaatgcttctgtactcgtgtactttgatgtcgtaactcgctagggagcatggcctcagagccatacacgaggaagaagggtgtttccttgttggatgttgtcggtgtggtgcgtacgacccatagtactgatgggagttcttcaacccattttttgtcatgtgacatgagtttgtcgtagacgcgggtttttatcccttgtagtactatgccgtttgccctttcgacttgtccattgctttgagggtgagagaccgaggcgaaacatattttgactcccaaaccgatgcagtaatcctggaagtcggcgctgatgaattgagagccgttgtcagttatgatgcggtgcggtagtccgtatctgcagaatatccctcttcgaacttaatggcgttgtcggccttgatttccccagtgggtagtgcttcgatccatttggtgaatttgtcgattgccacaaataggaatctatagccaccctgtcctcgtgggaatggcccaagtatatctagcccccagcacaagaacggccaagtcagagggattgtctggagcgcttgtgcaggtagctttgtgtgcttgctgtggaattgacaggcttcacatcgctggaccatatcgcatgcatctttaagggcggttggccagaaaaacccttgtcgaaaggccttgccgactaatgtccgactggcggcatgtgacccgcatatgccttcatgtatgtcgaggaggagttgtctgccgtcgtcggtagagacgtatttgagaagtatcccgtttggcgcttttttgtataaatcgttaccgaccatacagtagatctttgctttacgggttattttctcggtctctgtatcgtcctcgggcaattcctcgctgctgatgaatttgattaatggggtgcgccagtcgtctgtggtttcgatgtcagcaacggcgcgttctgcctcggtgtccttcgagctaatgtcgggggtgctcgggccagattcaccgttaacttctttcaccgatggcttcatcaggacgtcgagaaaggtgccggtgtcgagcggttctcgtctggatgcgcatcatgctaggtcgtctggctcgacgttgtccttgcggtagacgtgtcggacctcgatcccgtcgaacctcttctctagcttcctgacctctgcaagatacttggataactcggggttggagcatttgtagtcattgtgcacctggtttgcgactagctcagagtcccctttgacgattagtcgcttggccccaagtgcggctgcagctcgtatcccagcgagtagtccttcgtattctgctttattattggttgccctgaagttgaggtggattgcgtgcttgaattgatcttcggagggtgatgtcaagataaatcctgcccccgctccttggctgttgagtgcgccatcgaacgccattatccatgtctcattgtcgccttggttgtctgacttgttatctggcatggtccaatcggccatgaagtcggtgagtacatgagatttgatggctgttcgcggcacaaagtggatatcaaattggcttagctcgactacccatttcgcgatgcggccgacaacgtctttgtttctcacaacttcgccaagggggaaggaggggacaactgtgactctgtgggcttgaaagtagtggcgtagcttccttgatgtcatgatgactgcgtagagcagtttttgaatctgtgggtatcttgtctttgcatcatggagagcttcgctgacgtaataaactggtcgctgtactttctctctctcgactacaatgacagtgctaacggaatatggcgtggcggcaatataaaggaataattcttcattaggttggggagcaacgagtacaggtgggtttgataggtagcgcttgagtgcaataaattcctcttcggcttcctgtgtccatacaaatttgtcttgtttcttcaacaaagagaagaaaggctgtcctcgttctccgatcctagcgacgaatctgcttaatgctgccatgcatccggttagcttttgtacctccttaagtcttgtgggcgacttcatgttctcgattgctttgatcttctcgggatttgcctctattcctctgccagaaacaaggaatccgagtagcttgcccgacggtactccgaatgtgcacttctctggattgagcatgaggcgatatcgtcggaggttgtcaaacgtttcccgcaggtcgtcaattaatgagtcgcttgtcttggtcttgacaatgatgtcgtcaacgtaagcctcgacattgttgccaagctggttgctaagtgcgccctggaccgtgcgctggaaagtattcccggcggttatcagtccgaaaggcatcttaacgtagcaaaataccccgaacggtgtgatgaacgctgtcttctcctcgtccttttttgccatgctgatttggtggtagccaaagtaagcattgaggaagcttaatagctcgcaaccggctgttgaatccaccaactgatcaattcgagggagaggaaagtgatccttggggcacgccttgttgaggtctgtgaagtcgacacacattctccattttccgttggccttccgcaccatgattgggttggctagccactctggatgaagtacttctctgatgaagccagctttgagaagtttgtcgagttcttctcgtatggcttattttcagtctggtgcaaatctccgcagtctttactttactggcttggcatcgtgtcgcaccatgagtttgtgctcaatcacctccctggggacccccggcatgtcggacgggcgccaagcaaacacgtcgacattatcgcggaggaaggtgatgagcgcgagttcctatttctcatctagtgtagccccgattttgatagtcttgtcggggttagcctgttgagcggaatgatcttgatggcgccgtccggcttcggcgtcttgtttggcttgctcactttcttgggtggctcagacgtggcgggtggggtgggcgtttgctcgaccatgtcgaggctccgcctgtcgcactgcaccgccagctttgcattcccctgaatagtgattgttcccttcggtcccggcatcttgagcacttgatatgcatagtgggatgcggccatgaacttcgcaagtgcagttctcccgatgatggcgttgtaagctgtatcgaattcagcgacatcgaaagtgatctgctctgttcggaagttgttggcttggtcgaaagtcacgggcaacgtaatcttgcccagaggtctggacgatgattggggagtaattccatggaagggttgatcggttggtgtcaactcactttgtggaattcccattgcatccagagtgctggcgaagaggagattgatcgagctgccaccgtcgatgagaactcgcgctaccttgacgttccgaatagtgggttcgaccacaatcggatatcgtcctgggataacagatgtcttggggtggtcttcttccgagaactctattctctgctcagaccacttcatcttgggtgcagcctcctaccacgtcgaacagacttcacgttccactttcttgtattcccgcttggaggagtatgttgtggagccgctgaagatgtgtgagacgtggaggtcggagcctgggtacgcaggatccgattcgtgaggaggtgtctcctcgttcttctcgacaacgcgtactcgcttgcttttttgaaacgccatgtgcttctcgagcgactttttgaaaacaaggcaatcctccagagaatgtctgtccgttttgtgtatggggcaccatgatttctttgtatcgctgccttgtgggtctgggcgcttgggagggttcgcgtattctgctgcgaggacttccgcttaagctttccttttcccgtttttgcgatttttcttcttattcgactcagatgcgtctgcggctggtttcttctctcccccagtcttcggcttgtcgttcttgcgtcttagcgcgtcatccacatgggcgcaccgctcaacgatctcgaataatcttcgggtagttgtgatgcgtcttgtcaccaactcctgggtagtgtagcgatctctgacaccggacttgacttgaaggcgcgagttacagaagcgtcggtaatttcgggaattgtgtttctgcactcgttgaagcgccgaacgtattccctcaatgattcccccgagttctgtgttaacgcgtgtaagtcgtcttcgatcgcgtggcgcttgtatgttccttggaaattggcgacgaactgttgccacaggtctgcccacgaagagattgagtaggggggaagatgcatcagccatgtacgtacagaacccttcaacgcagttggtaaatagttcgccaacgcgttgtcatctgctctggcagcataaaacactatcgagtagacttgaaggaattcttctgggtcggtgctcccatcatacttttcaatggccccgggtcggaatctctcaggccatcggacatcacgttgggaacgaccgaaagccctacacccagcactaggggcggtgggttgtcggcggtcgcatgaccttcgtggatgtctgtctgacgatgaagaggacgcggatgatgacgatgacgatgggtcgcttggctccggcgtacgattacgaggatgacgacctggatcccgggaatcttgtcgttgtctctcgctattatctcggcgccgatctccttcgtcgtcgtcgttgcgacgacggccatgaccagtattgtttggcccccgccgttcgcgatcgttgcattctgggtcctcgtttgggcggtttcctcgatcatggcgccgtgaagaaacatgacgccgagagcgatttgcgtcgtcccgtgtgcgccgtgcttctcggcggttgttaatttgatctcgaagatcgctagtgccacgaggtggaggggtagcctgtcgaggcaattccctccgctccggatcttcaccattggcgtcgccggttggtggctgatcttggtgtgctgcggtagcggcctcttcgaacgcattgctgaggttggtcaccgactcccgtaatcgttctgtccaacgctcgaggtcgtcgttcagaacaggatcgtaaggagtttccctcagtatagcttgaatagccctgatgtgctgggccggagtagtcgattgattcgccgcttctgcgttggcttgtgctgatgtgccaacgtcatcgataactaatacttcccatggcgcacttgttgttgatgacccgtagtcttcgaggagatgtaagaccgatggttcgtgaggatcgagatcgattaccccaacgaatcgatctgaggctggagtcgctccctgttccttgccgttatccctagcggggacgtatgacttaggagacagggttttcatggcgccgaggaggactttgcagctcgagagatcgtgattctttgtcttgtggataggacaatagacatcccgagttggagaaatacactgaattccacgttccttgtaggcgcgaatttcagcacggacgttgatgaatacccagcaatcttgaagggtatgtttcttggttttgtggataggacaccagaagtcatctttgtcggcccgtgatttatgtcggagggacaagatttggccgcatcagaatccgtctcgagtttggatgtagtcggtaatccgttctccgtttcaacgggtggatttttcgacatggagccgtcttggttcgtagccactacgttctcgttttcagtcattggaggaccggttgagatcggcgtcatggtgtaaaccgggaagacgatttcgccgacatgagtccataccagcattgttgaagttgagagtgcttggctggagctggtgttgatgttgttgtcgacgaagcttgatggcatagtagtagaaccttgagtaccaagtccccctacctggcgcgccactgtcgacgggtgatacccgtagaccggatatagagggtattggggtacgctggtacaaggatctacgtaatacgacatcgagcaatcaaaagacaagaattatactggtttaggccccttgacaggtaatagccctaatccaattgatgtgggattatacggtggaaaacataggttacaaaggaaaggatggaacttgtcagatccggcgagattgtagtcgagctcattcgactagctcttgacgacttggctcctcgcaggctctgacttcgtaggctgtgtgggttatgttggcactgagattcgatgatctatgccctccctggggggtcccttttatatcgcaggtctggtgctctccgagtgggactcgaacataccagacctagcacgatacgtaggtgacccagttcttgtccgagaaggacttttcccatctattgatctcgtgaaaggtttccttagatcataaaggaaatatccgcgtgcgcgtgggtatgccatgtcgatacgtaacgtatatcgaagggtagggggtatgcctaacccgtaaccctgacactccttaaagaggatgtgcccaatcacgttctcaacataatcaatcagacaaagacaatgatcgccgcatcagttccagtcaacctggaaagcattcgggtgccaactggcagtcgggttccatccctccaatctgaagattaccatcaaccaagtctcagcatcgcggggtcaagatccaatcacggggggtcatggtctgctcacgggggcagggatcatcatgaacatttagttcattcgccagccgataggcacagagagtgacgcgctgagcagcctcacttgccatgtcgctggcaacccattgacctacgtgacacacttaaccgctgctgtgcagaaagaggtgatcggcggcatcgaaccctggactgctacgaatatgatgaagatggagtcgcagctttcacaagcgacctgcgtcgagtggattggccggctggttttaagccgactggcatcgagaagtatgacgaaaaaatagatcctgaaccatggctcactgtctacggtctcacaatccgcgcagtaggagaagatagcaaggcaatgccaaattatttaccagtggccctagctgactctgctcgatcctggcttcatgggttaccacgaggcaccataggatcttgggcggagctccgagatcacttcatcgccaactttcaaggcaccttcgagcgtcccggcacatgttttgaactctataacgtggtccagaagcccggtgaaacccttcgggaatatattcgatgcttttctgaacaacgcaacaagatctctgatatcacagatgatgccatcatagccgcattcacaaaaggagttcgtaatgaccttctagtcggcaagtttggatgcaagcctcccaggatagtcaagcaaatgtttgagaaggccaatgagtatgcaaaggctgacgaagccgttcttgcttccaaccagtcgggcagccactagaaatccaagaaagatggaccaaccgtaggggcgagtggaagcggcactcataacaaagatcacaagcggaagcccgaggatctggtggcgactacaacacattcttcccgtcaacaatcgcgagtcaacaccttcgacaaaattatgaatgctcaatgttcgcatcacccaaattccaaccatgctgccaaagattgtttcatctataatcagtttgccgaacaatatgccaaacaagcgaagaagctgactgatggagagcaaagcacctcgaagaaaaaggacgacgatgacgatggcccacctggttttcaagattctcgtaaggagctcaatcacatcttggttgggccgcaagcctatgagtccaaacggaagcagaagctaactgataaggagatcaataccgttcagtcggacacacctcaataccttcgggtggtcggagatagcaattaagtttgactactcgaatcaccctgactgtcacaccctaaaaatcccaaatgtataaattgttgtttaattggaattattagaaataattttaaaagcctagaagagaagatctaattttaaataataaattccaatataaaagtgggccagataaaattttattaaatacttcacttgattctatagttcctagatttttctgggatttatttgagccaaggaagcatttttaataaatggaattgcatttcatgaataatttaaattgaaaaaggttttaaaagtctccttttggctttgggccgaaagtcggcccaaaagctctctctctctctctctctctctctttccccagcccagtcagcccacgcgcgtgcgccctcgcccgctgtaaggtggggccgacttgtcggactcgtcttcctcctcgcgccgccgtgccctagccacgccgcgcgtagccgccgccgcccttccaattcgatcgcgtctttccttctccggtgaaatcaatagaggggaaatgatcgccttgatctcctctatcttttctcttttggaatcatcggctaatttcttttggaaattggtggattcgagttcgattcggatcaatctctctctcccgaaccctaactttccatcgccgtcgcccgttgccgtggtccttcgtcgccgccctttagccgctataaaaggaccgccgagccctccgctacccaccgctaccttcgccttcgtctctcgtcgctggtagagccctagcgccgtgtagcttagcgccgccgtcgccgccgttcgtacagccgtgcgtcgccgccgctccggtcgtcgtcgtcgctcgggaaggccgccgtcgtgatcgccaagccgtcgcctacctcgtccacccctccgtcatcgccgtaggtcaccggagcaccgccgtcgtcgtcaagccgaaggtcgccgccacttcttcctcgccgccgtcgccgtctgttgatcttccgtcgctgctttggtccctggtgagttcgccgtgtcgtccgcaacccgtaggtgccgtccgttcgcgccgccgcgccgtcgttcaccggcgagcatgcgtcgtccgagccgtcgccggtgatgacgtcaccgctgacgtcattgtcgccgtgtctcgtgaaccgccgtagactagatcgatctcgaccgtccgatttggttagagtgatctcggccgttcgtttccgtagaccgccgccgtgcacccggtccaccgtgaaccctagccgctgacgcaataatcccctttttcttttcaaaaataattcattattgcgtcataattcaattgatatctatataaatggtttaatctgatttaatctttaaaaattcataactaattcatcttagctcggatttagttggttcaagtctctaaatttttctaaaattgagatctacatgttaaaaatatccacatgtactgttcatgcttgtttatgtgctgttttggtgattttgctcttttctctttagattccgacgttcccggagagtccgattttgcaggagaagactttgaagagttccaaggccagcaaggcaagtcacacagatcccaaacaaccctttgagcatgttgatcccgtttaaagctattgtttctattcaactattgcatttattttcgaatgtcattgggtggatataacctattgcctttgttatagcctttttatgttgattacctattctttgtcacctagttaataattggattagctagaacattatatggttttagctaaagtgattaggatgcttagccatgcttagagacactagctcatataaatgggataacttatgattcactattatttaatgatggcttaatgatagctcacgatggttgatcgtgattggttaattaattaatttgccaactaaaacttgataatggtgggttgtgagcacatggttttgatggtcgtgctcatgacaattaaggaccggttcacgattttcggttgtgaaacattaatcgtgcgaaccacaagccagcgtgggcaacggctttactttctgtatagtgtggttcattgtagagcaccagactgtgaagtggcggagataagcccacgggggtcgctggggagtccatgccttgtttataagggggtgattatgatccaggaacggtgcactgctttgaattgtgttatgcaggaggtattgtcacaatctctattcgggtacttgtcaagtatcgcgacgcatggttgacatgatgttgaggttgtgtcttgtgggtacagtggtacacctctgatcagagtttaaactattcgaatagccgtgcccgcggttatgggcgggtctaacaatgtctttcgtgattagtctcacacttctcactatattaaatgatgatgttaataacttgtttagctcctggtttggaatggtatattcctggtttggagatagaactgtgcagccgggattggttgttcagaatggttgggcctatgcaacacgggtgtattgtatagtgttgatttaatattgtttaattactcaactgttttactattctctcaattgcttattaaatgctgtttatgcaaatgagcccatattatgccatccttcgttatccattgcacttgcatatttgttgcgtggcttgctgagtatgtcatatactcaccttgcagtcattcatcagaggaggagttctacagtgatgctgatggtgtggatgattaggcgtagccctggtcaagctgcctgtggagaggagtcgcctgtgctgtttcttttattttccgctgcttagaactttgttgtttgagaggaactatctacctctgtaatgactttatattcgcttattaattagagtaataattgtactctattatcaatttgttattgtgtgcctcggctgatttctggacgagggtttacacacatgtaagcgtttggaattttggatagaaattccgggcgtgacactgaccgagtggtccacccagggtggtaccccctggtactagacctagtggttcgcaacatcaaacttcggttatccctcatcgatggtggcagtgcactcaatattctttttgccaagactctggacgagatgcaaatcccacgaaccgagttgaaaccgagtggtgcgcccttccatggagtcatcccggggttgtcttcaaccccactcggccagatcaccttgccagttacttttggcactcgggagaacttccgtacagagaacgtttgtttcgaagttgctgactttgagacagcgtaccatgctatacttggacgcccggcgttagccaaatttatggttgtcccacactacacctacttgatgatgaatatgccagggcctcgtggagtcatatctttgcgaagcgacatcaagaaagctgtcacctacgacaaggaaagctgcgagatggcccagactcatgagattacacttgcccatgaatcaatccgactggctgcatcaactacgaccgaaggagtagtgcctgcaactaacatgccaaagaccgaagaaggcgatgtcaaaactaagaagattcctcttgatccatccgatctctccaaaactactgtaatagacgcagagttagattgtaaataggaaagcacgctcatcacctttcttcaagctaataaagatatttttgcatggaaaccatctgatatgcctggtatcgctagagaggtgattgagcactccttaaatgttaaagatgacactatgcctatcaagcaacgactctgctgattttcttaggacaggaaggatgcaatcaacgaagaactgaccaagcttttagcagcatgcttcatcaaagaagtcttacatcccaactggctagcaaacccagtcttagttcggaagaaaacaggacaatgacgcatgtgtgttgactacacggatctcaacaaatcatttcctaaagatccttttgggtcagctttttggattgctactcgggatatcaccatatcaacctaaaggaatccgactgcttgaaggcctcatttattacaccgtttggagcttactgctatattactatgcccttcgggttgaagaatgctggagcaacttatcagcgtatgatccagagatgcttttcaacatagatcggtcgcaatgtagaagcctatgttgatgatgttgtagttaagactaagcagaaggctgatttgattgctgatttggaggaaaccttttgctagcattagtgcttttaggatgaaattgaaccctgaaaagtgcaccttcggagtactgtcagggaagctacttggctttatggtgtctcataggggcatacaagccaacccggagaagatcaatgccatcctcaacatgaaaccgcctagctcccagaaagatattcagaaactgactgggtgcatggcggcgcttagccggtttatttcaagatgtggcgagcgggggatgcctattttcaagctactcaagaagactgataatttctagtggggtcccgaaacccagcaagcccttgatgatttcaagagactcctcacgactccaccagtcctagcttcatcacatccgcaagaaccattgctattatatgtgtcagcaacatcgcaggtggtaagcatggttttggttgtcgagcgagaataggagggccatgttcaaaaagttcaacgaccaatttacttcgttagcaaggtcttggccgactccaaaacaagatatccctaggtagaaaagttattatatggtgttttaattaccgtcaggaaattgtcctattattttcaaagtcactcggtcacagtagtcacatcttttccactcggcgacatactccataatcgagaggcaactggacgtattgcgaagtgggctttggagttgatgtctttggatctatccttcaagccacgaacgtcaatcaagtatcaagccctggcagattttgttgccgagtggaccgagtgtcaggaagatacacttggggagaaattggagtattggactatgcattttgacgggtcaaaaagactctcgggcactggagcaagggttgttatgttttccccgactagagagaggttaagctacgtgctatggatacactttcaagcatctcacaatgtggcagaatatgaagcgctactccatgggctgaagattgttgtatctctagggattcagcgtctggtggtccgtggtgattctcagttggttatcaatcaagtcatgaaggattggtcctgtcttgatgacaatatggctgcatatcgacaagaagttcgtaaattgtaagacaagtttgatggtctggagttaactcacgtgcttaggcaccacaatgaagcagccgacaggctagctaatttcggatctaaacgggaagcatctccttctaatgtctttgttgaacatctctatgagccgacattatcaaagaaggataaaactgaagatgaagagaccaatgaagtagggatgattgatgtcgagtggagagagccaatcatcaaatttttaactcagcaagagttacctcaagacaagaatgaagcggaatggatttcttgatgtagtaagctttatgtcatggttgaagctgagttatacaaaaagagcccatctggaattctacagtgatgtgtttctcttgaggaaggcaggcaattgttgcatgatatccattatggaatttgtgggagtcacgcggcagcacaaaccatagttggcaaagcatatcggcagggttttttctggcccacaacggtgtctgatgctgagaaggttgtgtgaacgtgtgaaggttgtcaattttttaccaggctagttcatctgccagctcaagagttgcaaaccatccctctttcctggccttttgctatttgggggctcgatatggttggtcctttcaagagggctaccggaggatttactcacctttttgtggttgttgataagttccccaagtggattgaagcgaaaccagtcgttactattacagctgacgaagctcacgatttctttatcaacattgtgcatcggtttggagtacctaatcgaatcattacagataatagtacccaattcactggtggggtttttaaagatttctgtgaagactttggtattcagatttattatgcttccatagcgcatcctatgagcaatggtcaagttgattgcgccaatggtatggtacttcaaggaattaagacactggtttttgaccgacttcgtccctatgctggcaaatgggttgaacaattgtcgtcggtgctttggtctctgcgcactacgcctagtcgggctacgggccagtcgccgtttttcttggtttatggtgctgaagcaatgttgccgagtgaagtggagtttgaatccatgagatttcacaattttaaagaggagcgctatgagaaagaccgagtggatgatctcaaccaactagaagaagctagcgaggcagcattaatccagtcggcctgttatttacaaggacttcggcgttaccataatcgcaatgtcagatcacacgcatttttagtcagggatatggtgttgaggaagattcaaactatacgggatcggcataagttatctcctttatgggaagggccttttatcatctctgaagttactcggccgggttcttatcgactcaagcgtgaagatggttcggtcgtcgataattcttggaatattgagcatctttgtcgtttttatgcttaggcattatttttgtacattatgtttctcttgactgccaacatcaagtatttcttgagttaccagtcgggggctataataataataatggagtgtgatttttatcaattcaatttgcctacttgatttatcattgccctgtttgatttttagcttagtcaataaggactgaaagttttttgacgacttttgcgggttctaggctcagtaaagtttgacaaacacttttaagaaatcagaaactaagtttaaattttcaagcacaacataaatatatcagtactacacaattgaacctccattgtcagtattacatgatcactcgtcagagtcatcttctccatcatcagagttagcaggactaaggctagtgttctgaaacctatctagtacatcaacagcaattctttcagcagttttttgggcatcattaatcagatcatgtgcgtcttcttcacttgtgccagctgcaaagccatcaatagcatcgacattgattttggggtacagagacttggtcattgccaatgccatgcttgctcccatatttccagcctccttgatatttttgaagtacacatctagagcagtccttaacttatcaaaaatttctactgtgtccaaggagctcgtaccactattgctcaaatacatggcctagataattggggtagcagtgttggcaacttcgcctctagcttttttagcaacttcgactttgttgatcaagaagtcgaattgtgcctttgtcttccccttatgatctgcatacaacaccaatcaaggaatttagatgcaacagtattggctaaatttcatttatagttagtcagaagagttaccttcaaattctttgaccgccaaatctttctccttgggtagagcagcttcgtcttctaaggctttgattcgcttttccagttcggagattttggctgcttgaactgtagtgcacacaaaacttatacagttgctaagattaagtttgaacagttgagcaggaataatatttacctttcgaggaaccactcaattcaaagttggcatcctggagctcggcaatcctatccctaagttcatgttctgtattcctggcctcctccttggtttcatgcagtttggctctggtttcttccagagtaccaagatgagggaccagcttttcaagggtatcggtttttgcctcgttccgaagatggattctctgcgcaatactatgttcacctcaacaaattcaatggatgacgaaatatgactggggcagtatacttacgtttaaaagacgagtagcctggttgagagtccttgtcagcagagccacttcaccgtcctctttttgcttgtttatcacaataccctgtggctgcatctcgtcgtcccaccatttaaccaaaataggtggccgagaatcttcagttgatttaatccgaagaatttcttcttcgtcgccaatcattgggccttcaagtatataggcagcaatgaaataataagggaagtttttcttgacataagttcactggagaaagcattacctgtgataattgtcggtggtggccgagcaggtccctccaccttgtcaaaggtactagcttcaggtccagcatctgtatcttggttcagaggaggtctgctggtctgctcttccgtctcaggaatatttttttccccatctacattttgctgctggggattctctttatcctcacccggctggtttccagtcgggggctcctggctggtgctcgcctcggcagatgccgattggtttccagtcgggggctcgttgtcagcttcagtttcaccagttgccgactgactgctagtcggtggattttctttggaggtattagtcccggcaacagcagcagagctagtcttttcttcttcagccgctcccgagctagtagagggatcagagtttttaccagtcggatcaatgtccgatggtttcctaaggtacaagagggtattaccaattgatctcaacaaacacagatccgaatgttttgatgaactcatacctggaagatcttcggatttttggcattgggtgactggttgttttcttcttcggtggaatagccttttttggctgcttgccaactggcccatcgtcactatcgtcatcatcgcttacgatcatcttcctttttcgagaaaccgtttgactgggcggaatagcatctcttttgggccacgggttgaatctttggacccccggtagcttggccttggtgatgccacggagaacgacgttgagcggttggagggtcggatttcattagggcatttccctatggataagcaattttgagattattcccaagaatagcatgataaaagtccaagcatttagatatttaccgctggaggaggattgaaggcgttgtatggcacgatcggcagcaaatgtgagaagctgaccacaataccagatgagaagattttatacatcctctccttcatgatcttgaattcgagggagttggggtcttctcggttgggatcagtctttccgtcgtactcgaaggccgtgcgagatctctctttgattggagccagtcgacactttatgaagtgctgagtaatctgctcttcttgaaggccttgttcctttagcctcagcagtcggtccagcaactcaagagcttgagaagcttcatcgcccataggaagtgagttctagatgtcttgatatttcagagggcagcatgaatattcgtgtagcgcaggatctggcttttggatgtaaaaccagctagcatgccagcccttattggaggttttgaagggaagagtgaagtacttctggcatagggtgccacgaagctggaagccggatcccccaacgatgcagggcttgttcttattcggttggggtttcagaaaaaagattcggcaaaataaggcgaagtttggccaaatgcccaaaaaaacttcacaaagatggatgaaatttgctatatgaacaatggagtagaggttgaggtgatagatattgatcctataaaattcaaggattcccctaaagaatctggatgttggaagagcaaaaccaccatagaagaaatgggtgaagacgacaatctcgtgagtatcgggggtcggaaaagcctcaccaaatgctggatgccatccgatgttctccttggctggtaacaccccgtgcgccatcatctccttgagggtttcctctatgacgtcagaaggcacccattgactctcaaaattttctctctcttccgccatggatgaaaatggggtggagagatttagagcacgaagattgacagggaaattgggggcaggggttgtgcggaggaattttgccgaaggaagctgatttgaaggaggtggattgcggtacagttgcgaaccctagcttttggcggcgcaagcctgttactgtagcaaaaaatggggaacgcgcggctgttgtggcgaggaagacgatggggtttccttcggtgcgatttttatcgatgggtatcggaaaatgctaatgggcctaggcccaaacagtgttttcagctcaaatacactctcggtgtggctgattgtggtctcttgggacttaggcgtatttttgctcaggcaaaattgcccataataaataaagcccgataccattaaaatcctttttccgcagttagtaaatttcttggaattactacgatgcatacaaaaaggtgcccaacagttaaaaacgccatgttatttttgttgactttttctataaggtcacaaagctattagggtttaatcaggacgagtggtttttaaagctgttgttccttctgagcacttatatgcttcatttttctgatataggctcaagttacaacttaggttggttaaacttgtcggtcagtatttattcagcagttgataaatccttatgagtttttactcggattttttatcacaaatgatgtatttagctctgaaatagacgatagatctttagaatgcttttatcactcggatctttatatatcttctatgtttcatagtgagcttaatgatttaattaaatcagttggcaaactcttcgaatggagtcacatatgtttaatatttaattacttcggtaatattatttataaaaccactcggatggttatttgtttcaaccttcactatatgttcactatatgtttagtcggggtgcatctaatcaatgcacctaattttttattttttagctcttcacagcctttgattcaagcactcgggaggccaaggcggcaataattgaagcactcaggatttttgtttaatggctcgggagaagattatctcgtcgactgcgaaggtctcaggggctactgtggagattatggataccccatacccacacggcatgtatatccgactgggtataggggtaccatgtacatatagaataaatttagtaaaggacccggttgttatgttaacttgtgtatcaaggaaacatccgatagtcctagtcggttatgattgtaatttatctttacatgcctagtacgttaggaacatgggctgtatcttgtaattccggctcctccccctatataaggaggggtccggatgcctctaggggcataacttttctcgttgatcatatgatcaataatacactcggcggatcaatccctggataggagtagggtattaattctcatcaagaaggcctgaacctatataaacctcgtgtctcctaacctatccacttttccagcttgatagccactgtaagttcaagtgccttaatttggttttggtgattaatgacaaatctaattaaatgagactaacggttttatgagcttttctttgactagactcattttgatatgaaaataaaaatgatgagatgtatgtattatactttatatattctaacttggtctctcttgtggatccaaaatatagtgtaagctccctcattaatctcgattgattatgtgcatatgtgttcctttatatccatatatatgcacatcttgagggggagcttattctatattttgtttattataagatttctacctttgatttgaaatcatctttcatcttatctctctatattgtttatatcgggttattatctatcacagaagagagaaaagattgaaagatcttggattaaacaatttgtgtaattgttgctttggtgatagatgataaaccgatatttatgggattaacctctcttttacataagttgtcaactaggttatttcccgataatgagatgtggtagatagaccttaatcatgacaaggatgaaatgcatggagaaaaagcaatatgtatcacttcttatctcctactttttgataggttcatatatatgatttccatgttattgttatataagtgtgagactaatgtttacttgagcattatcttatttagtctcctttactttgagaacatggagatcataaaggtttgtgtttttgtttgtcttgtcattgctatatgcattctccatgtgtataggataaaccccattagttcttctttacttatacatatacacttgcctctcttgtatatgattccgaaaatgattgcgaaggcaaaagtggttctgtatattttcggacttgtccgaaacagatttttggattttccgaaaatcatcagtagagtcaatttcgcttcggtatattttcggacttgtccgaaagttattttcggacttttccgagaacatccagaacgatgttgttggtactggaaattttcggacttgtccaaaaagtttttggaatgtctgaaaaatccttcgttgaccaaactattggtgctgagctggaattttcggacatgtccgaaaatctttcggaatatccgaaaatctcaattattgtgcataacgggcagaatctgggctgtggctataaatagccccctcccctcacttgtgaggtctgctggttccattccaatcatttgtgcccttggcttgctctctctctctctagcacttttgagccttgctttcttgtttcccctctcacccgtgttcgatttggatttggtgtgtgtgtgagagttgtggattcgagtttgtatgagtgcttgttattgacttcgtgaagatttgtgagcacttgcatcatctccgggagttctttgcttcatttgttactcttggaggttgaggactcctaggcggctaggtgttgctcccgagccactgatctacttgtggttggccaggagaagtttgtgaaggtcggatctcacctccgaaagggaagagatacccttagtggaaggaggagtgcttagtgcaacctcttgaggaaaggattagctaagacccggctcttagtgagctcctcaacggagagtagaatccccttaaggattcgaacttcgggaacaacctcgtgagcttcatctttggtgactttacttcctccctctccactagctttgcttgttcgagctgcaataggtctagttgctgtttgtgctagcatattcttgttgtaggcagctagatctaggatttactttgctatttgtgctgactccaaaaatttttggttatatccgaaaatttcggaaatatccgaaaattactgcttccgcttttaattgatttttgaattagcgtattcacccccctctaggcctaattgacactttcaattggtatcagagcctaatctcctaattagacttaaccgcttggagagatcatgtcgggccaagcgggggatgggaacgatggtgataagggagctaagatcccttatgactatccctctacatctacatcttatgtgagtacctatagcggcaaagctccgtacttcaatggtacggactatgccgcttggaagcataagatgaagatgcatttgaagtctattaacccatctatttggagaatagtcaaaaaaggctatgttttgcagaatcccgaagatcccaccaaggaggacgacgagaacgagcacaagaacgctcaagccgctaatgcaatacttagcgccttgagtggaagtgagttcaaccgtgtggatggcattgagagtgccaaagtgatttgggacacgcttcggaacttgcatgaaggcacggatagtgttcgtgagtccaaggtggagatcctcaaggggcaatttgagagatctgtgatgttagatggtgagagcccaagcgacatgtacgaccggttgagcaagatcatcaatgagatcaagggacttggctccaaggacatgaccgatgaggttgtggtcaagaagatggttcgagcaatcactccaaggaactctaccttgagcgtccggactacaagactctcacacctcatgatttgctcggatgcatccttgcccttgacatgctcgtgcaagagtccaaggatgtcatccaatacatcaaccaaagctcaaccgcaagcatcaagaaggaagacttagctttgaaggcaaaggaagaagaagaagagaatcgcaagagcaagagcaaggcggagatcgatgatgaagagatggctcccttcgtcaagaagttcggcaagttcatgaggcgaagcggcttcttcaagggaggatcttccaagcactactccaacaagtcaagtggaagacactccgcaagagtgtgctacgtgtgcaaagagcccgggcacttcattgcggattgcccccacctcaaggatggttcccacatcaaggaagataagaagaaggatgagaagaaggagaagcacaagcatagcaagagggaacattatggccaagctcaccttgggatgatcttcggctccgactccgagtcaagctcaagtgatgaagaaggagtcgccacgtttgccgtcaagccctcatcaccaccgagactcttcgactactcaagtgatgaggatgctccggtttgtctcatggcaaaggagcctaaggtaccttctcttcttaagtcatttaatgttgatcttgttagtgatgaggaggatgaggttgaggatgaggttatagatgacgaattgttcaagtccataactaaggaatccctaccacacttgagtgagttgcttgagagaattgaggaccaatatgcaactcttgagaggcaagagactttgctcattcgtgagaaagagcggtctcatgaactcaagagtgagcttgctaaggagagagagaaaaatgaggcattggtacggctttacaagcaaatcaaagagtctcatgctaatcttgaggtggcgaacgctcaactttaagagagagtggatggcttggacaaagcatacctcactcttgaagagaacttcgtaaccttaaagaatagtgtctctctccctagcgagccatcttgttccaaaattgtcccaagcaatgaaccatgtgtgagatgcaatgatattgatattgaagcttgtgctactaactctatttccttgagtgctttgcaaaagaaaaatgagaagcttatgggactccttcacaatggcctacttaagtgccatatgggtagtaaggccctaaaggagtacctaggctatcaaaagggacaacttcaaccatgagggtcttgggtatgtttctccaccaaaaggaaaggtggacaagagtgtgatgatcaagaggccccaaggtcttagcaattttgttaaggccaaaagtatccttcctaatgattatgcttcatattgttcttttgatgtatcttatgttcttaggaagaatgctagtggtcgtgttgttgctaagtatgtaggcccaaggggcaagaatatttctatcaagagagtactttgggtgcctaaggcacttgttactaacatgagaggacccaagcaagtatgggtacctaaaattagaaattgatctcttgtaggaatatgtctccggtggaagaagttgggtaattgatagtggatgcacaaatcacatgaccagagaagaatcaatgttttcaactcttgatccaaatggcacttcacaagataacatagttttcggggacgatggaaagggaaaggttatgggattgggtaagattgcaatttctaatgatctttccattgccaacattctcttggtaaaatctctaaactacaatcttttgtccgtttctcaattatgttctatgggttataattgtctttttaccgatgttgatgtgaccgtctatagaaggaatgattcctcggtagtctttaagggtgtcctcaagggaaagctttaccttgtggatttttcctcaagtaaagccaaacatgagacatgcttagtggctaagtccaacacggggtggctttggcatcagaggctagcccatgttggtatgaggaatcttcacaagcttctaaagcacgatcacatccttggactaacaaatgttcaatttgagaaagatagggtgtgtagcgcatgtcaagccggcaaacaaattggagcacatcaccccgtcaagaatgtgatgaccactacaagaccattggtgcttctccacatggacctcttcggaccaattgcttatctaagcattggaggtaacaaatatggtcttgttattgttgatgacttttcacgcttcacgtgggtgttctttttgcatgacaagagtgagacacaagctatcttcaagaagtttgcaagaagagcacaaaacgagttcgacctcaagatcaagaacattcgaagtgacaacagcaaggagtttaagaacacgtgcatcgagagtttccttgatgaagaaggcatcaagcacgagttctcggctgcatattcacctcaacaaaatggagtagctgagaggaagaataggactctcaatgagatggcgaggaccatgttggatgagtacaagacatcggacaatttttgggccgaagccgtcaacaccgcatgccataccatcaactgcctttatcttcaccgccttcttaagaagactccctatgagcttcttaccggtaataaaccaaatgtctcttactttcgtgttttcggtagtaagtgttacattcttaataagaaggctagatcctctaagttcgctcctaaagtggatgagggattcttgcttgggtatgggtcaaatgaatgcgcataccgcgttttcaacaaaacctctagtattgttgagattgcgcgtgatgtgacatttgacaaaattaatggctctcaagtatccgagcgaagcaatcaaaagattggctcttggggacgtacgtcctaggaagccccaacaaggagcctcttccttaacacaagtggagccacctacatcaacccaagccgacgatccctctatctcaagcttggatcaaggtgaagaaggcgagcaagtgccaccctcaccgatcaacttagctcgcccaagaatccaccaaagtatccaaagagatcatcctaccgacaacatcttaggagacatcaacaagggagtatccactcgttctcgtattgcaaatttttgtgagcattactcgtttgtgtcttctcttgaacctctaagggtggaagaagctcttaatgatccggattgggtgatagcgatgcaagaggagttgaacaatttcacccggaatgaagtgtggactttggtggagcgacctcggcaaaatgtgattggcacaaagtggatcttctgcaacaagcaagacgaggccggggtcgtaataaggaacaaggcgaggttagtggcgcaagggttcacccaaatcgaaggattagatttcggtcaaacttttgcgccggtggctagacttgagtcgattcgcatattgcttgcttttgctactaacctcaattttaagctatatcaaatggatgtcaaaagcgccttcctcaacgggcctatcaacgagttggtatacgtggagcaaccaccgggcttcgaggatccgaagtatcccaaccacgtgtacaagctccacaaggcactatacgggcttaagcaagcccctagagcttggtatgagtgtcttcgcaattttcttgtgaaaagaggctttaaaatcgggaaagccgattcaaccctttttactaaaagacataataatgatatttttgtgtgccaaatatatgtcgatgacattatatttggttctactaacaagtcttttagtgaagagtttagtaggatgatgaccaaacgttttgagatgtccatgatgggtgaattgaagttcttcctcggccttcaaattaagcaactcaaggaaggaactttcatttgccaatcaaagtatttgaagaacatgcttaagaagtttgggatggagaacgccaagccaatccacactcccatgccatcaaatggccacctcgacctcaacgagcaaggtaaagacgtcgatcaaaaggtataccgttccatcattggctcacttctttacctttgtgcatctaagcctgatattatacttagtgtgtgcatgtgtgcaagatttcaagtcgctctgaaggagtgtcaccttgtggccgtgaagagaattcttagatatttagtgcacacacctaaccttggtctttggtatcctaagggagcgaggtttgatctcattggttatgccgatgaggattatgccgggtgcaaagtggataagaaaagcacattgggtacttgccaattcttgggtaggtcccttgtttcttggtcttccaagaagcaaaactccgtcgccctatccaccgccgaagcggaatatgtttcggtggggagttgttgtgctcaacttctttgaatgaagcaaaccttgagagactatggcctcaatgtatccaaaatcccactcctatgtgacaatgagagcgccattaagatagccaacaaccctgttcaacactcccgaaccaaacatatcgatattcgccaccatttcttgagagatcattccacaagaggcgacctagacatccaacatgtgagaaccgacaaacaattggcggatatctttaccaagcctctagatgaagctaggttttgtgagttcaggagtgaactaaatattttagattctcggaatgtggcttgatctattgcatgcgtgtttgcttagtagaataggtttgcataccactttgtgacaaaatggtcattcaattcatggatggacactagtcatttttttgtggagattttgaatctatgtgtatggggatctcatttttcaatgaattttggtcctagcacaacttcatagattcacacattccctctctcgagggtgaattatcttgtctcatggtaattccctctcttttgatcccttggatcgtccatttgacttgtggctattgttttgtgtgattgattgtgtgctagtcacaaattcaaatggagcctctagtgctcgaccatcccttccttcctaaatcctataaaaaatccttgtaaaaattgtttttgtcaaaattcccggtgcttgtcccttgcaaaattcctttaaaatgtttgaaaaataatttcatcaaaattcccagcgaaatctcattgcaaaactgtgttttccaggaattttcggacattccgaaaatctctgtcctgtccctctttcaattgctgcaatcccaggatttttcggacttttcgaaaaattttcagacatatccgaaaaacatcagaaccgtgcgcaactcttctgtatcctttcggacatatccgaaaattttcggaaatatccgaaaatctcggggtccttatatatcaccccgtggactcccttctctctcctttccacttcttttccctacgggttgactccctcctccctccccattggacctctccgcattcatacccccgagagggatccggcggtgattcgccaagtgtatgattggcggtgcaagtctgaggttgttgctcctcgtcgggatgagaatccgcgctcccttcgctgcaccgccacggatccgcgtttttggaccctctttcagcaagacttttatgagtctgtgattaagtccaaagctcatcccactgttcccatgcaatagatcaattgggaggagttgcaggcacacaacgatccggtgattgactctatgattgccaattgtgatctcatgggtatccgctccttcatgacgttgcagcaaaattggtgcaacgaggtcattgctcagttttatgccaccgtctactttgatcgttatcgtgccatgcactgcatgactcaggggtcctggtattctgtttcttatcagcagttggctgagatctggggcttccgtcttcgttctttgctcaaccttgatgaccttcataatcttcaaattcctgccaacacagaattgcttcccctttacactccaaatgatccaaatgtggtgttgggcaaggtcgacggcctcaagccgtactttgcctacttgaaccggatgtttcgccggtcttttgtgtctatggatagtgatgctaacagcattaaccacctctctaggaccgtgcttctccgttttgatccccctcctcatcgcttccatgtctatcactttgtgtgggaggagatccgcatggcttcaattcagtacaagaaggggttggtctatgcccttcacattatgcggatgatcgagactgtgactcagctccagtttcgccatgatgtgactcattctcagcttcacttgcgccttcttaaggccccccgctcctcggctgcttgggacataccctcctcttccactctgccgcctcctgctcctgagcgccctgcctctgtggctcgtcgtgagccgtctcccttattccacaatttacggagtctttttggtctttgctccacggaggccaaaaagaaccgccgattgcggaattcggcgaagaaaacggctcgtgatgtcaagttcctcaaggcaaggtattatgaggaccaccacattgatatccctccttctcctccgggtttcgaggccgagcccgatgagccacaggatgaagcgattgaggatccttttgctgggttgccttacgacttcgacttctttggatatggccatggctatggctatcctcctccaccacctccagaggatccttctcaggcgcccttcgcttgagtcgtcatctcatcgtcctctctttttcgtgtcttgatgccaaagggggagactatctatcatggctttagattatctatcttgtccttagagtcgagcacagttggtttttatctgtatgagactattgtgattttttatgttaggtttaaagctttgtaagactattgtttaattatgaatgcttgtgatgtaatagatctttttatcttttaatgtggtgcaatgccttatcctctttatatggtgcttgtgatgagatgtaattattcctttgcatgcgatgtgttggatgtaatgagcatatgtgatatatttgttctcttgtgagcttcaatgtggatgcaataatttagggggagctctccacttgcttttatgcacactcttagggggagcttccactaaaattttgcacaaaaaaaccttaaattatattcattctcttgtgttctaatcgtattgtcatcaatcaccaaaaagggggagattgaaagtgcatctaggcccctaatgattttggtgattaattacaatgtgattagagaggactaacatttttatttaagcaaatgtgaaggttgttatgtcctcaataagttagcgtaatgcatatcccgccgaatacgttgatgtgatgtgatgcggcaaatgagcaaatggtattttgtacgttttcgtttccttgagttaataggaaagccgcactattaagagggatgatgcattgacatacgaggagtgatcaaagtgctcaaaatctattttcaaaaaaagggtttctcctcagtttggtgtgttctggattttttcggagttttccgaaactcattttcggactttccgaaaacacacagaaccagattttcgcttctggaaatttttggatttatccgaaagtgattttcggactttccgaaaatgactgcgaaggcaaaagtggttctgtatattttcggacttgtccgaaactgattatcggatttttctgaaaaatatcagtagagtcaatttcgcttcggtatattttcggacttttccgagaacatctagaacgatgttgttggtactggaaattttcggacttgtccgaatagttttcggaatgtccgaaaaatccttccatgaccaaactgttggtgctgagctagaatttttcggacatgtccgaaaatctttcggaatatccgaaaatctcaattattgtgcataacgggcagaatctgggctgtggctataaatagccccctcccctcacttgtgagggctgctggttccattccaatcatttgtgcccttggcttgctctctctctctagcacttttgagccttgctttcttgtttcccctctcacccgtgttcgatatggatttggtgtgtgtgtgagagttgtggattcgagtttgtgtgagtgcctgttgttgacttcgtgaagatttgtgagcacttgcatcatctccgggagttctttgcttcatttgttactcttggaggttgaggactcctaggcggctaggtgtcgctcccgagccactgatctacttgtggttggccaggagaagtttgtgaaggtcggatctcacctccgaaagggaagagatacccttagtggaaggaggagtgcttagtgcaacctcttgaggaaaggattagctaagacccggctcttagtgagctcctcaacggagagtagaatccccttaaggattcgaacttcgggaacaacctcgtgagcttcatctttggtgactttactttctccctctccactagctttgcttgttcgagccgctataggtctagttgctgtttgtgctagcatattcttgttgtaggcagctagatctaggatttactctgctatttgtgctgactccgaaaattttcggatatatccgaaaattttggaaatatccgaaaattacatcttccgcttttaattgatttttgaattagcctattcaccccccctctaggcctaattgacactttcaaggttccaccgtaatgaggctaatggatgcatgacaccatgtgttgacggtcaccaagccaaggacatcgccatgttgaaaagaatgaagtcaagcttgtgatgagaagaaagtcttgacaaaggatggttaagacctcggcataaatatggttgaatcgaatggtcacaagtgttgatctcggctcaagcttgatcccaagttggatggtgcaaggcaaaggtataatgtagctaagaatgttttcttagtcttttcctggtcttggtgtttggcgtagaccggatttgctagataggcgccgtactatcaagaggggtctatgaagcgagcatgtggatgatcttgcaccatattagttcatatgcatgtaggtgtatttggtgggcttgtctagccaagtgtggtgagttttctcaagtcccaaacaaagagagaagtgagcacatcctataggtttgggtagcctcatatggttttgtctggtggagtatcttttggagtgtgagccctttttccctaagcaaagttgtgtttcttggatggattgttcatgggttggatagccctttgaataagctttccatagagtccaagaacgtcaaattccgagactcaagtcaagagatatcaccgttttactaatggccgattgagctgaaaagtgccctgtggtctgaccgcagcccttatggaggtctgaccgaagtatgtcgtccggtctgaccgcagatcacatggcggtttgaccgcacatcctgattttgaaggaggtctcgtcttggcaatccagagccactagagccgcagccggtcaaaccgagcccctggcaatctgaccgagctgtggacggtctgaccggccactacactgcgatcagaccggccaggttgactgggctcaatgattgccatgtaatggctagttttctagccgttaagtagtccggtcttaccggccacactatggcgttctgaccgacagagcacagagttggggattttgactccaacggctagtttttgtggttgggggtatatatacccactccccaacagcaagggtaaggttttggcactccattgcattatcttgaacccttgcaagagctctcacacccttgtgcacttagtttatctagtgaggtgttggagagtgagttaagccaatccaagtgcattgattcattgttagagctagtgtggtacttgatcatcctcggcaagcatcctagacttgttactcttggaggttgccgcctcctagacggctttgtggaggtgttgccggtgacctctccgaagagattgtggagaagacccggcgccggttgagagtggtttggagttaaccaccttcggagagaagtaagaactatccctagtgatcgaggcttgtgtaatcctctctgtgggccggcccccaccttgcccaccccttgacgaagggggcgtgcggtggcttcgtggttgagcggtggagttggcctcgcctcaacagagattaggaaaccggcgagtttccgaacctcggtgaaaaattccttgtctcttgtctcatttatttgttgcatttacatttgagcaagtttacatactaagcttatttgtgctattatcaccctaagcttgcaaaccttaacataggctagcttttttgtgcacttacttgagactagttgatttaggttttgaattgtgcaaaaccattttgatttacgcttccgcatacaaaattcggttttagccaaaagttttaaaaccgcctattcaccccccccccctctagtcggcctccttgatcctacagccaccccttttagttttgccgaaatattgtttcaacaagaactacgaggaagccgagataatgtttcgacaagaactacgaggaagttaagtttccaacaggtccacatctgataataaagagactctcaaggtttgctacctcaacttcttatctcttgaaggttattgatactgaagtgctagctgatagaatgttctatatccaaacacttgctaataccattgtggcttcggttcttttggaggctatcctagctaagctcagctcatttgcaatggacatgaccctatatttttcttgcatgttcatctaccaaagtagttggcagcatggtctcttcatctcttcaaacaagtgcaaatcaggtgaacaagaaatctattttgcttcccttcaatatcccaattattttcttctatcatggataatttgtattcttccacctctagggtaccagccaaaaccagctaaataaaactagtgtatatatataatatgtattcatccttcttgaaagaaaatcacataaatatcatgcatgtactattgtgatgtgttttttccatgccactacggcgcagcagaggctatgtgtgttcagatgatgagtagagctgtcacttggaataaaactgacaaatcaattactacatttcaacaaaaaatctggaggcatattgaggtttggtaaatttctagtgacatatatataaggaattttcctatagcatactatagttctcctgttcagttatgggcctgatgcacttcacatcagggattccaattttgttttggaaaaaaaataatcagaactgaaaaaaattaatgaccatatataattgtttgaactcgatttatgaacgtaaaattgtgataaaaaaattcgaagcctaggtaccttggtttacacagataataatatctttcgagtttcacaccaaagagatgttgaaaccacaatagcttacattttcttctctctctctccatgaacttggcgtgcttaggctcgaatgagtcatttataacaatgattcatgtcatactccatccgttcacaaacataagagattctatattgtttagcaaagttaagattgaggttcaaattactttgatgtctgtcacgcccagaaatttagcccaaaatttcatactattttgtgtattaaatccttgttcaggaattagccagggtacacaaaacgacaaattaatatacaagtacaaacgtaaataaagcgtaaaatacttacagaagaggcacttagttctcacaccaaaaccgaagcagcagcaacggaaaaaggcgatcatagcgaggcttcagctccactccacaggcaaaactcaactggggtctgagccttggtcctctaacttcgtcttcagctcagaagcactacacttctgaaaagggggaataatagcaaggttgagtacaaccaccgtactcaccaagccacaccaatgatgcactcatgcaacgggagacaaagagaggtttgtggctatttgcataaaggtagttgcaaaacattttattgagcaaaatagtaaaactgttgattaattaaggtagtactaaatcttcactgatcaacgctacaccacgttgatcaggcctaaccatcccacctgaactaaaccagttcattaagccaatttattaagggtgagactaatcacggtgaatctggtcgatcgcccattaccacgggcacggttatttgaatagttttactctggccagaggtgcacaactgtacccacaagacacaatccaccggcatgtcaccgtgcccggctggacacgtcaccatgtcgagtgattgtggcaagacccttcatataactccctctgaccaatcgatgccacacctcaggtttcacccctcccccagcaggcagcaggcagtcccccctcgtgccacggtgaatccggaagcagcataggccgtcgcagggcccatccatactcgatcacacccaccctagcctgggtacgtcagccaaaggaaagctatactacaagtcaagcaattacccattcctgcttgtggtacgcgcggtaagtcttccagtgcatccagcgaaccagtccttaatttgctatgggcgcaactagaaaaaccatgcacccacaaaccaccattaagtcatgttttagttggataattacaaccaatgaaacatggctagatgtctcgagcacgcagctcgtcaagatatatactaggtgtctaatgatgtaattatcccattatgtgaactagtggtaattaagtatggataagcatataattctagctaggtcaacataagtaacacaaaatagtcgaattatcacctaagtttgacaaaggacgaacatcaagtaatatggcacaagcgaagaagtagataaaaccctgatcccatgtaattagcatgacatgcaattttatttgcaaacgataaaacatttataaattaggatcaacatgctcaaggggaatgtgtgacttgccctgcttcttcaaaagaatcctctgaactctttcctcgtaatcgcgagcttccgaaacagcggaatctacgcgctggcacgcaaaacaaggaaaaactctaataaaaaccaagtaaacagtatatgaaaagtaaacaaacatgtagagctcaagtttagatgaattttgcaagttgaatggcccaatttggagttcttatgaattagctatgaattttagaagttttgagccatttaaatgaatttctataattattactcgaaatattgcgcaattaaagctatttatggtgtcaaccgaggggattaggtggagccgacaagcaggccccacctgtcggtgactcaaggagccttggcctaccgtggaccgagtccacggaggcacgggctagtgcaccacgtggcgcactcgtggcgccgatggggcaccgacgtgctggccacctatgcggacacacgggcggctcagatggaggccggggccgatccgacggcccagatcggccgcgcgacaggggtggcggcaactggctgcccggcgaggacgcggcgcgcggcggcagcgacccgaccggacggccactagcggcagcggcgcgtcgcgagctggcccaggatgcgaccgacgaagcggagaaagagggagagggaggggagcgctcatcggggaacgacactgtagggaggcggccggcgaagctcgaggcggaggggggcggcggagctccagtgacgagcgacgctcaggaaggggtgtacgagctcggtcgcgacctggggatggggtttaaaggggttagggaagcgcggggtggccggaacagcgaggaaggatggccgaaggcgatgagggtggcggagctcaccggcgagcgagggagatggagctccggcgaggttttcgacggtgtgggcgggtgcccgtggtacggcacagtgcaacgacgctggggtgaccatcgtggctcgggatggcgggtaacagtgggaaaacggcgaccggaggcggtgaatgtggcggctgcctcgggtgtgtggtgggaaggtcgttccggcggcgttttggggaaagggaggggacgccaagatgtagcttggcacggtggtggcggtgcagtgcggcggtgacccaagcggtggtggtgggcggctgaacgacactggtgagcggctgaggttggtggcgcggtggggcggcttttcgatggtggtgggggaaaacggagtggcggcctggcttgcccttgcggcggcgaagctggcgatgacggcggagtagagcggtgaagactagagtggtggtggcgcgcggccaaagctcaccggagggtggcggaaatggcggacggcgtgggcagcacgggaggggttgaagggagctcgggcaaatggggaaaaagggagagggaggtgcgggcatcctttttgtgggctcgggtcaatgggatcgtggccgattaggggcggcaacctgcgaggaagtggcatggcgacatggggaggatggtggctggatttggtgggaaggagtggggaaaatgggcgcaggacggacgcgaggtggaggagaggggtggcatctgggcccacgcgagagagaagcgcggggaggcatgaaaaaggtggcagcgtgggactgtttcggcagccatggagccggcccgaggagaaagaggaagatgacacgtggggcctcgggtcccacctgtcggggagagagaggggaaattggcaaggggaggttaaatagacttcatgggcaagcggaccgagggagagaggccggcccaagagaaaggagggaaggagggaggggaaaatgggccaaggagagagagggagagctttggaatagaaggggtcgaaagtgaaggagggggaaataatttgttttccatttaatttaaatgggtttaatgaactttatgctatttaaattatttcttgagctcggaaaattcgcaggaaaagttcagagagtattttagggcacagagaatattacaaaattatttgtagccatgatttttaaaggaaattttaattccctccttatttcacttgattaaattgctttaatttttaatataatttctagaaatgatttatttaatgatttttaatctcgaacgaaaattggggcgctacaatgtctgtgtgtgtttgaattaggaaagatcacgcctatcaatgagaataaatgtagaggttggatggattgggaaagtagtgctgtaaaatctcctatattcgtgaataaatttaaaccccaaatcccttatttttgtagagagagaaataagtatacgctgttaacgaccaaatttggtaaattctatcactattggcatcggaggtgaagatcagattgaagtgggatccaaaatgaagatcattgcggaaatagagtaagagtcggctgcagtccaaatcggctaaggtcaggtcggcagagttcgagtcggatggggctagccgatacagccgattctgataatatgactcggtgtacgtcatcgggttcaagttgatgtgcttcaagatggttgccatgcatggatagagtcctgggaaggcaattgtatctattaattaggatattctatgtaatttccttagatatatgtttgggcaaaagtctgccgtaaagacttatgttatcttagagtttgttagagataatagtcatgtctgttgtggacgtatcttgtaattctcgggtataaatagacccgagccctatgtaaaaaagggacgacatccaatacaatctcggcgtatcgccaccctttttgctttacttttatttcgacgagttcgtactctcgggttgagctgcatcggtttcgatcttcaacaagaggtaaaacttgtcatgacgacttatgttctcaggattagtgcttccatctttatgatactctaatcttgtctatataattcgtcgagttatcatatatctcacataatcttcgataatatctttatctaacctataatcggctaacatctgttaatggaaggcagccgattaggttagacaatgacgttaacttagattatgtgatatatctaccactctatgaaacttccagcggcttgattgtctagatattgttcttcttttcatacttaatgctgcatcaattgagtttgatctattaagtcatgcttagaattgcaatctctagcctgctttctggtcgccgattagggtagtatcggagtttcagccgatcttatctgatttaactacttttattccatatgcttaatctatatgttaaatctgccctttatgttaagatcttgtcacatctaagtatattaggcttctgtttggtatattctacttactttaatatcttaatatagagtggtatcggagtattagccaatacatgctagatccatttgatcggctatgctataaatgtatataatcccactattaatatatatttcgatctaagtgatttatactgtctcggcaaggcgaccgatctatcccaaccacttgatttaagtatatatcgatataaggattatatatcattaatatctacagccgattgagtagatttagttctgatttgcttattgatatttgccgatcgatgtacgcatgacatcggcttgaaataaatgatatgtcatcggcacctagccgatcggctatcatttataggattaattgcggtttctttgttctatttcttgttgattgcaggatcaaatcaactagcacgctcatacatccgaacgcgagttttggacctgcactggagttaagcagatctcccaggcctcgtgttttctgtcaacacgcttttggcacgcccggtgggacgaattagaagtcagaaatcaatcttcctcatggccgagaagctgccaccttcgccatcctcggctagcccgggtactgttaaagagaaaatccaaagaccaggattgagcgaagtcaatgaagggaatattgtggctattgatccggaaaagctcacacctgaccagaagaaggacttcgaagcaatgatgcaacaagcacgagaacagttcttcaaatcattcacacagactcgcaagggaaaatttgtttaaaagtacaaggtaaaggtggttcccgatgagcctgagaccagtacctttaaggagggagaagggaaaagagttttagatggctcggctcaagagaatcagggtgacgactctcagggggcacatgcagttcaaggtgatggtgctcacgagccacaacgaggaaatcttaatcagaatggtgagacagcacaagatttcttcaacaatttccaagatcgagtggactacgccgtacacaatgctttgatcaatcaatctggagtgttagtcaacaccttgtctaacatgatgaagacgatagccgatggatcaatagttgagcatcaagctgcaggcccggtttacttgccgggaggtgtttttccgaattatcgatctttgatcactgatgttcagccgcttgctcaggcagttcttccgagtgcaccatcggctcagccgatggcaccgccattgacttctttgcctgctccatcagcgtcgacaccaggccagccgattaatcctcggctattgatgagggagcagccacagcatagcggacagacggtaaatcggccagcacaggatcaggtggctgctatgtttctacccctccaatctactgtcaattcgattcagcagacgccaccaaggcaacaggttgtgcagccgattcaacagactccaccaaggcagcaggttgtgtagccagttcagccaacacttccgggacaacaaactatacagccgattccgcagcaagctttgatgaatcaatcggctgagcaatcagctggacacgccctgaatcaggttgttccagaacatttggttcaccatatacaaccagatggtacgacgatgcctcagattgtgccagagcacttggtgcaaagtattcagccaaattaacagaatttattcagccaaattaacagaattaccaatgaggcaatataatcagtttgaaccaatacagcaacagtcgcaaggagcaggtcaacaacgaccatgggctgatgtaattgccgatgtgatgagagaacaatttgggcttaagccgaaagatactggaaaattgtatcggcaaccttaccctaaatggtttgagaaagttcctcttcccaaccgatttaaaatcccagacttctccaaattttcgggacaagatggtgtgtcaacttatgaacacattagccgatttttagctcagtgcggcgaagcatcggctgtggacgctctcagagttagattattccggttgtccttgtctgggtcggcttttacatggttttcttctttgccgtatgggttagtcaatagttgggccgacttggagaagcagtttcatagctatttctatagtggagttcatgagatgaagttatctgacttgacagcaatcaaacaaaggcatgatgaacctgtgcatgagtatattcagagattcagggagatgaggaacaagtgctttagcttaagtttgactgatgcccagttagccgatttggcttttcaaggcatgattcctccgattagggagaaattctgatctgaagattttgatagcctgtcgcatctcgtacagaagataacattgcatgaacagaggtttgcagaggccaggagaagctctaagagggttaatcatgtctgcccttacatgtatggatcggatgatgacgatgatgactccgaaatagctgcagccgaatgggtaaggagtaaaaaggttataccttgtcagtgggaaaagaattctggaaaagaggagagatatgattttgatattaccaaagctgacaagatttttgatatgctactccgggagaagcaaattcaactccccgctggtcatgtaattccatcggctaaggaactaggcaaaaggaggtattgcaaatggcataattctggatctcattctactaatgattgcaaggtctttagacagcagattcaagtagccattgaaggagggaagattaagtttgatgattccaaaaagccgatgaaggtcgatggtaatcctttccttgttaacatggtgcataccgttggtcggacagccgatgtgggacgagcgagaggtttttgcgtgaattcggctagaattataaataagtatcagaggaaatacgacaaacaacaagagaggcattatgaagaagataatgatggtttcgatccttattggaattgtgagttctttcggttctactggaacgaaggtatgaggctaccatctattgaagactgtcctgagtgcagtgatattacagagagttcaagccgatcgtacaatagaggcaatcggctgaagcaagctagagttcccgttcatcaaaggttgggcccggcaaatcaaaatgattacttggaggaagacgagaacgcgaagactcagtggtgtccttctgatatttttacaaagaatcagaaaagaagggttcaaaggttgaggaatagggagcgctttcaggaggtcgagcaagaaattggtcatcggctgaggaaagcaaagccaaggaaggagtggcgtgttaagaatcaagttcttggagccgatgatattgcagccgatgaagcaaagaggttggcaaaagggaaaagtattgtaacggcgccaattaacatggtctttactttgccagccgaattcgggattgaccaagccgatgttgacgaactggaagaggaattggctaagttggttctatcaccagaacgagcagtttttgaaaagcctgaagggacagaaaatcggcatcttaaaccattgtatataaatggctatgtcaatgggaagccgatgtctaagatgatggtcgatggtggggctgcggtaaatttgatgccttatactacgttcagaaagttaggtagaactactgaggatctcatcaagacaaacatggtgcttaaagactttggtggcaaccaatcggaaacaaagggtgttctgaatgtagaattgacagtcggcagtaaaactatccctaccacattttttgtcatcgatgggaaaggttcttacagcttgttgcttggaagggattggattcatgccaattgttgtattccttcgaccatgcaccaatgcttgattcaatggcaaggcgacaaggttgagattgtaccagccgacaggtcagttaatgttgctagtgccgatctagctctttgggagatggatggccttgattgtttatccaggaagatttgggttggagattttctaaaagtgtccgattctgatatacagccgattgaagatgaagaacccaagctattattttgagggcgtcgtggagggttcaagcgtctacgccaaggacacggtagatgatctcgatgacaagcaaggttagggttttatgtcggccgatgatttagaagaagtggatataggtctgggtgatcgaccaaggccgacattcattagtaagaatttgtcttcagaatttagaaccaagctgatggagcttttgaaagagtttagagattgctttgcttgggagtattatgagatgccaggactcagccgatcgatcgtcgagcatcgattacctttaaagccagggattagaccacaccagcagcctccgagaagatgcaaagccgatatgcttgaacctgtcaaggctgaaatcaaacgtttgtatgatgctggttttattcgtccttaccgatatgctgaatgggtttctggtatagttcctgttatcaagaaaaatggtaaggtgagggtttgcattgatttcagggatttgaataaagctaccccaaaggatgaatatccgatgccagtggccgatcagttggttgatgctgcttcaggacataagatactaagttttatggatgggaacgcaggatataatcaaatctttatggccgaagaagatatccataagacagccttcaggtgtcctggtgcgatcggcttgtttgaatgggttgtaatgactttcggcttaaagagcgctggagctacgtactagagggctatgaattatatatatcatgatctgatcggatggttggttgaggtctacattgatgatgtggttgttaaatctagagaaatagaggaccacatagccgatttgagaaaggttttcgagaggactaggaaatatggtttaaagatgaatccgacaaaatgtgcttttggtgtatcggctggccagttcttgggatttcttgttcatgagagggggattgaaatacctcagaggagtatcaatgcgatcaaaaagattaagcctccggaaaactaagacagagttgcaggagatgatcggcaaaattaattttgttcgaaggtttatttctaatttgtctagaaaactggaaccttttacaccattgttaagattgagagctgatcagcaattcacttggggggcaaaacaacagaaagctttggataatattaaagaatatttaagttctcctccagtattgatccctccacaaaaagggattcctttccggttatatttgtcggccggtgataagtcaatcggcttggtcttgattcaggaacttgaaggaaaagagagggttgtgttttatttaagccgtcggctcttagatgcagaaacaaggtattctcctgtggagaaattgtgtttgtgtttatatttctcttgcactaagttgaggcattacttgttgtccaatgaatgcactgtggtatgtaaagccgatgtgattaagtacatgctatcggctccgattttaaaagggagagttggcaagtggatattttctttaacgtagtttgatcttcggcacgaatcaccaaaggcgattaagggacaggctgtaaccgattttattgtgggtcatcgtgatgattcaatcggcttggttgacattatgccttgggtattattctttgatggatctgtatgcagtcatggttatggtatcggcttggttataattgcgccttggggggcaagttttgaatttgcctatgctatcaaacaccgtgtgactaatcatcaggctgagtatgaggcggtcttaaaagggttacagttgcttcaggaagttgcagccgatgctattgaaatcatgggtgattcgttgttggtgattagtcaattggcaggggagtatgaatgcaaggatgatacattgatggtttattatgaaaagtgccgaacgttgataagtgaatttaggatggtgactttgaagcacatatatcgagaacagaatatagaggctaatgatttggctcaaagagcgtcgggatataagccaatgacaaaagatatcgagatagagattgctacaattacagccgatgattggagatatgatgtgtttcagtatttacagaatccatctcaatcggcttcgcagaaattgcgttataaggccttgaaatatactttattggatgatgacctctattatcggatgattgatggagtgttgcttaaatgtttgagtgccgatcaggcaaaagttgcaatcggcgaagttcatgaagggatatgtggtacacatcagtcggctcataaaatgaagtggttgctccgacgtgctggatatttttggccgacaatactggaggattgtttaagatattataaaggttgtcaagattgtcagaagtttggagcgatccaaagggcgccagcatcggctatgaatcctattattaaaccgtggccttttagaggttggggaattgatatgatcggtatgattaatccaccctcgagtaaaggacataagtttatattggtggcaaccgattattttaccaagtgggtagaggcgattcctttaaagaaagttgattctggggatgctatacagttcgttcaagagcatataatctatcaatttggtatccctcaaactattacgactgatcaaggttcaatttttgtatctgatgagtttgttcaatttgccgatagcatgggaattaaattgttgaattcttcaccgtattatgcacaagctaatggacaggccgaggcatctaataagagtttgatcaagttgattaagaggaagatttctgattatcctcggcaatggcatactcggctggctgaagcattgtggtcttatcggatggcttgtcatggatcgatacaggttcctccttataaacttgtttatggtcatgaggctgttctgccatgggaagttcgaatcggctcgaggagaacagagttgcaaaatactttaacagccgatgagtattataaccttatggccgatgaaagggaagatctggttcaatcacggctatgagctcttgcaaaggttactagggataaggagcgtgttgtccggcattataataagagagtagtacccaaggacttttcggagggtgaacttgtatggaagttgattctgccgattgggactcgggatagcaaatttggcaagtggtcgccaaattgggaaggaccgttccaaatttataaggtggtatctaagggagcatacatgttgcaaggactcgatggagaagtttatggccgagctctaaatagcaaatacttgaagaaatattatcccagtgtttgggttaatgcatgatcgactagtgttgccgatacatgatagccgatgtgtttgcatcgcctggagatggccgatattgttatatcgcccttagttgcttttcactattgtaatcggttgtggtttgccgatctacaaatggccgatattgttatatcgcccttagtcgtttctataattttgtcaatgttttcaacattgtaaaattaggggggcacatacatagagaattgcaaagaaaaatgagagaattgaaatttttgaacaagccggcacaaggatggcagcaaagtaattagggtgtcttagccgattacaacagttttctacaaactattacatggaaatcactgagacaagtatcgctggatagccgatatagccctttgcctaatttgatctatttcttcgatagcttgggcgtcttgagcatcggttccaggaatgactttcaaggatttagtcatctcagcaatgttcttgatagctgattttagccttgccttctgttcttcgacagcttgcatgagatcggttaacttcttgtgctctagatccagtttagcattgcattcttgaagttgtgccaagagttcaatcttgtgagcttcaagccgatcaacattagatttgatcgggccttcagataactgatcaagcttggctttctcttcatgaacacgctgccgattggtttggattgtagcctcgatgtccttgcgctcccggcgatcggataacctctgcctggctttctccagtttgaattgatgctgctcgaggtagacagctggagtaagagcatcggctaattcgtccgaaagaaaggcttggatatctgcaaatcttgcccggattgagccacagttggtcaccaggttatctagtgatgctcctaaccgatgggagatgtcttcgagtgttttcttcatatcatcagacaggagagctatcgctttactggtggtgtcttcttctgtttcatcgaggtaatctttgatgtcaaaggagaacagatcggctaagacctgcaagagacaatatcatggatgattaaggatcaagatatgattggccgatctcaaatttatgttaataaaccttactggaatagtaggtgcagctaattgttcctcctcttcaacatgatgactgcctgcagtcgatggagtgtggccgcctgattctgcctgcacaagaggggaagaaggaggaggagactgctaaagggataaatattagatataatcagcccaaatcagttaatgagatgataaaagtatcttactgtaggagctggtttaagggttgaagtagctgatctattcctcacagcaattttctttctctatatttattaaaattgtgaggaatcggctataaagtaaatgactgcaaaagtggacagataaagtcgcttacctttgccaattgagctgaagcagaaggggatggaggagattgcttaggtgaagccaatggtgttctttcagtatcgcttatttcggctgcagcttggtcgatgtcttcctcgatttcttcttcatccagagcttgttcaatggatggatctagggcgggtagatcgtcagctggcttagctttctttgtcttagccttattcttcggagccggggctgaagtatctgcagccgatgatctggttctccgcttcttgccggcatcggctggttctctgatgagtcctcggggaagtgctgaggtctttggggcattgtagccaatggcagaaggggatggcccacctccatttggaattagacccggagcatacttaatgaccttgccgctattgctctggtgaggaggagaagattctgttgtctgcaaaacagaagaaaagttagtcaaggttcaaatcggttgattgactattcaagcaagattgaagaaataaagattaacatgagggatagcatcagggaataagtctgtcatgtacatggaagccgattgatggaacagatgcagcttccactcgccccaccatctgtcaaatgtcctgctcctgaaccttgccagctttatgttctcgatgctgcccaacggaggtccagggatgttcaatagctgatccatcattaaagttgaggagatgtcgcctctgcattggatcttgttggcaaagtacagaccgattggcaattgtcccattccaagttgtctggccgatgacatcggatgataaaactcgtaagagacttggatatttctcccttgatggatgccgactgggaggatacatgggctgatagcagtagtaaagatttctctggattgctgaaacttctcatgattaatatcctcgaacctgaaatcggctggcagttcgaaatccattgagtcggcatagaagaaccaaactcgggcatctttttggaatccatcataaaagctgaagaaccagtccttcagaagttcagccgataactttgctcctgcatcggctggtgtagatgcatattctccgtatgacatacatctgcgatgggtgtgttcttctccatcatcttccacaatcggctccaaacttggaaattcagcttctgtcacagatggccgattgacaactttcatgactaccaggttcagctaggattgcaagagccaccatggtccacctgttccaaccactgagccgataattatcttggccgatgcgttgtttaatatctggtatagatagccgagaaggattttgcctaagggaaattgtttcttcgttactagggcctcggctaagaattgccagttggttgtaggaccgcagcttgatccgcagaaaaggaatttttccaaccacatcagcaaaaaagctacgtgctctctaggagtgactggccctttgcccatatatgctgtgatatatcctgaccaacccccaatgctcttagttttgaactcaaaagtgttcttggtgttcaggttcatagggttagctgatgaggttacatctaggccagtgagcatgataatatccagcagcgttggggtcatcggcccttggttgaaaagaaaagcattgagagtgttggaccagaaataagttgcagcagccattaggggttcatctttggccgaatttgctattgtgagggctagggcttggctgattccgatctcatcccaatgggcttgtttgctagccgatatccgcttataccatacaggccagcttttctccaaagaaggccaggatttgaaggtgtttttccaatggcttgtgtttggattggccgacctaaaaggggttctgttggtttcggctatgataaactcagtggggtctagattgccgattggaccgagaaagtattgttggtcatgaaacagactgggaaccgcaacaagattggaaagatgctacaagaatagagaagaagaaaacaagataaggtgagcgaaaaccggtctgatgaacggaaaagggggtctagccgatggggacttacctcagcgtattcggctgatgatgcggcggtcggattggtggaggtcgacatcgtcacgggtgaagatctggccgggagtggaatcgcctagaaatcgccatgcgtgttgaggaggtcgccggagagagaaaggacgggatctgtttaagcggtgaaaacggaaatcacgacgtgaagattctttggggcaacggttagtatttaaagtagagcgataacggacaggaaaacagcaagtgcgagtttctctcagagtcggtatatggcaaatccgaaacattatccaatattccggacttggggggcatgtgttaacgaccaaatttggtaaattctatcactattggcatcggaggtgaagatcagattgaagtgggatccaaaatgaagatcgttgcggaaacagagtaagagtcggctgcagtccaaatcggctaaggtcaagtcggaagagttcgagtcggacgaggctagccgatacagccgattctgataatatgactcggtgtacgtcatcgggttcaagttgatgtgcttcaagatggttgccatgcatggatagagtcctgggaaggcaattgtatctattaattaggatattctatgtaatttccttagagatatgtttgggcaaaagtctgccgtaaagacttatggtatcttagagtttgttagagataatagtcatgtccgttgtggacgtatcttgtaattctcgggtataaatagacccgagccctatgtaaaaaagggacgacatccaatacaatctcggcgcatcgccaccctttttgctttacttttatttcgatgagttcgtactctcgggttgagctgcatcggtttcgatcttcaataagaggtaaaacttgtcatgacgacttatgttctcaggattagtgcttccatctttattatactctaatcttgtctatataattcgtcgagttatcatatatctcacataatcttcgataatatctttatctaacctataatcggctaacatctgttaatggaaggcagccgattaggttagacaatgacgttaacttagattatgtgatatatctaccactctatgaaacttccagcggcttgattgtctagatattatttttcttttcatacttaatgctgcatcagttgagtttgatatattaagtcatgcttagaattgcaatctctagcctgctttctggtcgccgattagggtagtatcggagtttcagccgatcttatctgatttaactacttttattccatatgcttaatctatatgttaaatctgccctttatgttaagatcttgtcgcatctaagtatattaggcttctgtttggtatattctacttactttaatatcttaatatagagtggtatcggagtattagccaatacatgctagatccatttgatcggctatgctataaatgtatataatcccactattaatatatatttcgatctaagtgatttatactgtctcggcaaggcgaccgatctatcccaaccacttgattcaagtatatatcgatataaggattatatatcattaatatctacagccgatcgagtagatttagttctgatttgcttattgatatttgccgatcgatgtacgcatgacatcggcttgaaataaatgatatgtcatcggcacctagccgatcggctatcatttataggattaattgcggtttctttgttctatttcttgttgattgcaggatcaaattaactggtacgctcatacatccgaaggcgagttttggacctgcactggagttaagcagatctcccaggcctcgtgttttctgtcaacatacgcatactcagtaaaacataatcgttccaacgctgtctatgactgtccacagattgttatggtatgttttttaagattcaagccatcgtcatcattcttcaagaatgatagctagatcacaaaagagtaggatatgatatggcacattaaccacaaattgaatactaccttgaggggatcgatcgtttgctctaatttgtatagtatatggagttaaataactggtttcgaaatacaaggtaaaatggtcttaatttttttttccttatgaatcatatttttagaatcgctaccttgagggaatcgatcgtttgctataatttgtatagtatatggagttaaataactggttttgaaatacaaggtaaaatggtcttaattttttccttatgaatcatatttttagaatcgtagagcatataatacgtggaaataattcagtaaataagcagaaaagaacggggctaataatcaaattaagaatcactccagcgcaatcatattttccaaacctatgccccttccattgattagtttcatcaactgaaagtttgatgcagtacttgtggggcagaacatgcagaccaatcaacatatatcaacaggtaaaattatacagttgaatattatgaggttataatttctcagccaaagcttcattctcaaatgaatatatcaaatctggttactcacactataaggaatttgattttttatgactgcaaaacatatttatgagtagacagtcatacatcattaaagagtggctaatctactgcgttcatcaaccaaattaaatcttgtatcaaattgatatgtaatttgtgttcatcaaccaaattaaatcttgtgtcaaattgatatataatttagcacatgttttacatgttattatttctcaatcgaatcattctttgtcttcctatctttaaccatcatctctagttttccttctcaaatcaacaggctcaaataaaaaatttgtgcctcattcaatatatatagtatacattcatctataacattgatttctctgtcttcctatctttaaccatcatctctagttttccttctcaaataaacaggctcaaataaaaaatttgtgcctcattcaatatatagtatacattcatctataacattgatttgtaagccacatgactattgataagaaacagatttaacagtttagtaagcaaccctcttgtttttctccaatattttatcacatttaataatgatcttttgcggtataactaacccatattatttcaatcatgcctaaaactagcactcctatatatcactggtacgacataaacacatcatgtgtgcaaagttagctgtatgatgccactatatactatcactgtcatttaattgctatggcatcatgtttatgttccttgcccacttatttgcttcataaatcacatacgcatgaacgctagctactcccgcatgaatcattagctagcttactttattgaaatgcagaacgatcatgcatgtaacatgtttcaatttttatgttttttttagcgcgccaattgatctctacccttctctgccctttttgttttttctaaaggtatcccaccctcgtactatctttggttgattggatggaccgacgagatgaatggagaactatccagttcatgctttcttgacatcctactgtttggatgcataaacgggattatatgtgtttggagacagcaagatattacctccgttatcacatagatgacattatagaatgcgtctagtcaaaccttgatatattaaattaagcatacataagtattagaatttaatacacaaaaatggtattgatagatttatcatgaaaaaaatattcacatggttatatgttcgttatttttataaatatactgttataaaaaaataatggcaaaacacatgcatttgagacggtgtcaatgtccaaaatgctcaattaaaaagaacagatgcatatatgtttcactaatattctcataactccaaagatgtgtatagttccgttccatataaataatatggttttggagcgtggttctttggcaagtaacaatatatgctggagacgcaatatatgtgaagatatattatttaattgacaaaacaaaacaatgaatgagatgcacctacacaaggttggcccaatccggtagaaatggaaacaaaaccaatagaaacaaataaaaacaagataataaaaaagagaaaataaaatatgaacaagaagataaggacatgcaatgaaatattatcgaggaagattatgatttacttacgtaccaacatctctatgaaaattagaaataacataaattttacccaaccattctgggtcatcttttacaatattatcaaccaaataaattgatcaatcgaaccgtagatttgatcaaacaatcaataagtgtagttattctatcctaacccccatccaacacattgtcctattccattcaacaacatccctccaacaaaacatagaatataatacatcaaatgaaatacaccttagtcataacaaatgagataaacatagaatataatccatcaaatgaaatacaccttagtcataacaaatgagatgtgtttttttacacatatcatagtatacgtgtatactcaattacattgtccattaaattttattcaatcagaacccaaccaatattgaggataaatagaattggacataatatgctcacaatttgtaggttatgcggacaatgaagataatatttgtttgagtatatcatcctccgatgaaattacaattatgagacataaaaagttacaacttatagtactatttaatatttaaaacctaaagcccactacttaaaacactaaaaatgatataattgggtcggtttaaataataaaaaaatcacaccaatcatttaaatactatatataattttcctccctgtacagagagatttcttcttaatgaaaaatgtagatatattatttctcccccatacagagcgattgcttcttaatgaaaatatggagtgatcgaatgtttttttataaaactgtcatatgaaccatatcagaaaattctatcataactatcccactcgcaggtttgttaaaccataacaaaattgacatgaatatctgttcaatctatcttcacatattttcttcaaaatctggtgggtaagaaacccctcttgctttcctccaatattccatcatgaattaatgtttctttttcagtggataaatatgtattctcatcaatactatctaatacgagccaaagctaataacctagccaaagcatgtattcatcactgatatttatatatggcaatgtattcatcactcgctggaagaaaatccaatagatcatgcgtgcagtgtttgcatgcaactgtatgttcttcatgtcacttaattacttgctgtacatgacacactattcatgtttctttactgttaatctcttccatgtagtttaagaaggttttgcatgcaactagtcgcacgttcgcgcgactataaccttcctatctattagctgctattacaattaacaataaattttccaccattcagctaaatcaataattaatgtatagactcagggtttatattcatcttattcgtgttgtttcctgctttacttgatttaatattcgaaaaaagtatttggtcggaagtgcatgttcaatacaaatactatgttgttttgatatgtaataaatacatattgtaatgaaaataaacaatttactataattacgctaaacttgtgatattattgtaagaatcaaaattaaatttcactactacctcggattccaaatatcctgggtctacatttaagtaaaattgcacatcataattgtaactatgttataagatttgtttgagatgttaactttttttttctatatctttgttttgattgttgctgactgatttaaagtgttatatgtagaataatttttccctcttatgaaattatttaattggttatctagtctaaggaccgtttgggttgattggccaggctaagccagccctaggcctatttgggaggccaacatgagataaccaataagaggtaatgagtggctcaaactcttccttctctctatattttactacttctagaagattcctcatttcaatggctaggattcttccttgctattttgtcattttgtgaatccaactgctattttttgacaaatcatgtggctaattctggttgctttttgagttttacttttcaattaggtagatgtctatgcattgcaatgcaatggaatttagagtagggataagtctatttaacacccttcaactttttgctttgttaaaaacacaccctcgaactataaaattggtttctaacacactcaaactatcaaaaccagacatttacatcctttagaggttttaggatggttttggtatagctggacatcactttggatgccacattttaaaaagatccacatcagcaaagggaagtgtcccattagtcagttccattccacccctcttcttcttccttcccctctaactcgctctcccctctcttcgtggagcagttaaagttgacagcgagctccatccgtggagagacccccaccctctcggcttggagctccacgctatttcgccgccgttggcagtaacactgctcaacaagctcgagttggaggtgaagatggcgcgggcgacgacaaactcttggtggtggaggccctgcggcatcgactcctccgtcgagttcatcttgggatcaaggccgtgctgccggcacccgtctctttaacctcggcaaggagggggagggggtgggggtgctgggtctagggtggtagtggcgcttggataggaagccatctacgagctccctgagcttgacgaggagagtgccgacggcggtagtggtggagcttgggtaggaggggacggcaaaggcttcatggaggagagaattgaagaaccacaccttggtctcgtactctcgtcgacatcggggaggagagatacctccaaatttcaactagccgtagccagatcaagatacagttgggtcgatccgcatccatcaaccctcaccagagcttgccaataaccccgtcttctatgtgcttggcgaaccctcttcttcgagcttgctaacagccccttcaccaatcacggccaagggagcaggctccgcgtcaagcttgtcaccaacctccctcttcccttgagcatggccaagggggtgggcaccgcatcaatctcactgtcaacctcgtcatggccaccgccaacctccctcttctctcgagcatggcgagatctctatggccgactcaagctcggtgagggagggagtcaaaagagtgagccatggcggcctcaagctcggtgaggggtgagcgagtcgaaagagagagggaggaggaagaaaccactctaactagtagggccagctgatatggcaataccaaaaatgccacataaaatcacaactttcacggagaaaggagaacaactgtattttaaagtagtagagaagtgcatatctcaaagaccaaatatgccacataataatacagctttcgcaatacacatttgctttattaaccactaatgcatgaaagccaacttgagcatgaatcgtttagcttagtttgctggagcctggagacgcaaaatatgatcatgcaaacgttcagaattttatatactgtttgaaggtatgcagttcgtctccacccttgccttctccccttgataatcaaaattccccatttcccctatgaagcacatcttgaccttctccccttgaatcatcaaaatgagatgcagtttccgggctacttttcagagtttacttaattatatgctcaattacattgtgttcatatgtgatgaattagtcgttctgtagagacaaatgggaaggcggggtgagctgcaaaagagcggatgagaaacgctttgcatttttctttcatattccatttgtcatccacactgtctatgtaccctcaaagagaatatatatgcactgtattagctacctacaagctatatcatccacaagtgtcaacctcattcttgaagcaccaaaacaacgcttcagtagatcttaacaaagtacaaactcattatctacctggaggctggagggaatctcccttgtgccactgggaatatgcccttgaattttgtttctcccatttatggtactatttccaaatcttatgccaaaacatgctgtggacattggccatgctgtactgaggaacgcaatgatgatttatgcccccatcctgtattagacaaacttaacgacatactctgttcttcactcatgatggtggtagctcatctgaaatcattagagacaagaagtcaagaacataaaaagaacaatttatgctatgggccaaacggagacatgagacacaagtactgtgtatttagaaaaagggtaattaccatattataaaaagggtaatttcctcgaaaatacgataaccaaggaaacggttggtaaaacaacaaaatcatttccatttctgtttctatttttagagtaaagtccatcaccggtccctaaacttgtaccgctgtgtcatcccggtccttaaactcgcaaatcgaccgttcaggtcctcaaacttattcgactatgtcatcctggtccctaaacttgcagatcactcgtttaggtcctccaacttgctcagttatgtcacctcggtccctaaacaggacggtctaaaaactttatatcaaaaaataattcataactttttcatgtgaactctaatgaagacaaactttatatcaaaattgtagccctcgacgtgacctacaactttttagttgaaaagtttttgaattaaaaccatttagggtctcaaaatattgttgcatgtttatagattttgaaattttaatttcacaattacattttgggacaaaaaatgacttaaaataaaaaaaaatcaactacaaagttgtagatcacgtcgagggctacaagtttgatataaagtttgtcttcattagaattcacatgaaaaatttatgaattatttttaaatataaagtctttagaccgtcctatttgatccagatgatattcaaatccaagtttagggaccggggtgacacaactgaacaagttggagaacctaaatgagtgatctgcaagtttaggaaccgagatgacacagtcgaacaagtttgaggatttgaacggtcgatttgcgagtttaaggaccgggatgacacagcggtacaagtttagggaccggtgatggattttactctttttttttaccatttccatttttgtgtctgtcagtaaccatttccatttctatcagtaacaaatcatgaacgattaccgttcggtcggtaacaaatcatgaactatagccagtcggtcaggaattaccaggggcactgtttttcacaacttcacccgtaactgaccacggagtggaaacagcgccaggacaccttgtgcatgctcactcctgttatgcactcgtgacagcaatgaggaggcaccaagcccatagtataggcttgtggaccagaactgcaacagccacactgggatgtacgcagtggaggtgaggctgcacaggcattacccaacctacatggaggtggcaagaaatgcaaagttttcccagaatgatgcatatcaattatcaaagcagtggctcgaccaccccagatgagcatatcagaggtgcggttacgcactcgttgcccatcctatgttgaggtggcaagaaatgcaaacttttgccagattgatggatatcaaaccttaaccagcgacacgatcacccagatgagcattagaggtggagagatgcaatcctcatactgccctgttctaggtgcttccctttggatgtgtgaatgccaccttgccatcctttataagaaatgggatgtgtcaattacggatgtagagtttccttctttctttgggtttatgtgtaatcagatggagagtagaggtgccacttggaataaaaatgacaagtagtacgtttgggccaaactgtgttaccgcccgatgcatattccggcataggttcacaaaggagtgccatatatgggagaagcaaaaatctggtggcatccttttcctttgggttctagttcgggaaccgccagttttctcaaaacatggatttggtttcaggatctggaaatttctagtgacacgtaaggaattttccaacaatttcagttatgggcctaatggacttcaaaccagggattcccagtttcattttggaaatagattctgggcgataaccagaaatttcagaaaaaataacacctagaattgtttgaactttgatttaagaatagaaaagcgaaaaagaaagaaaaagaagaaggcaaagagagaaaaacagaacagttctcataccataaatttctttttgtcagcacatatgtgttaccactgaaggaggcaggcgtttctgtgttggaagacctgtgtttaaagccgaggtatttcctgcttaacatcagagagatgtaaacatcgagagctcacgtttgcttgtctctcaatgaacctggtgtgattaagctcaaatgagtcatccataacaatgattcatgtaggtcccatcggttgcccatattccctaataagccaaaacggcttattagagaataaaaactaacttataggtaaaacttttatatatgtgttcttaacaacttaaaagccaatactaaaaaagaactacgttgaaaatattttaaaatcaacttcaaaattaagtttgaaaattcaaattttggctttggcttattagggcaaccgatggggctcgtaatatatgcaagctcatcaaaacagaaacaaaataagagataccaaaatattccctccatttcatattataagtcgtttgactttttttcttaatcaaagttccttaagtttgatcaagtttatagaaaaatatcctaacattttcaatacaaaacaaacatattatcaaaatatattcaatgttaaatttaatgaaactaatttggtgttataaatgttgctaatcttttctataaacttggtcaaacttaagaaactttgactaaggaaaaagtcaaacgacttataatatgaaacggagggattatattattgcatgataaattcatagtcttcttgaaatgataattagagtaggacgtatcatacttattttttcttgcatagtagcagcaaaatccatgccattttctctccagatatagggaaggacattttgaaacatatatagtgttggatgaactccagagtcctccatccactgcaaaacctacaggcacaaaaaataaagctcaaataaatatcaggttttgacctattactcttgaatctagcttgttgcaagcggtattctgagatgatcagatgatgtaaaaatgagaaggggccttgttacctcaatatactttctccatttcccaacaactaggagatttctaagaacaaccgcataagtagaaagacccacagtagaacatgaagtcaccatcttgtaaaacagctgcataagagaatcaaataattaatgtagggaaacagaactgtaaatgcagatcattatttctcttacaagtgtagtggcatgtttgtgattccatggcttcctcaagtatcaatgtgtattgatgtgagaaggtgatgaactgatgatttaaaactagtcaagataaaattgttcttattgctaaatccatttttattttggacaaggagcagcaggaaaatataggtggtacatggaagtatggaattactggtagtacattgatacttgaaccttcagacattcaagaaaaacaattcactgccaaataagtaagagtagatgaaatcataaaatatttgtcaactcctctgaaaaggagaatcctataaatctatttgattatgctgaggacaaacatattaaatgattatatgtttgggagaaatatattgtattgtgtcagtgtggcaaggccgttagttccatatctaaccaaatatggacttcacttttatagaaatgaacagatcgatagtttttttcccccctgaacatgtaggagaactgcatccctttgcattaaaaagaaagatatccactaaaactaaaaaccataccacaccaaaaacagagtaatgaagcatgtatatccattgcactgcagaagttggatatctttctttgggtcttagaaagatatccactaaaattactggaatgacaactatgttcttagaaagatatccactaaaactataaactaccacaccaaaaacagagtaatgaagcatgttctgaaatgacaactatgttctgaaggccaactataccttcatcatgttctctgtcttcccacattttccaagaaaatttaaaacatggtttagtgttccaacagaaatggatgagagcgaagaatccaaatattcaatcatctcacttgctgttttccagtcacgtatcctgttatgaggaagcagaacaaaatagaatattgagttattcaatgcatcgcacg

SEQ ID NO: 5730 - DNA, 7516 bp, Oryza sativa
gatggtctgtttgctttatcctttttctgacgtgtttagtttgatgcttttacaattgtgattgtttgggcaggtgccgatgatccgtgataccagctgatttaatttggcttgaccatactaatgaacataattaaggttgtttaaagaggcccagttacacagtaggtgggtagcataccaaacaccatcagaactttaccctacaaaatgtgctttatctttttcttcacacaaatatagcgtgaattcaattcacgttcacacaaattgaacgccaaacgaaaacaaaccactccttttcagatagcgaatttttttttgggtaataaggcatcaaaacaaaaccggtcctaattggcagtgttttttttttgttttgttttttacggacttaaaatgagccgaagtaaacgaaatcctgaagaacttcaccatgtcattctagattcctagtacatcctcacacagataaacagattccaagtacatccttacacagataaactgcagataaactgttcccatgtgaccttgacatctcccacccttttgtatagcttaaagcaattactcccttcttccctaaatgtttgacgccgttaatttttccgttaatttttttaaacatgtttgaccgttcgtcttattcaaaaacttttgtgaatattattcaaaagattgagtagtagtagtatatttaacaatgaatcaaataatagaaaaagaattaataattacttaatttttttaataagacgaacggtcaaatatgtttaaaaaattcaacggcgttaaatatttagggacggagggagtacatatttacaacaagcgcggttgtgcatgcaacaaagattgcacaaagttgcatctaaagttagtaaattaccaacaaatatgggacacggtatgccaatgatccaagatgaattcaattcaatcagtacaacgccacagatatggaagcagaggattaagcacgaactaccaacacacatcaaatagcacaagcacaaaacaatttactatgcatgtcaaacaaaggcacagaaaacagagcatcaagtgtcaaagccagagtagacgccactccccctcagaagtcgcttctcttcttcaacgtagttcttccccctgctagcctggccacgatctctcttccgcttttccttctgtgagaaggaagcatctttattctctttctccatctgcctcggctgcgggtttcgcacaccaataagcttttctccctcagttactgcagttcttgtgcgctcccgttcttcataggattcagtttgatcttctttgtcgttgcgatctttcccggtggaccaagaccagttaggctcaacctttggagggggcaccgtcaagacagatgggccgccacgatacccatgccggctcaaagcattgaaatccacaccaccaggtttcttcttcttcgacatagctgttgttcagagagctaaaaccaatgttaaaatgaacactaacaatgagaggtaatactcagaaacatgcatcatctggaatccataaggctttgttaggatttaccaaaaccaaactgtgcaagcttactgattacagcaattaaaaagacaacaaaacagacaacccaaaccaacgtcttctactacaatttaattttttttttctcaaaaacgctctactgcaactttatgggagggaacactggatctatgtaggcatgatacattggagctgatgcccaaagactggctaaatgttgactagaggtggtcaacctatggacttcttcagtgatccaaataagggcctcagctttcacaggatggatgatagcatccagaggccggtgctcatcatcactcccaactctctgctgatcccactgtttcaagaggacattggtaaggtaatgtaaaggctgcttatataactgcttcaccgacctgccgagtcccagccatgttgtgcatgggattacagatccacggtgagcaggaactggaatatgcttcatatactcttgatacatttcagccttcctgatcagtgcacctgcatgatctcattatagtaagcatggaaatttgtatctctacgtagaaaggaaaaaaaccttaaaactacatgagccaatccaaagcagaacgctattgtccatgtctgaagggtataaaatccagctcaaagcctctattagtgcttgagaactaaaattatactccatccacaagagttagacctatttcatatttgagttttttttccaaataagttgttcctatttgtagtgtctatgcatccaaaacttaaatggagaggtaaattaaatgtttgattaaaacccaaggagccatcgtaatactcattggttgcatgcgtgcatacacttcttgatctttgttatatgcaagatgagttaatttctctttggtcttggtgacaaaagtaataggtgtaactttttgtggaagaaggagggagtactaatttgctaacttattttgtagtgttggtctctggctcatcccatagggtatatagagaaagcataggactcgactgttgaagctccaaggtaacgggcaactcatgataattctttgaatgacagagtattaattacatacttagttataagagataaatgaaacttagatagacttattatagtggtgttcataattagcacaaaatcatattaaaaactccaagaattttttggccaaatcagcatgtaaaaccaggtacagatataacctgcaagattgtctggatgcaggcactatgagcctgttaatataagtggtatagccagcagtaaataccattgtttgggagacaacttttcttaaaatgtccatcttttaataatggcaacaagtggacaactttcaaactcaaacctcaactgtgaaaataacatgtgggcaatattaacatacagggaaaacagggaattcctccatgacaattgcgataactcaaatatcaacaatatcacaataaattcatgtacttcaaaatactgaacattcacttggtcacatgaaatctatactctatatagaatgctaaaataacatatagcgcgtaaccttgtaagaatagaacactagctaaggtaatgttgcttagtttcaaaagaaaacccatgcttagtttgttctttagcaaagtctaagaaaaatgaatactaccactagagaaaaacacgtgagttcccccagtgtactgctatataatttactgttatatcaatcccaatcaatatgaaaagaacaagccccaaatttccatagatggctggccaaaataatcttaagataacgttaacgaatctacagtaatgctgattctctgatgtgaaaggtacgggtaaataaccactatggctttgcttgagtggaaggggactagatccaatccctttggatagatatagaaaactgcagttaaaatccctggccatccaaatggatagattctgatccctgcatatagaaacaagccctaatttcacaaatagactaaatttacagtccgaaacaacataagctagctaggaaacacagactaaaaatccatactccatgttgaactcatatctcacaggcaacacacaatacagacattcaaaacaatcttgtgagagcatagcgaggccatatagcatgctaacaaaccaaaaatatgaaaaatctcctcgtgagctaacaaaaagacagagacagatcactgggatagctctcaccgtctggtgcggcagctttggtggaattgggcagcccgaaggcgttgtcccctttccccttcccggcttcatcgtcggaatccgagctcagggagtcgtcggaggagacttccagcggctcctcccacggcgccgccctcttcatacctagccgcacccggccaccgccacatctaggggggttagcgtcacgccgttggcgaacggtggagtcgaggccgtggatgatgatgagcgagggggggcaatggacgggtcctcacctggatcacggagacgtcaccggcggcacggcgcgccgagggagaagcggcgcggcgcgcgagggagaaggtcgctggctcgctcgccgtcgcttgtcgccggcggcggggacgacgaggccgaaaccctcgattgctgtgttgggctttggatcgctggatgagggtggagacagaaggaaaaagtacacctaaggtacctcaacttgtccgcgaaaccatatatgggcaccatggtatcaaatgcataaaatcactcaactttttcaaaattttcaaattattagtatataccaagttataagaatttgatttatacctacacctatcaacaaaacaactcaaatttaactttatctcacaatccataattacatacctaactaattatatgtttggatgctatatacatagaatcaaaatctaatataacaaaaacaagtttaaattcagttcaaacttgctttgaactagttagtaaagttgttaatgttaatacctaaatatttgaaaaagtttcatactcatttgaattgggtatatactcaatttcaacaatggtgcccgggcaccatggagcaccaaacaaatttaatatatatatatatatatatatatatatatatatatatatatatatatatatataggaagcctatattctactcccaggagtagctactcctattgtaaccatcggacacctgtccaactcacatcagggtttcgggcttcaactcactaacggattgtgagaaaagatccattaaaccagcgatgcagaaacttgaatattcttttttttttgaaaattcggatcactgcgctgtgttctgcatggtgagtcattttgaatgttctgcatgcatggtttgttacccgcacgcatgcacgaccgagcgaccaggagagtagttagtgtggaggctgctgtattgatactctatttaagttgacggtgatggaggacagaaaatgaggaccacaattatctttcggatttgtgaggaagaagattttgttctacaggtttttgatggagcagaaactctccggtggaaagggcagaatgtcgtcggcgaggtctgttgcgtcgccttccgcggcgcgagtaggcggaggctcgtcggcgcctgatgtcgagcagcagaagtcggtggcggccgtaggcgcgtcgtcgccggtgagtagtagcaagcaccatcatatggcgaaggcagaagatggaaccattacagttaatggtgacaagcagcagaatcctgccgcagataggtacacattgaagtttagttttagtttatgttctgttgaaattttttctcttgtttgtttgtttggctctaactggttattgcgttatttggtcatcaggaatggttttgtgcgttgcatggatactgctgcccggagtgaagtgatgaaccactctctccagaaatatgtcattcatttcgatggatgtcatcctcttcccatgagaaatcctaggaagagatgcgcttggtgctcactccgtgatattcgcgcggcttgcgacatgaatttcagaagcaacgaaacaacccgggtcaacagtaatggttgcgaacatgtgtccaatgaaaatatgtagacaatagtgtgatgatcaggaaaattgtaataagggcttgctttctgcacggtcgtagattagtcgtacgaactgtctctaattttgtatggtattttctatgaggaaaaagcgagtagtatctaagtttagaaatctgtatcttctgctgtttgggaagtgaaataaaattgagatgttatcctttcatttatctatttaagttgtgtgtactgcaaactccctgttgtcatcgtgaatgcaatccttcaccaagatgaagttcttcgagcagaatattgtacaagaatggagcaaagatttcgaattggtttctgtgagtgtagcgttgcgtactcggaatgtttgttatagatgctatttttgtggcggtatggtttcatcagaattcgttaatgttgctagtggctgactttccggagtccaataacatgcttcgcacgtaggagccttgattttcggggaggttgttgaacagctaatggaaaataaaccggaattatttgtcagtatatatccaaccagctggaaaaaatgacgccctatagcaaattctttttgccaaaaggggtagctaccagaatccgtgctggacagaaacaatattcgcgaagatagctatggaggaagaaggctggccggagaaaggtggcgaggatcatagtggacaacccatggacgtagttccgttggaaaggtattttttatgtcagtgtgattgtagtgtacaatttccctttctgcattgttagctgaattctcatttttttgatcctaggatcgtggttgagggggaggaagagagtgatctgctgcctatttcactctctgacccagccattctgttgccgaaaattgggcagaccttcaatgaggactctgatggctatgcgttctacaatctgtactctaggttcactggttttggtataaggagatccaagaacagatacaaagatggaggcgtgaagtccatgcaagagttctgctgcattcgcgaggtaaaaatctttagtgtattcttttttttttgaaaaccatggtttcgtattctcgtaagattggcaaggttctatagtgtgatgcgtaggatcatcatttcataggttttacgtagtaaggtgttcctgtaatttatgcagggtagagataattccgtcactggtccgccgaccaggataggctgcaaggctatggtcaggttaaatcgttcttctgaaagtcaaaagtggagagtttctgcattcgttagtgagcacaaccatgaaatgaaacgggacctgcagcatactaaacacttccggtctcataatttcattgatgaagggacaaagaggaacataaaggaaatggtagataatgggatgacacctacagctatgtatggattactttcaggtatgcacggcgggccgtccttaaccccttttacaaggagggctgtgacaagaatggcgtatgccatcagaagggatgagtgtagcaatgatgtgcagaagacactgaatttttttagggaaatgcaatgccgtagtaagaatttcttttacaccatacagattgatggtgcttcaaggattaaaaatatattttggtgtcattctctttccagattaagttttgaccattttggggatgcaatcacttttgatactacatatcagactaataggtacaacatgccatttgggatttttgtcggtgtaaataaccattttcaaacagcaatttttggttgcgctttgttgagggaggagacaatcgaagcattcaagtggcttttccaaacatttactgatgcaatgcatgggaagaggcctgcagcaattttaacaggtatatgtttatttggatggatcaatggtgtgtttaatgatatgtctt

SEQ ID NO: 5731 - DNA, 2606 bp, Oryza sativa
atgctctcatgcatagggtaacgtgctttcacacaatatttactattcatatattttgtatgacaggagaatatattggtgcaattttgagagaagtattctcgaccacttcacttttatttatcaagaaaatggtacggcctgctttaacttgttaaatactagatatattggacgaaccaatggctgccatatcttcgctcaaaatttgaaacatatacaattttgaaattttacaatacacagtcccttttgttgtaaatatatgaggatagataaaaccttaattcatttgcacttaagattaagattttttttatctagtacttgtttaaatgggtagttttaacccaagatattttggataggaggaattggaatggtaatttaatgtgttgcttttacatgaaaaacgagactatccatcatttattcttggagtttcactatgcaacatttctttgaagagcattgaagttttcttctggtttatccactccacatattatatctcatatttttgaaaattggattgtagggttgataaaaaaaaccaaaaaacacatcctcgtaggatcatatgctttatgttggaccgtatggttgagcaaaaatgatatgatttttgataaaacatcatctaaatcttattttagatgcatttcagggcaacatattggtttcgatcacgtgctcatgtataaaagtgtgatgaagacactaaggctgtgttcccctcctccccgacacgcaaaacgaagctcgtattattgcatgattaattaattattaactatttttttgaaaaatagattaatatggttttttaaaacaactttcgtataaaaagtttttgcataaatcacaccgtttagcagtttgaaaagcgtgtgtgcggaaaacgagagaagtgggttgggaaaatgggggaagaacacggcctaagagcaggtacaatagcagactatttactagctgcaataaaagatgagagagaaaagcagcggactatagatctgtagccagctatagcacggactataagacacaatgtgtgtatgacaggtgggaccatatactaatagtatagtaagcaattattgtatgaattagctatttgattggctatagatgaattggatctagtagtgggctatactattaaacttgctctaaggctttgttcgttgcccctagttcccaattcacccatctagttttccgcgcgcacgcttttcaagctgctaaacggtgtgtatttttgcaaaaagtttctatacgaaagttgcttaaaaaaatcatattgatctatttttttaaaaaaattagctaatatttaatgaattacgcacaaatggaccgctccgtttttcatgcggggacatgggttgggggttcccaagccagactgccgaacaaagcctaagttaataaaagttgcatgtcataaaatggagtcaatggctatgcaactattcacaaataggattcaataagtttgtgttttatttttctattggtgttagtaccagtgtgcacctctatcggcttggatgcgttctttatgtctttttgtgaggtgtgattgtgtgtagaatttttttaataattggttatagctctgtgagcaaaatcaagaattctattctattattaaaaaaactagcatggtggcccgtgcagattgcgcggctagcatcattatatcttctcgcatatatgttttctcattatattattcaaacatattaaagtaacaacatatttttaaattttgcaaaaactttacaaaactactaatgtgtaatattcatattatattttatgtacgtgttatttattaattatttttaatatcaaattttagttatttgtaaattatatatattccaatatggactctagactcgtattataatatttctttttttaattccgaattttttctgtaaattgtatttctatatagactctgtgctcttcttccagtattatttatttttatttctgaatttttattatttctaattgtatttctttgtggactctaaactcatcttttaatattctttaatttttaatttcgaatttcagttctttctaaattgtattcctatattgaccataaactcttcgtcccatgtttttcttaatttcgaattttagttatttttcaattgtatttttatacgtactctaaactctacttttaattttactatgtttatttcaaattttagttagtttgaaattcctatatggactctatactctacttctaatattctttattttttttaattctgaatttctattttttttcttaattgtatttttatatggactctatactctacttctaatatttcttatttttaatttcgaatttcagttatttcctaattgtatttctatatggactgggtactctacttctaatattccttatttttagatccaaatttcagttatttcctaattgtatttctatatggactctagtctcctcttctaatattccttattctttaattccgaatttcatctatttctaaattatatttctatatggactctgccttttctttttctacgattaatgtgag

SEQ ID NO: 5732 - DNA, 1882 bp, Oryza sativa
attcctgcagcccctgcaacattgaatgtttcttcttgcatttgagtgtctagccgaatagcctgttgtatgtcatgtaggcttaatgacatagggacaggttgggagatgtgaacccagattttcctgttaaatgtgatatctttacaattagtggtgaaagaaaggaacatttcaggtaggtggcttacattagagcttctgcataagcgattgaagttgtatatgtgtataaatcatcaagtgtttcagataggtggcttacttaagagcttctgcatcagtgattgaaattgcatatgtgtataaatcatcaagtgccttctggtcatgcctgacgaaagagtgttgcttgctcagaaatggtgatttcaccgaatggcttggtttaatcgacctctttggccgatcgaataggatatcagaaggaccgccgataattctcctcttggatttaggtgggagctttgtacatgcgtactcctcacgcatgaaaatcctcgccccactcgtctctttcaacatagagtacggagagaaactactaagtttagtttgttggtaacctattatgagacagaacagtaagagtgagacatattatgtgcatgtggttggttatgaatgaaaatgaaaaactgatacaggcttgtgggtatcattacctccatgcgaagagggagttttgtgcactgcattaccttctccggatttgtcagaggcatctactgactttgagattggctgatctggggtacgtgctaaaaagttgagttcttgttctttgtcagagtcttcagccacattggagatgtcatgacctggggtacatgccaccatgtttgcttcttcgatatcttgtgttattcctagattaaagcttgggggctcgatgtcagacctggcatcgtaggtacgatccacatggatagcctgtgtacagatatatcaacaattcttatggaaaaatggattctttttatattgaatagattgacaaactacatgagattgcacctctattgcacccgtatgatggccaagattgtatttttcatcatgtttgtttcgcagctgaaacccaaaaaaaatgtcaatagtctgaagtttctgcacaagggaaatttcaacaagaatactctaccggcaggagagttgattttaccttcatctttccatacgcggggaaaggattccggttcttgagaattacatccctctcaatgaattctgctatcatggagtcattgtacacgccaatccttggaatgttttcctgctcgggagtgtccgtcccgaaatccagattgtccagataaaaaagctgagcagtataaattatagcatgtgaaaagatgttgcgagtatattagaaagtaaaaggcaaataattcgaacgaataataggataatctcacctgaggtagtataatgcagccattgatgtaaccaatgctttttcgatggcgtattttgtgttgcaatgctgctgctgcatctttgatgtcatgcaaaacaaattccgcccagttgtacttgtgaatattttctacatcaaccaaagccttcatataccttatagatatgtgattgttaacagattgaggagccaagaatttggttacaacgaagattataaaagcagtcttgaatacaatctgttcgtgaacagtcatcgtcctgttaaattttttctccaatatcctctgaattgttacaatggtaagtccatcaaaggaatctttctcaaagatttcacacatataagccttaacatcttttacctcattttttattgcaggcaaaatctccttccgtccacaagggattcccaaaagtaggctgacatcctcacatgtcaaacaaatttcatgtctagatc

SEQ ID NO: 5733 - DNA, 24257 bp, Oryza sativa
  unsure (1)..(24257): unsure at all n locations
gagttagaaaccctagtctctctcctcatttcttctctctccccgacgccagccctagccaccgctacagtgctcctagtggcgatttcctcttccaaccatgaaaatttgattcttctccatggaatcaaccacattggtggctaggcggatcttcctgtgatcgttctacgatttactatcaaggtagcactttttgattccctctctcggttcattgtgttttttatcccgatctctaaatctgtgaacctagggagaaaaccacttggatagtcttgttcctgctaccttgtagatcaccgatctataggatttgttcacatgcactggctatttttgagacctctgttcttcatttttgccggccggaagttccggtgctcttgcacccggaacctccgggcgctgtccagccagcctgcaattcttgattctctcaaattttgcctaactattgcactccaatttgttgattcctgttgcagtaagcactatgcctcatgagaaaagacagaaagcctctcaggatttgtccggtgatgagagtcctcctattcggtttcctcatggtcgtttgggtaaagagaaagtggttgaaggtggcagtggcagcggcacccgtacttctcctaggtttaccaggcaatccagcaaccgtccagttcagattcgagatattgacagtggtcaaggaagtgatgctccatcttcaagaggtcatgggagaggtggtggtcgcacttctggggctggaagggcctctcatgatttccctgttggatctcgcgagaatcccgttcggctctacaagactcttggatttgacaccactcctttgcaccacattggaagacccaagtccaactaccttcatcagcttgctaagtacagaagggaccgtttgattgatccagagacatagcctgaggagtcacaggatcctcgtttcaggacgttcacccaattggattggtataactcagtgattatggctagagacaatccagtggttgagatgaagtggattgattggacttacatgaggaagaagaacaatgaagtgttcaaccaagcaatgcaagtttgccacaacaagaatcttggagatattcttgccttggagtatgattggaatgaggaggtcattgcacaattctatgcgacagcattctttggtactactaagaagggaactccttatgtaaagtggatgactgagggtgttaggcataagatttccatagcacagtttgctgagatattgggcttagaggatgaggatctcaataggcctaatattcatagtgaagcacccctccccatgatcaagactaagttcatgtatactaaggatgctcctcggacttgtatgggaactactcatggtttgcatccaaactacaaggtgctttactccatctttcgttggtctctgcttccaaaggttggagatgctactgctttgccatccaagcatgctcatcttctcagtcgcatgcgctagnnnnnncctcctttcagtgtgatgaagttgatttggtatgagattgccaacaccattcttgagcataagcgaggttgcatttatgctcctttcattatgaagatgattgagacagtcaccggagtgttctacatctgtttgatggtattttggcgattatatgtgtacacaagacttactcatgatggacaaagcaaacaagcagtttataagttggctagcttatcatttctacgcaatgcttggccatgtatatacacgcaaattcatgcatgcacaggcagctgggatatatatacttggattagtatatgtgcatgtatagttaaccaataactagccgtgtgaagattggctggtgaggcaatcacgtgcatgcatgcatgtactacagtagacggtcgtatgtgtgtgcatgcctgggtgattaagcaacctatgcatatccgagtgattaatcatgggctcggcccatggccgaagacgatagctgcctacgcgcgggtggctggacctctatcccgccaagatttcataagttaatatgtggaagagataaaaccagatgagttaagagataactaacaaaccaattgattttatctctataacaaacttgatcgagttagttacttcgcgcgatcgctggcaaggcgcttatcaccggactgtggcccagcagcagagaaacaaagcgaattacaaataagatatttgacgccaggagaagctaagagataaaatcaaagaaggatatgaacaaataacaaactgatcgatcaagccttatctgcaacgaacttgacgcggaggaaacagcgcgcgaacgcggcgagcaccgacctcaggcccctatataaggcgtcgacccctcggcagccgggggcattcacgaactcatccacacattgatccaccaatgcatccagtatccacaagccacccatcatcaacgcatctgcccatccagcatcaacacatccatccatcaactctcatcggtgatccatccatcgacgacacgcaccggcggcggcgagcgacttcggccggagtcccggcgtccggcaggagagggcgcgcgcggtgatccgatcatcagcaagcgcaggagaggagcttgatggctagtcaaggtaaaagctagcaagattgtttcgttttctttcatctacagcacgcacacatccatgcatagggatccatctgcacgtattgtcatcgccggggaagtcgcggtggccgattcatctatgcgtcacagaagcctcatcgatgccggcgtctgttcgagccgacacagtgctacttgtccctggactcgaacctgctaattcaagccgctggtgatgcatctactcgaagctgcgacctcgccgagatgccggacgtccttgatttgcaagcttcaccgcactggaacgggctaaccatggaggaggtcgtcgggaagccgccctgccggagtgcaccgaggatcgccggagctgccgccgactgccaagatttctatccgttcccatgccggaggtcaagcatcacgcatggcgtcgaaaccagcggatgacgatagaggcaagtatggctgcagtacagaggaaggacgacgggaggacggcgagctagtgctgttggatggcaactaatgcaatgttgattaagttaattattgtggcaacgtggccaaccaatcggaggacgacatgtcatcgctgctacagtgccatgcacaaaccaatgcgtgggctgaagaagtcctattggtttttcttatttgtcccaaatgagatgccgagctttgattaaatccggttgccgtctacatcaaccatcttcaataatttctccctttcctaatctaatctcgacgcaactgctatgacgtcaagtcgttcaagctacgcaacttcatgcatgtcttcactaacaatctacatccacacgttgttcaagaccgacgaggctagacgacagaggacgggcgaagccgatacgaaggccatgctaccaacaccggcgcatggaccgacgaggccgtggatcgctgccggcgctcacacatacacatctacatcatcatcacaaccatgcatggagaacgcgaagcgaagatgacgagacgaccacaagcaacttaatcggaggttctcttgcaggtctagacctacgaaggtaattaactgggagcttttcgaggccccaagaaccaggagaccacatcgcacaagtcagatctgtccaacgatagattgtggagcgcatatacatatatattacattgggaattcgtatttatgatcttttaagattagtaaagagcatgttccttatgttttgtttacattgtgtattttctctctaaacatagagggatacatatattcgtatttttctatcctaaacaacatcaaagatgggtgccacaatccttttcatcctcgtgttccaccttcctcttctccagtggtacctagatccatcccttctacctcagctggtccttcttctagtgccccaccgcaatcctcgagctcttctcccatcaagaaggcacttcaggcgatcttctgtatgtgtgctaagactgcaaagaaagtgaagaagatcgaaaggcgtcagaaggaagatagaagagaggctgggaaagaagtgtcagatgattctgaagatgaggtctatgtggatccttttgaggcttatgaggcagcccgcaacgttgccggtgaaggtccatccacctatttcaatgaagagtcttcccgatcagatgatgatgatgatgaggatgacgccgaggcagctgctgaggatgctcccactaatgttgacaccgctgcacagtccgatgagtctcatctctccagcgataccgaaattgttccctctgatggagatggagatgagtgatcctcttcttctcttcatggtttcttgctttttggtgccttgatgccaaagggggagaaattgtgaattgaagggggtcatttaaatcattttgctgccttaactgctgtctggtcatttggccggaagttccgggtcctgtgatccggaggttccggccaggcagattccctccctattatctctctctatggacatgtaatcgtattcttttatggttggatgtaatgaatgttagatgctttattatcctttatgtcagtaagttagaccatatgaatgttgcattttgatgtgatgtagtgttcttttcatctttttgagtgattgccatgtcatctagtctttcttcttgcgtatcacacatcttttaagcactcacatctgcatcttatttgatgagggtagtgtgaagtttcttttgaggtttccttcatcttatgcatattgtattcatctcatttcattatatgcatatctttagggggagctacatacttctctcatcattccaaatttaaattctattatctttttgtgtgctttaaccatgttgtcatcaatcaccaaaaagggggagattgaagatgcacttaaaccccctagtgggttttggtgattaatgacaaggtggttaaaggggactaacgtgtttgtcaagtttattcacaggagtttagttccaaagcaagttgtgatggctaagaatgcaaggagaccccccaatttgaatgttcctaagtgcgaaaaacatcgaaggtgattagactaggtttttcactttcgaaattgagtgtaggaaaaaccatactattaagaggggtttcaagtgtggttctagggtatacaaagtgctcttagtcatatccatgagtctaaaggtttttggaatcatttttggaaatgattttccctgggacagagaggcctacccggaggttctggccggaacctccggacaccatagtttattttctccccgggacagagagggctacccggaggttctggccagaacttccgggcaccgaagtttagctagatttttcctaagtattgcccagaagttcctggcacttttgcccggaacctcctggcaggtttctagttcaaacttgtgagtaacggctagatgacgtcacctagccgttatatatatggatttcgtccccagatcaccctttggccattccacttcagctctttcatgttctagggttttctagccactccccagcttcctttgcttcctccactcaaatctagagcctatcttgtgagattgagagattagattagagtttaggagtgttttggagatggcttgaaaattaggtttgattgagcactttggatatcttgtgggctgtcacttgggcttattactcttggagatcttctcctagacggttaggtgtcgcccgtgagcttcaaaagatcttgtggatgtcccgggaaagtttgtgaaggttttcctcacctccgcaaggaaatgaggtaagtgagtaaagattcttgtgctgagttttcagaggttgtcctaggtagagcaacttgcacttgtggtcttttctagaaggaattgtgagttggatcttggtggtcactcaattctagaaaatgacctagaagtgttgagttgaaggctgtggactccttctgggatctttgcataagtgaggcaaggggttaatcgagacccggctctttgagcacctcaacggagagtaggatccgtgtgatccgaacttcgggaaaaaaatcgcctttgtctctcttgtgcatgatctgtgtttgaatctactggtatcttgagatctacatcttgtgcaactctgtgcctgatcatctctagctaggacctgttttacttcccctaatttcgcttttctctgttgcctggaagttcctggctcaagaactccagaagttccgggctactcatcctacccggaagttccggtgttcatcaccaggaggttccgggccctgtcaatttaaccgctgcaattgttgagaaaatttcaagaaagcctattcactcccccccctctaggctacatctctgcacattcaattatatgtacttagtctagttttcctttaaccagaaacataatatctgaaatcagcagccaataattgtgtcgcttgaattttcgcacacatcaccaccggcgataggcgtcgaaccaaaacagaatataatgttgaacagtaattgagctgtatatcagtaattcgcacagatcttgccaccgccatagccattgaagacaatttgacggagacatagatagatagatgagaaaatatctcgtcaaaacgatcaaataagtgaatctgtaaaaagaatagacataaaagttttctgaatacatgaaaaaatctcgagataagaaggaatgaactacattttaccaaaaaatattaagtccaaacttattttcatctggttgaaagaaaaaaattcacatgaatatggttatgattttgatgccacaaacattgcagtacatcggaaattaaaaacaaagattaattttgtagactgtatcatgcttaaccatgtcttatacagtaggacagatggtgtagttatatcgtaggcaccagttcgcctcgtacccctttaaattgtaaatggatcggaataattcttattcatggacggattctagagagagcaaatgatccatatattctgatagctgcaatgtatgagaacaacaaaaaacaatgctccaagaactgcaccgtttttaaatattgaacttacgtaagacatatttggtatgctctctccactcctaacatgtgaatcggaaaatttgtgtgaaagcacatcgacaaaagcatgagagcccagcatgagaaagatgatccgatggtcatttgcaaatataaatggcaccaatgtatatggttaaccattattgcttctctatatctaaattcaagacatgggaggaaaccaaaagtatttcattaaagttagtgtttcagctttagctatgatataatcatttccatgttatttgttttttcttagttttaacacttaccaacttaattgtctactactaaagattgtcgagcacatctagctggagtggagaataggaatgttaaacggataaaaaacttaacccaaagagttttgcttaataatatgtattggctaattggggctggtgtagtaggccaatatgagatctatgcatacagaagttatagtgggaaatgtgaagctataaaacactgtacacaggtgagtatcaaacacgtagttgataagttcgatcattgaactaattaagcacatgacattgctaattatgctttaatttgtttcaattcaaaaaatttaattttgctatagatagtcaaatattaaattgcatagatggaaaggaaccgctagttttcatgttaattagattagccaacgtccgtaaacatcagcacaatatgtgacaatgaaatattaaatgtcatcattcattcattgtttctcatagcaagtttaatagtatagccaactactaacttcaaatcatctatagtcaacttaatagccaattcatataatagttagttacaacactattaatatctgatcccacctgtcatacatatattgcattttggagctgcaactgactacaaatctatagtatgttgttcttctttatcatcttttatctccttaaaatatatttatagctaacttatagtctgttattctacctgctctcgtacgtccttgtctgactcgtataaacctcatttgtaagtcctcactataaggctacaggacggggtaagtctgatgcatagatggatccacatgcctaagatgtgtgaatgtgtttggacttcgaagccgacgtgtgcttgacatgggggctcgggacagatcagagaaccaaatggtgtcattctgaagctgtttggatgattgtggtctcattgacctcggcttcacgggggccaagttcacttggtgcaacaaacaagatgcccaaagcaatgtcaaggtccgtcttgaccgtgcggtggcgaacggtgagttctcacatctttttgatgactattgtgtggagaatgtgaataccactacctccgatcaatatgcactcttaatattgctttcaggaagggccaatagaggtacgggagccccgatacagcagagctttcgctttgaggctgcgtggctccgtgcggaggactataggggtttcgtggagaatgcttggcctgagggaaggatcgattctccccctcttcaggcagcatggtctaatctccaacggatggccgactctctccggagatggagtaaattgtcggcaatgtccgtaagaacattcaaaaactggaaagaaggttaagttcgctgcacaccttacatcccaatgataactctgtcgaggaagagaaattgattgagaaacagctttgtgaactctttgaaagagaagaagtcattgaaagagaagaagtcatggcaaggcagcggtctcgagtggatgggctgaaagagggtgaccacaataccgctttctttcatgcccgagcatcggcaaggcaaagaacgaacaaaataagaatgctcaccagagaagatgggtccctatgcgaagatttggaaggaatgaaagggatggcggaacgtttctatgctgatctctttgcttctgagtgctgcgattcgatggaggaagtgttggagtccataccacgcaaagtggatgatttcattaatgaggagttgtgcaaaccttactccaattctgagattaaaatggctctcttccagatgggaccaacaaaagctccgggccctgatggcttcccagccctcttctaccaaacacattgggagtttattgaggaggagatttgcagtgcggttcgtagcttccttgctagggatttgattccggagggcttatgtgattcggtcattgttctcatccccaaggtcaacaatgcaactcacctctcaaagtttcgtcccataagcttgtgcaatgtcctttacaaaattgcttcaaaggttctgtcgaatcgtctaaagcctttcctgccaggagtggtttctgagttccaaagtgcttttgtaccgggacgactgataacagatagcgccctagtgtcatatgagtgccttcactccattaagaagcaacagtgcaagaagcctttctttgctctaaaggtggatatgatgaaagcctatgatcgtgttgaatggtctttcctgcatggatgtcttttgaagctgggcttcgctgatccttggattcaaactgtcatgcgatgtgtcacctctgtaaggtatgcagttaggatcaatggagagctaacgtatccggttactccgtcgaggggtttgagacaaggggatccaatcagcccttatctctttctgctctgcactgaagggctgtccagcatccttcaaaagaaggaatcaatgggggtgattcagggcattaggaacggtcatcttggcccaccaatctcacacctgctctttgcagacgacagcatcttctttgctaggagcgatctgcacagtgttcaagggctgaaagatgctctccaagcatactgcaaggcctcgggacagaaaattaatcttcagaaatcttccatcttctttggtcagaactgtcctgaggaaataaagaactcggtgaaggagacactccaggtttcggttgagatcctccaagacacgtatctaggcatgccaactgaaattggaagagcgtccattggctcttttcttttcctcccggaaagagtgtggagaagagtgaatggttggaacgataggccgatgtccagggctgggaaggagacgatgctcaaagctgttgcgcaggcgattcccacctatgttatgagctgcttcaagctgcctgtgacaacttgtgagaaaatgaaatcatgcatccttgaccattggtggggcttcgaggacgggaagaagaaaatgcattggcgttcctaggagtggatgacgacgccgaaatctctggggggggggggttgggtttcagagacctgggccttttcaaccaagctatgcttgctagacagggttggagaatcgtgactgatcctgattcgctctgtgctagggttctcaaaggaaggtacttcccgaactctgatttctggaatgctcccaaacccactgccgcttccttcacctggcgtagtattctctttggaagggatttgcttaggaaaggtgtgaggtggggcattgggaatggctcttcggtaaaaatcctcaaggatcattggataccgggaatcaaaccttcgatggtgagacctctcctccctatgcctgatgatgtcacggtggacttcttagtcaatgctgcgattggggagtgggatgaggataaggtgttctctttctttgatgaaactactgctcaacagatcctacaaatccctgttagtgcacatggaggagaggatttcatttcctggccacacgacaaaagaggggttttctcggtgcgttcagcttacaaccttgcaagatcagaaatctttatggctgcgcaaagtgaaaatggcaggggaatgttgtcgggtttacaagagagtgcaaacagatggaaggaactttggagaatcaatgccccagggaaaatgttaaccaatctttggagaattgtgcatgactgcttgccttcaggtttccagctgagaaggcggcatatcccagctactgatggctgttgcttctgtgaaagggatgacagaatcgagcacatttttctcctctgcccttttgctgtatgtatttgggatagcatcaagcaacattttgatttgaagctatgcatgactgatctgtcaaatatgaagcagtgggtttttgatttcctggggagaagttcaaacatccaaaagacggcgctggctgtcacgttgtggcatatatgggaggctagaaatcattccaggaataatcctaccttagctaatccaagacaggtcatccagaaaatcttggcttatgtcgagatgattgaacaacactgttgctgtgctgtgcaggcggttaggggtgatgctcttcgtccagttcccagatggaggcctccgcctgaaggtacgattcttattaatacagatgctgctgtcttccagtcagtcaattcttttgggttgggatttctatttcgggatcacagcgggctgtgcttgttcgctgctaatgagcgacactcggggtgtatccaacctgaaatggcagaagctttggctatccgctgtgcgttgcgcacggcgatggaggagggtcaccagaaaattgttttggcttcagattgcctagctatcatccaaaagattcagtctggagcacgtgaccgttcaatggttggcgctcttgtctctgacataaacttcctggcggctggttttttggattgctctttcattcatgttaatcgtgtaactaatgctgcggctcaccttttagctcaatgttctgagcaaacagtttgtaatacctaccgttctgtaatcccagagactcttcgggaggtactgctgtctgatcttaattaatctatgagaagctgcattatctcaaaaaaaaaaccttttgattttggcccaacgcaacacgttttccaaaagtgacaaccatgatcactacaacgcttcagattcattcacagatagtatgccaacacatggatggagactgccgctagaaagcatcgctatattggcggaaggaactacggatcggttcctgatccatgacaataaaaacagggcggtcaactatttcagttgactgcccacgaaacatcaaagttgaaaagaaaaaacatcaggtaacggaaacatcaacttagtacaacggaacaaagctagatatttttacaacgggaagaaaaaaatgatttcctttacaacggagtatacaaacaataacaacgaaaagaacagaacaagtaaaagatattactacgaacacagccatcgaaatccttatttctgcaacactgaaacattgttactgcggttattgcaacatcaaaatcgaattagtgcaacatgaaaaataatcgattacaacattgtgaagcaaattgcttctgtaggttaggactgtcattataaacaatccaatcatcccaggaagaaacacaaatccaagaaaaagcaatggccacgctgggcaccaccaacaactccacttctcaccgttggtcatagactcatagggcgcttagagctcgccgcgctgcacgagcagtatcaccacccggatgtgatgcagtcacggccggcagaaacaactggtacaaaggatgcggatatggcactgtggccggcgatgcccaccaccaccaactcctgcagacgctatgcaacaccactgcagctacgcgttcgccgccgctgcagccacgcatcgcctccgccgccgcatctcaacatttattttgcatgtctgtatggcaacagctaataaaatgcagaaatcatctctctcgtttaactagcaaaatgaagcactagcgacgaattgcccccacacgcatcttctcctccgttttctattccgtgctgagaatcaaggcatggatgcatgataggatggcggaaaatggatgggtgcaactactcgactgtgtttctcccttataaataatagagtaatagagtattatccatgacaaacatttcatattatctatgatagagtaatagagtattatccatgataaccatgcatattatctatgatagagtaatagagtaagaagttgccttcgtgcagagccatgttgctctttttttagattagttaatattttttctcaattgtagccaatattttattacgaataattccgctagaaattttggttctttcttatttttcttattacctattacaatatacccatgaaaagtgccttctccaacatttattgcccaagcggagagcggacggctttcgtggaaccatggagggagtctcaatcgatcttttctaagattccaactcacatcacgcgtgaagattaacattgatatgatttatatccttagttttgtgttccgtatgttctgtgttcgctgaggtcaagtgtgctgtgaaatttagcgagaggttcgtgccgtgatgggccctagctggtttgccacttttgcaatgctcctcggagaagagaccagatggtgataggccagttaggcctgaccagcacaactgggtataaaaacatggaataaggtcactttcgatctctcaatttgtcatttagtctgaaattcatccatgaaccaaaatactagatatagctaattgcccaactcacaataccatgttaaatttggtccctcggtagtatagtcatcggtttttgctgacgtggcgagtgggaccactactatgaaatatcaaataggtatcagcactataggtgccggaagtgctaaaaccgatatctataaaccttttcccactaccgcgggttgaaatcgcaaaaaacatgcacctttaaacaattataggtgccggttctaaataagaaccaacacatattctataggtgccgaaaaaccgacacccatagaaatcgagccgagccggcaggccccaccacaacgagtagataaggtgggtctcgcatctctctctcgtctcctcccttctctctcgctctcttctcctcctctccaactcccagtctcccacctctctctctctgaggaagcggcgggctagccgcggggaggcatctaccggcagcgggctcgcggaggggatgcgacggaggactcgctggcgggaggcggtgttctagccatggggaggagccctcctctccgccatatctggtgggaggggaggcggcggcaggggcagcgggctcactgggggtaggtggcgtcaggcgcgcgggctcgatgaggggaggcagcggagggctcaccggcgagagacggtgatcttccgcggggaggagccctcccctccgccagatctggcgggaggggaggcagcggcaggggcggcgggctcgccgggggtaggtggcggcaggcagtgggcttgcggaggagacgcggcgatgggctcgccggaaggaggcggcgggcccgcggaggagacacggcggtgggctcgccggtgggaggtggcaggctcaccggtgggagtcagcgggctcgtcgacgggaggtggcgcgacggctcgaagacgaccgaccgtgcgacggcaacgatggcggatcttaagaggtgtgattcttttttttattgcataaatttgagtgccaaaatttgtgttgtggatgaatgttggatgaatgttgtgtctctagatggacgaccgtacatttccatgaattcatcttctagctatcatttgccatgcttgtattagtgcatctttaagggtacgtacgtattaatctttatcaagtacgtcccctgtcttcttcttctggatattttattttctttgcacgttgggtaatctcgtcatttggaataaaatatcacctcttttgatccggaaattataaaatattgtcttcggtgtcctacagttaattacataatttttagagtgtccatcagccgtgtcatgtttttgcgttgtctctcagccaattacacattttttttagtgtcttgtagtaaattttgcatttcggtttagggatgaatttcaaactcagcgataaatagaaggatctaaagtgaacttttccttaaaacggaccttgtagaaccggaagttttgtatcctgcttgctcggcccatctacagatggaatacggccgtagcccgttagaggtaagaatttttttcgtttttagatttttttttaatatttatagaaataatctatcgaccaaaaaaattgcagaaatagcccctgccgccctaatggtgggcggcaagctgacgtggcagacggtgggtcgaccgcgccatctgccgccgtcggccaaaattgcgattaggcccttgccgcccatacagagggcggcaaggggctaattgcaattttggccgcccataaagagcttgcggccgtactttttcatctgggtctcttgccgccccaatagagggcggcaagggacccagatgaaaaaagtacggctaaaagatttttctatgttatgttaataataaataaagaagtatttattggtaaaacttgttaatattgttataaaaacgtattgaagttggttgttgctcaatttcatatgttaagtgaggtattattttgtaccttattcgacgtattagtactcggataatttatataggcctatcgcagtctgggtcgtagaaacattatatagacttaaacaaggagaattatgtaacatgaagaaatagtagtacaatttgaacatgatacgactatttgcattgcggttacatagatgatattagattcgaactaggagggaggtagtgcaatagttgaacacaacgacgatgtagtaatgggacaaggaagcatgacagtagaaatttcaatatgccaagttgtccgataatagctaacccctacgtgaggatccctctcctctctcaaaccgcgctttagtaaccctgtattgctctggtagttcaagctgcacaacacggctaggtggagttagaacccttctggtgtctatccattctctgtattgacatctccttggtggttcctgggaggaaagaatagatgtaaagcaagcaaagttagtaaatgttgtgagaaaataaggattcatgtaatcaaaatattcttaacatgaaatcgtcgtcaagaatatttggacaaacaaagaaccttcgacccaatgttgtaggatttatggaacgaagaacctgacaacgatcaccacacctgcatcttggacgggcttcccatggagggagtgccgtagttagcacccgccagtcgctctgttgttcacgacattgtcgttcataagccgcttttctctgtaagtattgctcagtactttcggatgcgaaataccagcgaccttcttgtaaacaagtggttaggtcgagaacgggattttctgtatcgacccactcgatgtatgcgcaagccgtagtgcgggtctgccgaatagagtagtattacgaagaataaagcgattgcccatacggaatgaataagcatatgcagataataaaatacctcacggtcatagttagggcacctaaaacagcgccttcctcgaatatcaggattcctcgaagccattagttggcatcgatcaccgcataggcagagaggacgctggcaccaaggtggtagtaggtatacacaaggatcgctacgccagtttggatcctcaacaccccggcgtctagccattgacgaaagcccgtcggatttgtaatgaagcaagtggggaagagagtactgaatgtgactgagttctgaaagattgtgaggcctcactcgttaaggcgacttatataggtgcaaaaaatcaagtgatacccctgacatgtgaacgtggtggggtatggtgggtacgcctgattggcgccgaaagatacatgcatgatcggcgccgaaagttacattggtcgtatgcgccaaatggcgggcaaatactcgtatcacacgcgaataaaggaggctgcatcggtgcggcagaaagtagtcgtgcatgcgccgaaaggtatcgtgcacatataacaacaacgtagtcattacacaagcatacaatactggaaagtgaagcaagtaaacaaagagaagactgctctactggccctgccccgcgccgcgaccacgcttggtcctccgggcctgtgctcgcacgtggtcctgggagtaggtgaaacgatccggtagcacagcacgggtagcacgagtgtcccgcggaggagtggcctgcgcctggtcctgtgtctgcaccggcggtgcgcctcccagctgtgaggggccaatgacgtcctctgtcgagcctgaagcgaagtcgaagtcagtgatgtcgaagagcaaggtggaaggcagcaagcggtccgacgaggtcccagcatggtccagtggtggaccctgactcgacgtgccggctgcttgtgacgaagtcccggtgtactgccagaactgcgctgagtgcgaggttgacacagctgcctgagacgctgaccctgcagcctaggagaagtgggcggcctgcgtcatagcgaaccgtcctacacatcgacaacaggacccttgtaagctaagacataaaatgtatgtaaattgattgtcgaagtaatgttgtttttttaagtacctgtggggggcacaacagaaggcctagctgagaaaggcggggtgctgaacggtgcacgaaaccctgaagcaatcggcaagtgaaacggctcacttatatgtgcgaggcatgtacagaaatagtaataaaaatacttacctccgtgcggagggggagtcagcctaggaacgtgcgcagctggacggggaccagtcggtacgggtggccgctgtacagctgcatgtgcccgagcaacgtcgtctgcacgacaggtgagcactcggagaatcgagcgcatcgactccaccatccgcgtgtacgtcgtcaggtgctcctctacgggtaccggaatccccgcgcctaaacgttggatcgtcgttgaaccgtcaacgatgacccggttgatgtcgtcgacctacatagttaatttgttcgtaaatattcgtaaaatttgacgaagagaaagacatgaaaacataaaggaatggtgcgatgcagggtactcacagcacgagcgaagtcctggtcgtggtgcctggcatagaggtctctagtgctcgcaacgtggggctgctgctccaagggagcgaaggtgaccctactacgggtgcgtggctggtaccagcgtaggtaggcctggtacgactcctcagtgtgtggctctccctcgtggtccacgacctcctcggttgtgagcaaccagtactcaacaaaagtcgccaacttggcgggccaggcgggccagtcgccagctgagtgctgacccttgcgcgagtacctgcgaattaatgtgtaatattagtgtgaaacgacagatgttacaaattattgtgaacaggcagattttaatgcaacaacggaaagcgtagtgcaagatcttaccggtgaacagcagctgggacggtggtcggaaacggtactggaaagggctgacggaagccgaactgccgcatcacacggaaaggggcgtgaggctcaacgcagatgtcgaagaccatcggaaccgtagtcatccagtacgcctggtccctggtgcagagtgtggacagacccaacggcgcacgagcctgggtagccgctgcactgtagggctcccacacgacgtcagtcggcagaaggcggtcgaactccataacaaactcaggatacgactgcctaacctggacgtgagcccatcggcgctgcaatatgagacgatcgatgtgatgtacaatgaacttagcaattaacttaacaatacgataagatcgatgcaacgtacctgacgacggcaccacagagtacccatcgtagggtagtcgacctctggtcgctcctcgtacagtgactcctcgtacgcgtgctggtctacctcagggcggccgatcgcaatcctctcagctgcccagataaaaagaaagagagggcacccaccaaaggtcgcgctgggatccgtcttcgtgcaagactcacaaagtgcacggtacagagccgccaacaacgcggaaccccagctccactgaggcacctcgcctaccgcggcgtcagcgatgctcctggcgtagtgcacgagtcccttgtcgacggcgtgcccgtgaccgccacagaacatcacccagccaaaaagccagagcaagtacgcctccaaacatcggctgtaggagtactcgtcggcctccgcctgtagctgctcaacctgcaagccgtcgataaaatgttaggcaccttaactgcggactaaatatgtaatacgattgtcatttcggtacaaaaacactcacggtgaactgaagcagccacctcttcgtaggtccggtgttgcggtggtgtgctaacggctcgagcgggaggtgcggtgcgcgctgtactagtgcgaaacgtgccatcagattgtcctgccagtccacagccgtggtcactggcccaacagcgtctctcgcgagcggtagccccaacaagtacgatacgtcctgtagggtaggggctacctcaccgcacggcaagtgaaaagtgtgcgtctctggcctccatcgatcgaccaaagctgctaggagggacctgtccacagtccatcgtctggccgggtccgcgtcgccggccgcagcctccaccagccgacacatcggtacgaggccggcctcacgtagcctgcaataacaaattaatatgtcattataaaaaatattacagtgcaactaacttatagtaaaacactgttcgtacctctcgacaaaggagtcgtgaaccgtgagtagctcaccgcacgtccgtgcccggaacgtcccaagctgagccccctgcaccgcagtaaggtgagaccggtgtcggtgatctatcgccgggtccaacaactgaggtgtatcctgacgtaccatctctgaaaaatatagtgtttcgtgttagaacaattcaaaaaatagtaatgtaaaacaaaagataacttgcaaaattatgaaatagtaataaaatcatgagattaattatgtacaacaagagtacaggctatttaaatatagcaaacgttactaatggtacataacgatgacgtgcaatttaacatatatgtagagttcaataatataacataacattacgtgtcgaagtccgacatacatcagcatacctaaagacgttaggcgccttagtccgacgttacatcacgagacctaaagacatgacatgccgaagtctgacattacacgacgaaacataaacacatcgataagatcgaaacgaattacaagcaaatccacatgccgacatagaacataagaactacaccacgtagccagacgtggcacgacgacgcctaggacgtggtcgagtggaggtagtgccttcacccgtagggcgagctccatctgctgctgatcctgatagtcctgcctccgccgcacttggtttctccttgtctttaggacaatgcttgtaggtgtgcccatgttcatcgcatttgctgcaacgcttcaccctgccagtctccgactcgtccatatcattgcggatgcgacgagtcctcctccttccagccttgcctcggagcttcgatgggtcaggaatattgagtacttcatcgttagtctctgtgaactccccagctatgccgaacccataaatctcgccgctccatgtatgatatattgcttggttactgaagtactgtgacacatatactgcatctggtatgccacactccgctgcggcagcaatgacatgggtgcatggcctgtggagcagcttcggctttgcacaagagcaatgacatgtgccgtcggctttgagaacacactcctgcttcactctcttgcggtagatacccctgcctgccttatcttgacatagtatctcaaacctgtgctgttgggtaccttgcactacagctcgatgtttcatggcctttttacgcaactcctctagctttttctgcatgaaagctccaaacaaaatgctgttgttcggcatagagggaagaactgcctggaaccgatccgtaaaatacctgcatgtcccatgtaaaatgaactccactatgccaactagtggcagtccacggacaccgcgcatcacccagttgtaaacttctgtcaaatttgttgtcataattccatatctagcaccacctatgtcatacgccttgccccatttctcttttggttcatgcagaatccactgagaaaatttccgaatctccaatccagtttttctaaccaatgttggactatccgttgggagaggtccaagagcttgaggaggctcagcaacggcggtcgatggagccgctgcacgctgatcactgcatttggctgtcaactcatctaatctcttccaaagctcattgaattttttctcctggttttgattgcacagcctcttgaacatgttcatgagctctttgttcttgaattgcttgaagaaattagctcccatatgacgcatgcaccacctactctgtacatcttcccaaacaccggggtatactcgttccatactcccaaactgcaactcttctatcgctcgcagaatgccagcgtgcctatcatgtatcaggcacacatttggcctcataccaacaacttttgttttaaccaatttcaggagccagtaccagctgtcggtattctcactctcaacagaagcaaatgccaagggcaatacctgattgttcccatctacccctattgctgttagtatctggccccgatactttcctgtcaagaatgtcccatcaatgcagagaacaggacgacagttcacgaatgccatcttgcatgcatgtagagctaagaacgccctttgcagcacactcttgctaggatgttcaattgaggggaatttcttcacttcgtaagagctcccagggtttctttcctcgataacaccaagcaggcgtggcaaattgtcatacgaggcttcgtaagttcaaaatctcatctctattattttctgtttggccctccagaccttggcatagctaatagtatacttgtatgtctcttcgatgtgtcggattattgaccttggttcatatgtgagattatcgatgacatgcacatacatctcagatgcaacaaatgcacaagtaatgttcctgtggtatttctgaacaccaggtagaaaacatgtatgcttggtaacgactgacactgtccaataatccttccatttccccttatacgcgtacactctctagggacaaccatctttttccttaacacaccgaacttcatattgcgaccagttcgacttggcaacccaaaactctctatgaagtgacactgcaaaatgttttaccgcctccttcatatcttctgctctactataaatcgctccctgaataacctcattttctttgtactcccatctcacactatcctcttcagagacgatcagcccagaaaaatcctcactagcccattctgctggattaatatccgtctcatcatctgacgaatcaccttcctctacacgctcgttgtcagaatcctccctctccatttcatccacaatggcaccgacagtctccccctcgtcggccactccacctggttgaatgccaactggagctactagcccccgtcctctcgtgcgttgaccttctccacataagtctcgtttacttcagcacttggtccctcgccatcatccatgttcatctacacacctggatccttcgggtgaacaaacggaaccaaagctagaggccacccgcgttgcaatgcattttccaaataccatctccacactcgagagttttgaactggcattagttcccaataaaaaccctcagttgcccgacttactataacattgattgttatgtcacttgtctgtggatcaactctcaagccctttattaaccatccttttatagaaggtacactcctctcagccggtctatcaattcccctttctgatacaataaaatctgacagatctaccccagttggcccgtaacggacgtttcctggtccatggtaaacttggaatacttgtttgttcgacatatctgtcaacgaaataactagatcatattactctttcatgcaataaacatctacaacgtaatatcttcttgtgtaagccaatgcaacggtaatgtattgattccaaactagcagatctacgtagttaccgatatctacaatacgcacttctagattagtacaactaaaacactaaaaatataatgcatttattcaaacaaatttttaaagaatacacgctatttaacttaatagtcacatatatgatctatgaatattacctgaaattggcgtctgaatccggcagggcttcgccccttcttctcttctcctcccctctcttcttttttttttcactggaattgaggagagaagaatgagggctgggggctgggcagcaggccttttataggcagcgaggcctgccgcccggccagagggcggcaaggggccgcctgcaaaataaccggccccgactggcttttttgcattcgggccccttgccgccccaccagagggcggcaagggttttcctgcaaaaaaaccctccctctgtcaccgcccgttcctcccccgtttgccacgtcatcttgccgccccagaggtgggcggcagggtctatttttataatttttttggccgatagattatttctgtaaatatttttttaaaaaaatctaaaaccgaaaaaaattcttagaggtaatgccgctacgcaaagaaagcgaacagaattgcgagcaactgagacttcagtttttcttctcactagcacatgattatcggatgatatgcatgttactcgatactgctagcatgcatacatacatacatacatacatacatacatacatacatacatatatatatatatatatatatatatatatatatatatatatatatatatatatatatatatatatatatatatatatggcaacatatcctatgcacacaggccctcacgtgtatacacgtgcacaccaactaaaaaatattaccaaaaaatatagaaaaaaccatacacatactttcaattgtattacacctagggttaaaatct

SEQ ID NO: 5734 - DNA, 1663 bp, Oryza sativa
attatagcactgcatatgattttcgcttacatatgtgtttataaaatagaagttaatgcattaacattatttaaagtacaaagattaatgataattacttggaaaaattatttttgtctgtaataaattaagtggataaatcgtaataagcaaatataattaataaaaattccaataatcatatatacttagcatatatatgaatgatattattatattggtaaaaactctaattaagatatgtatgtacatactgcatgatttaaaattaataaaaattgtaatcatcatatgtacttagcgtaggaattatattaaattaaatgctaaaaactctaattaacatatgtaaatgccacatgcatgatttaaaccttttaaaaattcgaatagtcatatataagtagcatatgaaagatagtaaattaaattgtgaaaaactctaatatatgaatgatagttttaaaaatatattaaatttaatacttttaaaaattctccagtcaattataattagcatatgaatgatagtaaagtaaatgttaaaaactctaattaacatatgaaattgccacttgtgtgatttaaaacttttaaaaatcctctagtcaattataattagcatatgaatgctagtaaattaaatgttaaaaactctaattaacatacatatgaaattgccacctgtgtgatttaaaacttttaaaaattgtaagtatcacatataactagcatatacatgatttaaacttgttgaaacctctaataatcgtgcgtaattaacatatgccatacatcaattgatttatatggataatcaatacatccaaaatagtttacatcgtgtacacaataattacggcacgtactttctcctcactattgttccctccttgtgatcgctgcgtgagtaaggggtgtcttcatttgataggaggatgctagggtcaatcgtcaccgtgaaagggggttgcccatccaactgatcgtaatcctcgtcagtcttgtactcaactccgacgatttttcttttgcctgggagaaccacttgacgcttaggctcatcaggccctctgcccttctttcctttgctagacatgtccttcacgaaaaagacttacgttacatcattggcaaggacaaaaggttcgtccgagtatccaaccttgttaaggtcaacagttgtcatcccactgtcatcaatcattacgcctccaccagtcaacctaacccattggcaccggaacagaggaaccttgagaggaccatagtcaagttcccatatgtcctcgatggcaccgtaatacgtggcagatgttccatcgtgtcccatggcatcgacacgaacaacgctgttttggttcgtgctctccatgtcttgggctctcgtgtagaatgtatacccattgatctcatatccctggaatgtcgcgatcgacccagacggtcccctcgccaggaaggcaagttgttggttgatcgactcgttacccatgagatgttgtcgtagccacgcggggaaagtatcaatgtgatgccgtgtaatccatgcatccgacttaccgatgttcctggcgcgaactagagccaagtgcttctcgatgtagggagctaccaatgaagagtgttgcagaacagtgaaatgggctttacggaataaaat

SEQ ID NO: 5735 - DNA, 14733 bp, Oryza sativa
gatctgtctaagtgataactgtggaggagaggataagtgatagggattatataatacatatttaattttagtctcggttggtactactaaccggggctaaagattatcttgatctttaataccaaccgagactaaagtggtgatctttagtactggttattaacaccaaccgggactaaagatcctcggccccctgacatacatctgacaagggatgaacggttggtgttaccaaccgggactaaagataaaaatttttataaccgggactaaaaacaatctttagtcctggttctttttggatccgggattttgccggaccgaccaaaatggtttctccactagtgattgtagtgaatatccacggcttagagtagcattcgagcgaatcctataataacaatgagcgaagcagctttttaaggatggcgcatatctaaatttctcgttattttctatccaactgtatattccaatattggacggctacacgatctaatccgcacgtgagccactgcaatctacttcacgtccggacagcatggatcgatgaccaacagcatggatcgatgaccacatatcggcgcctctcctatacatgcagtcttccctccactcgaatgaattgttgtatgcttgccatcaccgcttgtgtgttagagtaggtacataaagatattgagaaactaagcaatacccctttaccacaaataaataaatagtccactttgactccttcatagtgttccaaaactaattcctgaccctgaaccgtaaaatcagatatcttaaccccttaaactgttaaaaccggtcaaccagtttgactctctcggtagtttcggagagcggtttcgctgatgtggcacgttacgttacggtgttgacctggtctttgtcccacgtggcactcacgtgacattagaattaaaaaatatatatgagcccatttgtcattaaaaaaattgtggggcccacatggcggtctatctcttcacccatctttctctgtctctctcatcttgttacccctaggacatccccgacgagctcgacgcggcggggctattggcaccggtggtggctaccctggtggtgtccactggagctccctcgccgagctctatcatgctaccgtcgccatccaccactagtcatcgtcccgtgctccctcgatgtcccacgtgaataagaaaaggagaccagcggtggctaccccggtggcggcacaacgggcagtggcttgcttcaccaggcatggccagccaacgtctgctccttgtcactatcatcatcctgatggagctcccgcaggcagggggcggtgttgaccacctatgagagatggagctcgccgaagctcctccaataccacccaaatctaaccgaggcttgagagcgaggcttggcgtcgaccaccctccttcttacgtcaacgttagactaggtcaacattgtcacgtcagcgaaaacgctcttcaaaatcaccaatgagtcaatttgcactagtttttaatagtttagagggtcaagatatctggttttgtggttcagggttatggattagattcaggtcactggttcagggttatggattagatttgggtcacttttaagagagtccagttgaactttattcccttcttaaatagaacgaagtctgagcccgtatatgaacccaccctgccccctctcttctctcatactcgtttgggcttttgcaggagaccaattgcatattgcgtattcgcgatcccccgggtctgctcactgcgtgagaagaagagatgatgcaatcgatggtgcggtcggcggcgcggcacgcggtgtacgtgctgcggcggttcggctgcgtctgtgagagcagagccgccgcggggagaagcctgagcaacgtacgcgccggtgagccgccggcggcgctccgggaggagaagaagaagaagagattattttctttcaggatgacggaggaagagaggtcgagggtcttccacgccagcgtcatctggggcgtcgtattcggccaaatagtcatcttcacgatgcataagcctcggtcttgcaaagaaatcatggccgaattagaggctaaggctgctgtttcgagacaaaattccccgaattaagatgctaggttccatatcgttggctgtttaccatgtactactagtatttcttgagtaatttgagtattagtatttgcttatttgctactgttcccttctttggaattgctagataaaattcgttcttttttttgggcaacaatacatgattgtgctggcaatgatacatcgaacgaagagtcgaatgcgccgtcggcgccgcctgtcggcacgcactggtggagaaaccatctttcgtcggtcggccgatttccacaatagtcccggatgcaataaaaaccggggctaaagatcatctttagtcccggttcaaaagggtaacgggcatatttgatctttagtcccggtttgtgtggaagccaccgagatagaaggcgctggagtgttgccttgtgttatcggcggaagagccagtttacatgtttgggcctgagtgagaaggttaagaatggaaagagatgggattttttttaatcggttaactgcacatgacattcagcccttgcaggagtaaaaagtctatatgacttaacgtcttagcatagcttttcttttaaaaccctgtataagcaaccgggactaaagatcatctttagtcccggttcgaatgctgtcaggacctgtcaggccccaccaggatctttagtctcggttggtattaccaaccgggactaaagacgtaactttagtcccggttggtgttaccaaccgggactaaagatcccggtgatctttagccccggctggtgctaccaaccgggactaaagatcttaactttagtcccggttggtaataccaaccgggactaatgatcccggtgatctttagacccggttggtgctaccaaccgggactaaagtcccacccctatatatatgtcttcttcctcctccagctgcccgagcaagcttcaaaattacttcaaaaaagaggggaggtcatgccaaaatttctattgaatttattttggtgattacatacaaatcggaggtgcctaaaaggtttgcaacttcatcctccaatgtttttttttgtcatactacatttgcacctatgttttgcacactttttttgtctccaaaatttagttgtaagttgatgagagagaaaatgtgtgtggggaagaaagaatatatagaaatttagttcatttgctaaacaaggttttataaaatagttgagaaggaaaactctagtgaaagttaatcttaaataatagaaaacaaactaaaataaaaattaaaagaagtaaaacacattaaaattagtttaaaactttacaaatagtttttaagaattatttggtgtaatattttatgatttttgtatgaataaagatatcttataattattgtatgactgtcattattgtaagaataattatttgtgtgcggtttttttgactcatgtagatggatcggcaatggatgtacgctgaccggcggtccaaagagtttattgacggcgtgcactattttttgagagtggccgaagctaacaggcaaaggggttttatttgttgtccatgcaataagtgtaagaatcagaaggagtattctgcatccaggactattcatttccacttgtttgagtcggggttcatgccaagctataattgttggacatcccacggagagcaaggtgttgaaatggaagaagatgaagtggaagacgacaatattccggactttgctcagtatgttggatttgaaggaaatcaaacgggcgaggaggaaatagctgctgatggtaacgacgttgcggatgatcttggtcagatgttgcaggacgccagggaggactgcgaaagtgaaaaggaggcccataaattggacaagatgttggaggaccacagaacttcgttgtacccaggttgcgagcaggggcacaaaaagttggataccactctggagttgttgcaatggaaggcaaaaaatggggttagtgacaaggcatttggcgatttattgaaactcgtcaagaacattcttccggggggaaacaaattgcccgagacaacgtacgaggctaagaagatagtctgcccgttaggactggaagttcataagattcacgcatgtccgaacgattgtatcctatatcgcggtgaggagtatgagaacctagaagcatgccctgtttgcaaagcactacgatacaagattagacgggacgatccaggagaagttgacgggcagctaacaaagaagagaattcctgctaaggtgatgtggtatttccctataataccacggctaaggcgtttgttcaggaacaaggggaatgctagaatgttgcgatggcacgctgaagagcgtcaacaggacgggatgctgagacaccccgccgatggttcgcagtggcgaaacatcgacagaaaatttaaagaatttggaaaggacgcacgaaacatacggtttggtttgagtacggatggcatgaatccttttggagagatgagcagcggccatagcacttggcccgttacgatgtgtatctacaacctcccccctggctatgcatgaagaggaagtacataatgataccgattattattcaaggccccaagcaacctggtaacgacatcgacgtgtacctaagaccactggtcgaagatcttacatagttgtggaagaaggaagatgtccccgtgtgggacgaggacaaacaggaggagtttaacctacgagcgctgctgttcgtaaccatcaacgattggcctgcacttagcaacctatccggacagtccaacaaggggtacaaggcttgcactcactgtatggatgaaacagaaagtacgtatcttaagcactgtaggaaggttgtatacatgggtcatcgtcgattccttgcagcaaaccacccggtacggaagaaaggcaagcactttgaacataaggccgaccaccgtacgaagcctaaacatcgcagcgggaaaacagtgtttgctatggttaaagatcttaaagtagtgttcggaaaggggcctggaagccagcatatagagagcgaagatggtcacgcggcgatgtggaaaaagaactctatattttgggagttaccatattgggaattcttgaacgtacgccacgcaatcgacgtgatgcacctcactaagaacctttgcgtaaaccttcttggcttcctaggtgtatatggaaagtcgaaagatacactggaagcacataatgatctgaagcatatggaacaacgcggcgaccttcacccggaaccaaaggagaaaggaagccattacttgagtccagccagctacactcttagcaaggcagagaaggaaagtatgtttgaatgcttagagagcataaaggtaccatctggatactccacgaatatcaagcgaataataagcacgaaggagaagaagttcacaaatctaaagtctcatgactgtcacgtgttgatgacacaactgctaccagttgtaataaggggtatccttccagacaatgtccgggcaacaataacaaagatatgtgcattcatgaacgcaatttcgcagaaggtcatcgatccggatagattagaagcccttcagaatgaagtggtgcaatgtctcgtcagttttgagttgatatttccaccttcatttttcaatataataacgcatctgctttgtcaccttgtgaaagagatccgtattctcgggcctatgtacctacacaacatgtttcctttcgagaggtacatgggcgttctgaagaagtatgttcgtaaccgtgctcgtccagaggcaagcatcgccaagggttatggaacagaggaggtcatcgaattttgcgtagaatttatcgaagaccttcgcccaatcggggtacctgaatcacgccatgaagggagactacggggaaagggaactctcgggaggaaagcaataatgacggtagacaacaatttattccgtaaagcccatttcactgttctgcaacactcttcattggtagctccttacatcgaggagcacttggctctagttcgcgccaggaacatcggtaagtccgatgcatggattacacggcatcacattgatactttccccgcgtggctacaacaacatctcatgggtaacgagacgatcaaccaacaacttgccttcctggcgaggggaccgtctgggtcgatcgcgacattccagggatgtgagatcaatgggtacacattctacacgagagcccaagacatgaagagcacgaaccaaaacagtgctgttcgtatcgatgccatgggacacgatggaacaactggcacgtattacggtgccatcgaggatatatgggaacttgactatggtcctcccaaggtccctctgttccggtgccaatgggttaggttgactggtggaggcgtaatgattgatgacagtgggatgacaacggttgaccttaacaaggttggatactcggacgaaccttttgtccttgccaatgatgtaacgcaagtcttttacatgaaggacatgtctagcaaaggaaagaagggcagagggcctgacgagccgaagcatcacgtggttctcccaggcaaaagaaaaatcgtcggagttgaggacaagactgacgaggattacgatcagttggatgggcaaccccctttcatggtgacgattgaccctagcatcctcctatcaaatgaagacaccccttactcacgtagcgatcacaaggagggaacaatagtgaggagaaagtacgtgcggtcaaccgttacggccaatgtattgccgtaattatggtgtacacgatgtaaactattttggatgtattcattatccatataaatcaattgttgtatgacatatgttaattacgtacgattattagaggttttaacaattttaaatcatgtatatgctagttatatgcgataattagaatttttaaaagttttaaatcatgcatgtggcatttacatatgttacttagagtttttaacaattttaaatcatgcatatgctagttatatgcgataattagaatttttaaaagttttaaattatgcatgtggcatttacatatgttacttagagtttttaacaattttaaatcatgcatatgctagttatatgcgatacttagaatttttaaaagttttaaatcatgcatgtggcatttacatatatgatttctaaaagttttaaatcatatatgattattagaatttttattaattttaaatcatgcacgtcgtatgtatatacatatgttaattgcaatttttaacaatttaatatcattcatatgctaattatataagattattagaatttttattaattttaaatcatgcatgtcgtatgtatatacatatgttaattacaatttttaacaatttaatatcattcatatgctaagtatatatgattattagaacttttattaattttaaatcatatatttgcttattacgttttatccacttaatttactacaaacaacaataatttttcgaagtaattgtcattaatttttcgactttaaataattttaatgcattattttctattttagaaacacatatgtaatggaaatcaatattcaatgcgtttatcagtagtcccggttcttaaccctaaccgggtttaaaaagaatttggaaatagcgggaaaatatctttagtcccggttgatgagaacaaccgggagtaaagatatagggctatatatattcccgatgcgcgccctcatcttctccaccaacacttagaagttttttccccgatcgatctcccttggcttctccttcgccgccactacctagggcatccccgcgccgacgccgccgtcgtatctcgccgtcgtctccgccgccgccgcatctctggggtgagagccgccaccgcctccccctctctctctctctgacctcgatctctctctctctccccaaaccaccgccagccgcctcgttgccgacgccgccgccgacgtcatcgcggccgaacacgactccgccgcgccgacgatgccgaccccgacctcgatgcggccgtcaccggcgacgacgtcgcgccggcagtgccgacaaagccgggccatgccacgcccgccgcgccacgacgccgagacaccacgacgccgccgcggcacgccaccgccgcgcaccgccgatgcccgccgccgccgccgcgccatgccgcagccgcgccgccacgccgccgctccactgccgccactccgccgctccgttgctgccacgtgaacgaacgaacgatcgtgaacgaacgaaacgtacgtgaatgtgaacgaacgaacgaacgtacgtgaacgtgaacgtgaacgaacgaacgtacgttaacgtgaacgtgaacgaacgaacgtacgttaacgaaggaaacatacatgaatgagaacgtgaacgaacaaacgtacgtgaacgtgaacctaacgtgaacgtgaacgaacgtgaacttaacgttgtacgtgaatgtacgtaaacgaacgaacgtgcgtgaacgaaaagtgaacttaacaagaacacgaacatgaacttaacgtacgttaacgtgaacgcacgtaaacgaacgaacgtaggtgaacgaaacgtgaacttcatgagaacgcgaacgtgaacgatcgtgaacgaaacatgaacttaacgagaacgcgaacatgaaatacaatatatgttactttgcgtttatcctaatacatctttttgtatgttgcagaaaagacgttgtcgtcaccatccctcaagccggagtggtagctagccctcaaaggaattcgcgcatgcaagtgatgtaaatatatgattgttagatttttaatgcaattaagactactagagttaatatacgacacttaaacttagcatatatgattatctagggttgtaatgtatgacacttagacaacttagcatatatgattacctagggtcctaatatacgacacttagacttagcatagtataagattattagatttgtaataagacttagcatataagattgtgtagggttctaatatacgacagttagacttagcatatatgaatatttgagttttaatataagattattagagttttaatacaagattatttgagttttaatataagattattagatttgtaattagacttagtatataattattgtctagggtcctaatatacgacacttagacttagcatagttgactattagagttttaatacaatattatttgagttttaatataaaattattaaagttttaacataagattattagatttgtaataagacttagcatataagattgtgtagggttctaatagacgacagttagacttagcatatttgacttagcatatatgattgttagcatataagattgttaaatcaaaaatgacctatagacttagcaactatttcttgtatgaacagatggttgatcgcgatgaggaacagataatgtacgatacaatcgcggatggaagcaaccagtactagaacgaagaagaggggaacgaggatccaaaccagtacttgaacgaggaagggaatgtggagagggatgcggaggggaaccaggaggggaacgtggagagggatgtggaatggaaccaggtagaggaggctagtggaagtcaaccctccgctggacagaagagggcacgtgggcaacgaggtgccgcgaagaagctagagggtcggcacatcataacgaaagtggacaaagacggctaacctagtgccccggcggaagcagccaagaactacgtacgacacagcggttgggttgtgcgggataacgtgcctgtcagtacgaacatgctaagtgtttcatatgtaatgtgtcacgaccggaaataacccaacgggcgttccttacgtgcgtgcattattccttgtcccaggaggcaaggtacaccaaaagttgatacaattcagagttcaacaagcggaagcgtaaatagttaattattacatgggcagcgaaggcccggcacacacaaagacaaacgagaaacagcggaagactagggcgacgaccacaggcgcttgacggcaggcacgagctagacaccaaaaccttcatcttccagagactcctcttctgggtttgggaaaaaattgagcaagactgagtacaacccccgtactcaacaagacacacccacaagtgcataataaatgcaagggagtacaagggaggtataacataaagggttaagggtgcagtaaacagcatttaaagatacttagttgctcaaagctattttgtaaacacgattctagaactatacaatattatttatcaaggccgtgaacccacacgaacctgccttaacccaaggcctacgatgattcagaccgaaccggcaacccgaccctgggtcccacctcgtcccaagccaacccaggccaaccattccacattttagttgttaagcaggttttaagaattaaaacactaacttgggtacattgctcggcttgcccataaccgagggcgcggctattcgaatagattatactctgatcagaggtgtacatctttacccacaagacacatcttcctcacgtgcaaccacgtgccacataccaccacggtatacggatggaagacgtgacatagttcccaacccatcctagccataaacaagagtaccgacccaaccccacctacggccggaacccccgggacaggtaggcaggactgagcccccagcagcaggacaccggccctgtgccatgatatctcgactaccgggccgcagctcgtgtagccttcatttgtcctagagatgtccatcgacccccgacttcgtccatctccatccgtgtacttttgtttataaccagtctgagctacaaactaagccttacccactagacatgtggaagtacggtagtgctttgcaacagaggcccgaagaccggtccttatatggccgaggtgctactatcaaaaccatgcaccccgagcccagcctaaaaccatttttggggattttgaatagagggggcggtgtgaatccaattccacaatactccaacaattccaaagtgtccaggtgatatgaatatcccaaagtctagagttataaaaccacctaatgttgcctaattaatcagcgaagcatctacctaaattcatactagtgggaccatgaatagagtacccactagttggggttttgtttatcctagggtgaacaaggtaataataaccataacaataataaggtcataacaaaggtaaataggcatggctagataaaacagtgataacgcgggaatttaaataaagcgataatgcaataattttaaagcaacataattttataaactgggattcaatatgttcaaggatgatgtgacttgccttgctcactttcccaaacgccggcttcaacttccacgaagagcggatcttccgaagctgcagcgtctacacgaccaacggaaaagaaaaggcttttacactaagaaactccatataacaagcagaaacaaagcacaaaaatgggttcttgacttcttaaggaaaaattagagacttgaacggtccaattccgagttcaaatggccaagttatggccatttgaagtttatatgctctttaaatgaatatttgcgaatttcttcatttaaattttaatttaaaatggatttattgcgtcagccgaggggaggggcgcgcggaccgggtccactggggtggggcccacgcggcagccccacggcccacggtggaccgggcgcacccgggctcgcacctgccggcgccgtgggtcccacgcgtcagccgcacctaagggcgcgggcggctgacagccgggccccacacggcagccgcggggcgcgcccgaaggcggccacgccggcacagccgacgggaggcggcgcgcccgcgcccctatggtcgccggcggcggccataggtacggcggagcggcggccgagaaaggggagggaagggggaaacgaatcggcggtccacggctcaccccgggtcgacggcgacgacgggaacggcgaccggagcggagcaaagcggcggcgcggctcgggtggacggggtcgacggtgctccggcggtcggcgagcgaaacggaggggtggacgaggtcgccggggatgcggtgaagccgaaggtggcgacgccgatgcgggaggtggtccggggcgacgccggcggcggaccggagctcggcggtgacggcggagagagagagcgacggcgcgagctcgattccgacggggagacaggtcggcgagtggcgcaaccggtgaagggaggcacggggaaggtttatatagggttgggaggggaagagagcggccggacgagggggaaacgggcgcggaagatccgcccgccattgatggcgccggcgaggttaggggaggggtttccaaacgaatccgagggagagagagagggaaaaatggggggaaagagggagggaatcacggggaatatttcccccctcttgattgcacgcggggcggacgggggcggcgggattcgcggcggcggcggcggcgctagggcgcgggcggggcggcgggagcgacgggaggaaggggatgacgggtgggccccacctgtcagcgagggaggcgggcgggcccgcccgtcagcggcacgccacgggcaggaggccgaatgggccgcggggagaggagagggagggggagggagctggccggaccggcccaagagggagagagggagggaaagggaactttttagggtttttctttttataaaacctttttaactttgtttatttcttcttaattattatttgtgctctgaaaattccactaaaatttatttacgccttttaggcttttaggaaatatacaaaaatcctccaagccttatttgacttttaactttgcacattttaattgttggaggctttcacacggattttaattattctaggcataatttcgaggatgtattttagagtcgttttgggacgcgacataatgcatcccacgcacattgcagattccactgggtctttttactcttcgacctggaggcctgcaccgtcaacgtatatgactcaatcgataaagaagagtcgatgtttgacaaggtttttgaacttatagacaggtactgtcataagttcctatgttaattaagaatcttgttatatttaattactactacgaatcatagctttaaactccatgtagggcttggtatcggttccgtcatttggtccgcggcaaatggagagaaagacttaggcggaagttcaattttcctgtgagtacacatgctctacatttatattcaatctccaattcaaatacataaaagtgtatattaattagatctctcgccgtttgtcatttatttatagtgcgcaaagcaaaagcagggaactaacttgtgcggctactacgtgtgcgagtattgccactaccttgcagaccaaatcatcaccacaagagagctcgatgtacgtacaaataatatgaaaatttcattgcgtacgtatcgatttgttgtttaattactaattaatttcatacattcatatagtttattcgcatgagggataacctgatcacacacaaggaatttatcgcggcggttcaagaacaactcatgggattcatcaacgaacaaatccttgatcccaagggtgaattctactacgacggaaatacaattcataggtccttagcttctgagataacgactactactacgtcgaaatcgtagctagctaggacatcataatgaattggtattaatacatgtctatttttctatatgcatgtacacattttctttaatgtaaatatatattttgggcatatatatatatatatatatatataattctactacgacggaaatacaattcatagttccttagcttctgagataacgactactactacgtcgaaatcgtagctagctaggacatcataatggattgtaattaatacatgtctatttttctatatgcatgtacacattttctttaatgtaaatatatattttggtcatatatatatatatatatatatatatatatatatatatatatatatatatatatatatatatatatatatatatatatacacatatgcatttgcataacatatatatatatatatgtataaatacatatatattatgcatgtatatgtattgaaacatatatatgcatggtttttatatatatatatatatatatatatatatatataaaccatgcagcaacagggccatgcaaaaaaaaaaggtcagctcgatctttagtcctggattggtagtcccggtttgaaaaccgggattaaaggggggttacgaaccgggactacaaacgctttctccaccagtgtcccttaacaacaaaaccagaaatgtgtacccctaaactcactcaaaccgttcaaaggaggtcccatggcagtatatatgggtggttttcattgacgtggcatccaaatcagcaaaaaaaggggtccacattgtcggtgacatgggaccgggggtatcgtgactagaggcttgggcagccgcggtcacccacatggcctgaccccctcgggggggtcgggcccgagggtgacgtggccacccctccctctgtctccccgaggggtcgg

SEQ ID NO: 5736 - DNA, 16970 bp, Oryza sativa
acttctaatattctttattttttttaattctgaatttctattttttttcttaattgtatttttatatggactctatactctacttctaatatttcttatttttaatttcgaatttcagttatttcctaattgtatttctatatggactgtgtactctacttctaatattccttatttttagttccaaatttcagttatttcctaattgtatttctatatggactctagtctcctcttctaatattccttattttttaattccgaatttcatctatttctaaattatatttctatatggactctgccttttctttttctccgattaatgtgagaatttctaggccatgggagcgaacgtggatgctcctttttctattcctttaataatataactggctgggtggcccgcacaattgtgcggctagcacccaaacaaaatcatatatattagtatgattttacttaaaatttattaaatagctatctcattgtattaagagtttgaaagaccaaaccttatcatccctgtgtttctaattatattgttttttaaaagtcacaccaattgctactcctcatgtcatctccttctttatttgcttgctcgatctaccactatttctattcattctccttataacctttaaaaattggatcttatagtttttagagtttattgttacgttgggtttcgtttttataatttctagacgtccagtcaaacgttgctattatactcttctatagcccgtccactgtctcttctctttattatcattgagattttaaaaatcgaacataattatcgtttgggttcatttttactttttagaagtcccgccaaaccgtcagcggctttgccattgtacttctctatggctcgtccgctgccactgttattgagattttaaaatcgaacattattatcattgtttttttttactttttacaagttctgaacctttaaaaattgaaccttgtagcttttagagtttatttgtcttgttgggtttcattttttataatttttagaagtctcgtcaaacgatgccactttgcttctctacggcccgtctgccgcctactctttattgtcattgcgattctaaaaccggacataactatcgttggaattcattttttattttctagaagtcccgtcaatcgtcggcggctctataactatactccaatacacaccgcctgctgcttctcctttttattgtcattgagattttaaaaatcgaatatgattatcaatggggtttatttttttttactttctagaagttccggtaatcgccttgctcgtttacttcacgaactatctgtcatcctccttttaatcgtcattaggattctatttagtgctttattaatagtttttatatgtcgtatcaaccgccaccactctactcttttataggcctgttacttaatttatcccgtcatatgttttagatgatcttttatttcaatagtctttatttttatcataaattttagttatttataaattgtattcctaattgaaatcttatttttctttttctaatttcaaaatttatttttttttcaaaatttaattaatatcgtattgtgttcttttaatatatttttttattttcaatttcagttgtttcaaaattgtattcctacttgaactctcttttagtttttctaattttggatattattttatttttattctaaattttaattaatctcgtattgggttcttatatgtattcttctttcaatattgcttatttttaaatacgaattttagctaaatttaaattgtattcctacttgaactcttctttttttttatagtttcggatattatttttattattattcccaattttaattaatctcgtattaggttcttatatggactcttcttttaatattccttattttaattccgaatttcagctattttaaaattgtattcctacttagactatcattttcttttttaattttggattttattttgaattttgattaatcttgtattgggttcttatatgaaaacttctttcaatattgcttattttcaattccgaatttcagctatttttaaattgtatttctacttggactctcctttttttttctaattttagatttttttatttttgttttgaattttgattaatcttgtattgggttcttatatggaaacttcttctaatatagcttatttttaattctaaatttcagctatttttagattgtatttctacttggactctcattttcttttttttctttttatccgattaatgtgggaatgtctaacccccacaacgaatgtggtgtgtcctttcaaagctgttttaataatataatagatagatagatagatagataaatagatagatagataaaaaaaagaagaacaagaagggaatagggcctcatctatgtcgctccctctccagggcgacatgggcggcgaccgaacaaacaccgccgccatctccttctttctcctcctaccttgccgctgcccaagcggcccaccagcaaagccgccggccacgagggcggtggcggggctctctctcccattgaaattttacgtgtggacttgcatgttgtgcataagcaaaatttaaccgaacatgtgtctagtgaatagtggtggagttctcacatcagcactgtaattccaatggaccgagtatgaatgaacccatggaatcgacctattaatcaagccgtcaagacgaaccaatcactcgttcaaaatctatggtgcataattagctttagtgtttgaaacattaaatatttcagaatgaatcatcatatggttttttgtagggaacatcatatgatttttgtatgaatcgaattttgttttgtttctatgactaatggaacaggggttttgcccttatgatcgtattgaaaaaaatgtacgaatcagcaaagacacacactacttgttcttaattgagtctggtgtgagaccgtatttgatattgctcacagggcttgttcgtatgaatgtgaaacactatgatacagacgtgacattgatttcaaaaagattatcatatattatacatactgtgtgccgtccatattatcatgtggtaaacgtacggctgctgcacggctgcacttccatctttcatgcactcatacatgagaaagaatgcataaagcttgagctttatgaccagccaaattagtcagaaacgtagactgttttaattgtcaactgtcgtaaggtcagagacacggcaacggcgaccaaccaaactctactcggctcctatgtgtgcaactagcatatgttcgacgttaggcaccaacttaaccataactttaccttcacctataaaatcaagatccagcaaaacattgtccaagatagctcaacatcatctaagaagcttttgaagattgaaagaaagccaatggcgacggcgagggtggtgttcttgctcctgtttctggtgcagatcgtcggcgtcctcgcagccgcggcgaggccgttggaggagaacggtgtcgatggcatcgcgacgcagatgctcgccgccgtgaaatcgaggggcaacaggcgcacacactgctgctgaaggcaaatgtgttgtaagacattgatgatgtacagcttagccattcttgactagtgcagagaaaagaaagcatagaagttgtgtgagggtgaccagtccagaggagagaaagcagagcagaagatgtgtgcggcaatgccaagttagtgcttcatttttttttgttgtaaaaagtgggatgatggatacatattcattctttatattattcttcaccttttcaccatagacacataaaaatatttggagattaatttggctgactattttttgtttcaaaaatcaatgtgttatatggtgtcgctaactcactatcagtttttttctcccttctttcttcttaattgattccacgcctatgtataactagaacgatagactttgtaaaaattgtactgagattttgaattagttttttctgttcgtttcaaaagaaagcttagcatttttttcccgaaaaccatggaggaaaacagaatactgtctcctaactagtagctaagttctcctagctagtagctaagttctctcacaattgttaagtttattttttctagttttaagcttgtgttgagcaaaagcactcatggatgtgggtggtgtgtactagtgtatatctgttaacaacagaattttgtttcgtatgaacaatatcttccatgataaattaaaagataaagcaagatctgtgtacaaagttggaccctatgtatagtgcggctttttaatggagactttgaaccataaaaaaacaaagtaaaaaaatcttagaaacataatatacatgcatgtttcattttaatgtatatatctaaatgataaatcatttattttgtttgatagagcaaacataaacaatatgagtaaatagattggtctgtacaaaataatcccatcagaaaaataaataatgattatgggttacaattaatcccaccttgataaaaaaacattatttatgatatattgttagtccgtgttaataagcattatagaggtaacaaacagcataaccatgtcagtgtctgatggttgaactagacatcttgcaaaatattatatttaacaacaaaaaatatgaattaaattataaatttcgtagtttagtaataagtttatgcaacaaagaaacttattagaatattaaaaaacggcataataacccatattttcaatccctacattttgtcacgacgttttattgtatagtggttcacttcaatatcttgtatctcatgctatagagagttttagcaaacatatagttcggaagaaagaacaatgtaagaatatgagctatcatgcagcaaaatatgttcaatggtctatctagcttgcattgcattgagagagagagagagagagagagagagtgtgtgtgtgtgtatatatatatatatatatatatatatatatatatatatataggaagcctatattctactcccaggagtagctactcctattgtaaccatcggacacctgtccaactcacatcagggtttcgggcttcaactcactaacggattgtgagaaaagatccattaaaccagcgatgcagaaacttgaatattctttttttttttgaaaattcggatcactgcgctgtgttctgcatggtgagtcattttgaatgttctgcatgcatggtttgttacccgcacgcatgcacgaccgagcgaccaagagagtagttagtgtggaggttgttgtattgatactctatttaagttgacggtgatggaggacagaaaatgaggaccacaattatctttcggatttgtgaggaagaagattttgttctgcaggtttttgatggagcagaaactctccggtggaaagggcagaatgtcgtcggcgaggtctgttgcgtcgccttccgcggcgcgagtaggcggaggctcgtcggcgcctgatgtcgagcagcagaagtcggtggcggccgtaggcgcgtcgtcgccggtgagtagtagcaagcaccatcatatggcgaaggcagaagatggaaccattacagttaatggtgacaagcagcagaatcctgccgcagataggtacacattgaagtttagttttagtttatgttctgttgaaattttttctcttgtttgtttgtttggctctaactggttattgcgttatttggtcatcaggaatggttttgtgcgttgcatggatactgctgcccggagtgaagtgatgaaccactctctccaaaaatatgtcattcatttcgatggatgtcatcctcttcccatgagaaatcctaggaagagatgcgcttggtgctcactccgtgatattcgcgcggcttgcgacatgaatttcagaagcaacgaaacaacccgggtcaacagtaatggttgcgaacatgtgtccaatgaaaatatgtagacaatagtgtgatgatcaggaaaattgtaataagggcttgctttctgcacggtcgtagattagtcgtacgaactgtctctaattttgtatggtattttctatgaggaaaaagcgagtagtatctaagtttagaaatctgtatcttctgctgtttgggaagtgaaataaaattgagatgttatcctttcatttatctatttaagttgtgtgtactgcaaactccctgttgtcatcgtgaatgcaatccttcaccaagatgaagttcttcgagcagaatattgtacaagaatggagcagagatttcgaattggtttctgtgagtgtagcgttgcgtactcggaatgtttgttatagatgctatttttgtggcggtatggtttcatcagaattcgttaatgttgctagtggctgactttccggagtccaataacatgcttcgcacgtaggagccttgattttcggggaggttgttgaacagctaatggaaaataaaccggaattatttgtcagtatatatccaaccagctggaaaaaatgacgccctatagcaaattctgtttgccaaaaggggtagctaccagaatccgtgctggacagaaacaatattcgcgaagatagctatggaggaagaaggctggccggagaaaggtggcgaggatcatagtggacaacccatggacgtagttccgttggaaaggtattttttatgtcagtgtgattgtagtgtacaatttccctttctgcattgttagctgaattctcatttttttgatcctaggatcgtggttgagggggaggaagatagtgatctgctgcctatttcactctctgacccagccattctgttgccgaaaattgggcagaccttcaatgaggactctgatggctatgcgttctacaatctgtacgctaggttcactggttttggtataaggagatccaagaacagatacaaagatggaggcgtgaagtccatgcaagagttctgctgcattcgcgaggtaaaaatctttagtgtattcttttttttttttttgaaaaccatggtttcgtattctcgtaagattggcaaggttctatagtgtgatgcgtaggatcatcatttcataggttttacgtagtaaggtgttcctgtaatttatgcagggtagagataattccgtcactggtccgccgaccaggataggctgcaaggctatggtcaggttaaatcgttcttctgaaagtcaaaagtggagagtttctgcattcgttagtgagcacaaccatgaaatgaaacgggacctgcagcatactaaacacttccggtctcataatttcattgatgaagggacaaagaggaacataaaggaaatggtagataatgggatgacacctacagctatgtatggattactttcaggtatgcacggcgggccatccttaaccccctttacaaggagggctgtgacaagaatggcgtatgccatcagaagggatgagtgtagcaatgatgtgcagaagacactgaatttttttagggaaatgcaatgccgtagtaagaatttcttttacaccatacagattgatggtgcttcaaggattaaaaatatattttggtgtcattctctttccagattaagttttgaccattttggggatgcaatcacttttgatactacatatcagactaataggtacaacatgccatttgggatttttgtcggtgtaaataaccattttcaaacagcaatttttggttgcgctttgttgagggaggagacaatcgaagcattcaagtggcttttccaaacatttactgatgcaatgcatgggaagaggcctgtagcaattttaacaggtatatgtttatttggatggatcagtggtgtgtttaatgatatgtcttctgtttttaatctcgaatggttgtgaacttcttttttagataactgtcatcaaatggaggtggcgatcaaagcggtttggcctgaaactattcatagagtttgcaaatggcatgttctgaagaatgctaaggagaacttggggaacatttacagtaaaagaagcagtttcaaacaggagttccaccgggtgttaaatgaaccccaaacagaggcagagtttgagaaggcatggtcagatttaatggagcagtacaatctcgagtctagcgtgtatttgcgcaggatgtgggacatgaagaaaaaatgggctccagcttacttcagggaattcttttttgctaggatgtcaaccacacaaagaagtgagagcatgaatcatgttctgaagaagtatgtaaaaccatcctcttcgctacatggatttgcaaagaggtatgagaatttctacaatgataggattgaagcggaagacgctgaggagcatgatacatacaatgtatgtttttttttaattatttccatatgatatatcggtgtatggtactttctgctgaacatgttataatatgcttgtcatttctcgtgaactgtaggagaaggtttccacattaactagctcgcccattgagaaacatgcttctcgggtgtacactaggggtgcattttccaggttcaaggaacagttcaagctaagcttttcatttatggtttatcatacttctgatcagcatgttctgcagctagtccatataggtgatgacacattgcaaagttggggcagcaaagaatttaaggttcaggttgacctgactgaacaagatctgtcatgtggatgcaagctttttgaacacttgggaattatatgctcccatattatcagagtaagtttgaatattaagcagttctcataacgctgttgtgtttttgtgtgttaatgcatagtgtttttgcaggttatggtacagtatggtttcacggaaataccgaagaagtatatcctgaagaggtggacaaaagatgctagagattcaatcccaaagcacttggaggagtcgtacttgaaggataaggaggcggcatcatcgagaacttatcggaacaccctcctgcacaagtctgcacttgatatggttagacttggtggtactagttcagaaacatatgagaagacagtggaagtgttgacaaagctgattggagaacttcaggtcatgtgtacttcgcaagttgtaaacaacaaggaaattcactacggagatagaacaattgggaagaaacctactggtgtgcaattggatgatagtgtagacagttctgactcggagcatggaatgtctgatgaattttgtgtagccgatgaggacggcattggacaggatgtttctgctggtgaggattcagttgatgtggacatgactgatgtcaacgaagaagacatactccctcctgaggttagaagaagtcgtggacgaccgaggagtaccagactgatgtcgaagggagagacatctagcaaagcaaagaagaagaaggctagtgagagtacctccaaggacgagtcgaagaatcacgccaaaggaaaaaaagagtcaacgaagcagattaggtactgcaagcaatgtggtggtcatggccactataagagtacatgtggtcggaaatctagttatgagaggaagaagtgagtgtaattattctgttcaatgttctgcagggttgatgttagcatttcgtttagcatacaatggaaattttattattattaaatttcgtcagcagaacatgtagttcattttgaatatttacatttggcaaacattgtaggaaatttgcgaacactagttttgtattttcctattttctgttgtgcctcagagtatgtggtgaagttgtagtctttggaagcatcctattggagcagaacatggctaattgtttctgctagaggtagtgttggacgaatcttcgtgggagccaaaaacgtttttcatcatgctctgcatcgggagcagaacatgaaaagagtgcgtgtggtgtttttttagatggggtttagcacggtagcagaacatggctagtagtttctgctgttgttctggtgggatgttttctcggcagcagtacatggctaatagtttctgctgttgtttggtgggatgtatcctcgtggtagcataaatcaattggcatactgttctgctctgggagcagaacttgtctttttttcgccgggcatgcactgatttggatcgtgtcatgatctgctctctaagtttggaggagagctgatcacgtaatgtacggcaacagaagatgtaattagtttgtagtatttaatttgccataggtgaacatcatggatttgatgttgggaaaatctaaatttatgatatttggaaggtaaatgacaaattcattaatttgggaagagaatagcagagaacatgaagccttgaaaaatgttgaataagaacaagacaaatattattgggacctaacaaattttagataataatgatgtaactgaatgtaatctttattttggcatgcttgcataacatgctcagatcttgttagataacttcaggcagtgaacgacgaagtccggcagaatagcttcgttgcctttgaatgacaataagttggacagaaattcctttcgaagatctcgttgatcctgttgttaatatagaaaaatatttattataaaaggaagctacttcaatgaaacttaagttgaacctagtgtgtacataaaactcacagattttggggggttcacaaggcgagttccatcccagtttcgcatgtagtagagcacgtgaaaggcacattccagcctaccaaaattgttattattgtaatgaccataaatgagtagaatggaaaaattaatttggatcaaattgggagcatgaactggaacctattgtttatagctgggatggccgaagggaactcagaaacccagtttggtatatcctcgtcccaatctggaaatgcaagcttcatgcactccttcagagcagatgaaatgtgaaattttgtttttaagtgtctttctgctgtatcctctgatcttttcgaggcgtctctcagtgggtcaagaatgcataattttttttctccatatcaaatgcgtatagagaatagtgcaatggttgaagtagtggaataaatatctgcaaattaatattgacattgcaaaagttagtggcctgaacatttgcacttgatgtactgaatttttcaagatgctgttaattatcaaaccaggtggcaactaggtacgtcatatggtatcagagagtcatctttgaatgaggggagatgatcctctgggttccactggtcatcaccagctgttgcaaacatctacagcgccatattgtgttaaaacacaccatatttcagaattaaaatagtctagagtaattggaagcacttactgcaaaatcttgatttaagaaatgtctccagcatacaaaatcagttcctccaaatctctgtatctcatccgctgctaatacttgaactgcaacattgaatgtttcttcttgcatttgagtgtctagccgaatagcctgttgtatgtcatgtaggcttaatgacatagggacaggttgggagatgtgaacccagattttcctgttaaatgtgatatctttacaattagtggtgaaagaaaggaacatttcaggtaggtggcttacattagagcttatgcataagcgattgaagttgtatatgtctataaatcatcaactgtttcagataggtggcttacttaagagcctctgcatcagtgagtgaaaccgcatatgtgtataaatcatcaagtgccttctggtcatgcctgacgaaagagtgttgcttgctcagaaatggtgatttcaccgaatggcttggtttaatcgacctctttggccgatcgaatcggatatcagaaggaccgccgataattctcctcttggatttatgtgggagctttgtacatgcgtactcctcacgcatgaaaatcctcgccccactcgtctctttcaacatagagtacggagagaaactactaagtttagtttgttggtcacctattatgagacacaacagtaagagtgagacatattatgcgcatgtggttggttatgaatgaaaatgaaaaactgatacaggcttgggggtatcattacctccatgcgaagagggagttttgtgcactgcattaccttatccggatttgtcagaggcatctactgactttgagattggctgatctggggtacgtgctaaaaagttgagttcttgttctttgtcagagtcttcagccacattggagatgtcatgacctggggtacatgccaccatgtttgcttcttcgatatcttgtgttattcctagattaaagcttgggggctcgatgtcagacctggcatcgtaggtacgatccacatggatagcctgtgtacagatatatcaacaattcttatggaaaaatggattctttttatattgaatagattgacaaactacatgagattgcacctctatcaaactccatctgtttcactagctctttttgctgatcaccaaaacctgagaatagatctgagagaatagcaggagtgcacctggtgtaaattttttcttgtactacctttttacccttgatgccacttgtttttttggaatttgatactgcagaaccaggtagctgcttccgctgatgcatctttcttgcttgagcagcatgaagggctctagtgaaaacagaactagagccaccaccacctgaaacattcgcacctgctgcaggactgcaaaggtgctgcaaatgcaaaaacataaacaaaacaaattagtaagagatacgatcaaaaaaagactcaaagattaggaaaaaaaatccatcaatggctgccgcgagcttcgacggcgccggtgttggggcgctcggcgtgcacgcggcacattggggcgctcctctccggcagcctgcagcctgacactgctataccgtaccaatgtcaggttggtgctgttcatcgtcgccatggccggcaccacattcactgcaaaataacagatgaatatggcaacaaaccttggaactggagttctccatgctagacctttcaatgttatctgcaacgcagccgccggcgaggctactaatctgagtttagatgggttaagaactctcaaaacgcaaagaacagttttagatcgataatgttctgctcgacgggataatcatcctgctttctcgctttggataagcaaactgaagagcgaaaaaaccaccctgaaatatatctggtcagctgtctccgaacaaaattctatctacaacaaactcaggaatcttgattcaattttcgaatctgctacagaacagaaacaatcttgttgaccccgagggaaaaaaatacgggtaaaagaaaacgggtaaaagtattcgattcaataaacccgttaatagtcattaccattatctgggcaaacgaattgaattggtggcggacagggagggagtagctactcccggtagtagtgatatatatatatatatatatatatatatatatatatatatatatatatatatatatatataaaacgacgcttaacacggtaaccagacccacccccactccacccattttgattatgatatttgactactacacgtcctcagtcccacgtgctgcgcaaccctcctccctctccccccacaccaccaatgcgtatccccatagtaccacacatattgattcgcgagttaaatctttactactacatagctcaccatacatactcatatttagtcagttaaattttatctaagtgttattcagcaactataataaacatcacgtttagtcatgtatatttttttttcaaattttttaggaatcattttgactcacattgaaacaaatcagttattttttaactgccatcgaaggtagtctcttttttttttcactccaactcatccgacactaagttattttttaactatgaacacaattaattgttaactacgagccattttttttaattttttccaggcacaatgtatacagcagcgatttttcagtcatttcaaactattgtagttatcgtctccccacttttttcggttagttttttttttctcgccggcgacagtgagcgcccttcttctctcgccgcctgtgcagcggaggtcgcccgcgccgccgcaagttccttccaggcggggataagcggctgcgaggtaacgtgctacacaacaccgccccaaaacattttcccctattggatggcgacttgggcgctccatcgactgctggatggcaccatgcggttgaggctgcgacacccccccccccccccccaaatggcaccgtcggctgcccctctgtcaccgacatccatcccatcgccggatctaggagagcttcgcccgaatcctcttttgattcttgcgtgtcggtggtgggtggagagcagcggtaccaacgacatttgaagcacagagggtggcaggattcggagaggaggctgcggatctggggtccgatgggtcgttctccctcctcccctaaagcggtggcgaagaatgtcagtaaattgtcgttgccgtcgtgcgcggcaggtcagcgccggcaaagaatacaggaggtccgtgtagcagctgtagtcaattgaaatctatttcaggtacagctcgttagttcctatcaactagtagcgttatatggtatcagtagtttttttatcagcctgtattggattgcaccgtcgttttgattttggatgagctatgtgcctgtgttggctgtggggatgcggttttgttaagattgggtagtaaccactgattaatgcctgccgacagaagggcatgcgtttctcaattggcggccaacgtgaacctttgtttcacaggcaacttcattcctagccaacgggatgaagttaatatatgtcaggtacctaacagaactaatctttctgatgttttgactgatctttgattcatgtcttttgtatccgtgtattgagtggacacatccaacctaaacacattagaagttgtttggtggatggcttcgcttggtgctataagtgtatatgtgatgattcatgcatgcagggctgttcttagcttctgaaaacaacagaagaactaggatgatctgtagatgtgcacatgtggcctagagtcagcttaggtgtcgcattctctgacaaacgattgctttggtaaaccaagactggtgttttttattagtactaatttggtttatttgattagttgtatatacaatcaattgtttcctgtaaataattttgactgaacgttacaattgaagttattctatgtcctccatggcattcagatggtaactgaaaatatatgatcgctggtaggactatgtgctttcaactctgtagcttgcagcagttctcttggtaaaaacgagccaaaaattctctaataagcttaatccacacgatcaacaattcataagcctcttatcaacgctttgccacttatccctgatatgtaccaccaaatgcccatttcgatttcccatgagcttgcacttgcattaatttttggcttttcagcctgcaaacatcaccatgtcctgtgcaatgctcagttgctcatagcctcatactatgagtcaatccactaaggcatgcctactcatagtgcatttatatatggcaaattttggtcttgcaggaacacaatgtaacccggtggactcgaagatgatgaaatgcatcatgcggtgacatgggaaacattgtcgctagcgccggaggtataactttcaacaatcactaataatgcacctctgttggttgttagtgcactaatcttttgaggcattactgattttatggtctgcatgtttaatagcggccatgcttgatcctgggctgcccatcctgattcctaatgctaccgccacacagtcctgttctacgctggttggttggcgagccagccgcctccactacaacattcgtccatcaaagatggatcccgtggagaagaggaggatctgctgatctgaatttctttgatgatttttgttggagtgtttatatcctttgtaatttttttacttttgagtttaagcatgtaatttgtttattgtatagtgtgtgtctgaatgtaacagaacccgtgtgtaaaagaaaatattgttaatatctgaccggcagtgatttatttactcacgggctgacatactgttgtagggtcaaaacaagtaattttttaactcaccgtgttaggctccaaagtaatttatttactcgcggtctaacagggacgaaataacaaggaatgatttttttactggaggaacggaaagaagaatcgaacgagagggagagaaaagcgggagtgggagcgtgcgccaaaataaaaaatttactcgtggctgtaggctccaaagtaatttttttactcgcggtctaacaggaaagaacggaataatagcagaaaaacttttactggaggaccgagaagaggggtggaacgagagggatgcggtgggattttttttccgggatcgggaaaaaacggaaaatccggaggccagcagtgatgagagtcgcgctactaactatcgtagcgccacacacgcgccatgtagcgctaccgtgtgtgattacatacatacatacatacatacatgcatatacatatatacatacatacatatacatatatacatacactggtggagaaaccatctttaatcggtcggccaaaatacacaatagtctcggttgcaataaaaaccgagactaaagatatctttagtcccggttcaaaaggatagagttttttttttatcttaccaaccgggactaaagatctacactaaccgggactaaagatctctattatctttagtcccggttagtgttaccaaccgggactaaagatagatctttagtcccggttggtaacaccaaccggaataaaagatcggcatgcgcaacatgggcggcgaagagtacgagaccaaatcgaggaggaggaggagcagttaatatattctatctcctc

SEQ ID NO: 5737 - DNA, 57738 bp, Oryza sativa
ctccttccgttttactgtctccgtcccatactacttctcactttgagtttttttttaaactacgcagtacaatacaaatactcacaacacacgcgctcacccttataaatacacacacgcaaactctaccctatttgagtttttggttgtactccctccatcccataatataagggattgtgagtttttgcttgtaacgtttgaccactcgtcttattcaaaaaattttgaaattattatttattttatttgtgacttactttattatctacagtacttcaagcacaacttttagttttttatatttgcaaaaaaattttgaataagacgagtgctcaaacgttgcaagaaaaaactcaaaatcccttatattgtgggacgaagggagtaattatttgatcattcgtcttatttacaaaattttagaattattatttattttatttgtgacttgttttattatcaaatatactctaagtatgacttatcattttttatatttgtattatttttataaataaaacgaatggtcaaacgttgtaagtaaaaagtcaaagcgacaattaatataggacggaggtagtatattccaagttgtttgattttttttcaaaatttttagtttaattaaatttataaaaataagtaatataatagtatttttcaatattaaacatattatcaaaatatattataaaactaatttaatattgtaaatattctattaaaaaatatgaaaacaaaaaaaacctaatactaatactagctcgagctccgttgcatcaggtgttcagaaccacccgtgggccatgggcccgaggcccatcctgctagccggaataagtccactttaactcccttaactaatgatcaaatctgattcggatctttcaactgcaatactggatatttctaccactcaactgttccacgcacaaaataggagagcccatcacagtcacgcaaaattggtgggcaagaaagaaaagaaacaacttctgcttcactctcgtgaaacaaaaataggagtagtgtagaatgtgtgcatgggaatagagtgaaaactatatgatccgctagcgcacatattggcaattagcatgactggttcggttactgcctcctatgaatacgtaataggttaacatttcagatgtataatatggtttatagttactagtttacacgttctttcaatatctcaactccttttctattttatgtgacttgtttatatgagatagtggagtaaaccagagagccattattagaaggagcgatacagcaacactgaatttaatgctcacatctaaacggcacgagcaagattataaatagtaataagaaaagaattggttttaaaaaatactcggcacgatcaggtggtttatgaactggagcagcagcagctcctcttccctaccagcggcagcttgttagcagcagctcatcttccctaccagcggcagcttgttctgcatcacgggcgcttccttcagaaggaggagctgcctcaacctcaacaacgtgatttcaggcgccatcatgctcccgaagatgtggctcaagaacctcatcatgctcgcctacgtctcggcgatcaggctcgtctcttcggtcgcactgacggcgccgctagtctgggccggcatggccgatatgtgcttccacatggcgggcagcagcctgttgaacatgaaccgggttgcccatcgccctcatcctctacttcctctgcttcgccggccatggcttcttcctgacagtgtactcctcgatgaagtccaagaaggattttcccaaaatacacttattaaaatttatttatgtgttgttgatggtaagtttactaaaatttgtgataacaattaacaatgtaaatttagaattatggttaatgaaaaatgaaaagtcaatggtgaaattaaattagcaaccggtttggtaagaatacaaacagattgtttttttattatatgcgtgcatggaagacgcacacactcataattattttttacaactcgtatatcactaatcatgcacaacatactcgcacacctcctaatcatcatcgctactacgttctcattatactcaccactgcatggccctcatatgttttgttggcgctcccatcatataccaggtctatatacatcgtgcagataaaatttaagctaataaggttattttgatcgtccaattaaaagtaaaaattaggatcagacgaaatcaacattaaaataacttattttattaaaataagttgtaccatcccttaaaaaaagttgtactacttataaattttgtaaagttattttacactgatagagaatggcgagtgcaatacgaaattaatgccaagtgcaacatacacaatttagcattaatatttttttgcattatgacgaaatgcgcatccgcaaaattcgcccccaaattgcacaccacccccgaaaccctagaatccatcgggaggtaaaagggaaagatgggtacgagaatggggaaactcaccatcaacgccacaagtctccacccaacggcgcaagggactccgcggggggagccctcgccggggccggagtagtcacaactgacgatccaggggggtgagtatagacctcgcacccggctcgggagagggccgctcctggggaagttgaaggatatggcttgcgctggggtcgggagaggagggaaggaggggaaggggaggatcaccggaatcttcgccagcggggggaggaggggaaagtgggtgtgggagggggggattgctggcggcgtcgccctcgcacgaatcgcggggaaagggaggagaggagggggtggggaatgatgggacggatccgtgaaatgttcgacgtggtgtggtgcggtagcgtaactgtgggcgatgggaaggcggggtaatttcgggcaaaagggtcgcgcccgcgcagggccgtacgtacacgagtgcgtgtaggtgtagggccgttagaggttgaccaccacgacatgcataaatatgctccggctgtgttcgggaggtgaggttggcaactcacacaaccttacctctcacgcacgcaaaacggtgcgacgtgttttcttatgcttaattaaggatttacttattttttttaaaaaaaatattaatatggttttttaaagcaacttttcaatataacttttttgaaaaaaaacacaccgtttagcagtttaaaaaatatgcacgcgaaaaacgaggaaggtgagttgggaaagtttgcggaaattaaccgtgtgctacccgccactcgctccgttttatattacaaatcgtttgatttttatccaatgagtaatatgtaatactgtagtatttttaatataaaataaacatattatcaaaatatattaataaaactaatttgatatggtaaatatcttattaaaaatatgaaaaaaaatcctagtactgataatagctcgagctcctttgcataaggagtcaggaccccgcgggctgtggacccgaggcccatcctgatagccaaagcacgaaataggagagtccatcacagacacgcaaagttggtgggcagcttcactctcgtgaaagaaaattaggttattgacagtgtggaatgtgtgcgtaggaaaatggtgaaaactatatgatccgctagcgcactattggccattggtatggctggttaggttactgcctcctataagagcaggtataataggaggttataagtcagttataaacatattttaaagagataaaataggagagagaagagcagcgggctacagatctgtagacagctccagcacggacttcaagacataatgtgtgtatataatgtgtgtatgacaggtgggatcaggtattaatagtatagtaagcactattgtatgaatcgactattaaggacctgtttggcatagctccaactcctaaatattgctccaggagttgagtctggagtggagttgtgaacctgcctaacccagctccacaactctagtacattttgtgagagagctctacccaactccactcctagttttggtggagctaaaactgtttggctgagctccagctctaggaggggtggagctggagctggagctatgccaaacaggccctaaattggctatagataaattggagcttgttgttggctatactattaaacttgctctaaatacgttacatgttaacatgtaagatgtataatatggtttatagttattagtagtagtttacaatttctttcaatatctctcaacttcttttccattttatgtgatttatttttatgagatagtggagtaaaccaaataaccatgattaaaaggagcgatacaatatcactaaatttgaagctcacatctaaaaggtgcaagcaaggttataaataataataagaaaatgattggtattaaattatactagtaagaagatatatggcacgatgaggtggtttacgatatggagcagcagccactcctctttactagcgacggctcgttctgcatcattggcacttccttcaggaggagctgcctcaacctcaacaacgtcatctcaggcatctgctctccgtgtcatatgcggtaagtggctcagccttgcactcttcaccatggtcggcgctatctgcttctacaccggcaaactcatcgatcgctgcatgtgcgctgaccactgcgtcagaagctatccggacatcagccacccagtgcgaattgtaaattgagatggggctgtgtaaaagctgtatgactgaaacaaactagaaatatatcgacaaaagtattttttaatgaaatccaaatacgcatatgaacgggagagaacacaattatttctccatttcaacttttgttgctataaaaaatatccttaacgatctataaataaataggtatggtctgcagagaatgatctacgaataaaatttatcttgcttaagaccattggtatggtctactttagctagtgaggtagcttgccttgccgccaactagtttttcactaatcaatggttaattatatgtgttaatcgctaattaggtgcatgaattagaggttaattatatgtgttaatcgctaattaggtggggttggtgtcccaaccagccccaagagtggatccgacactgtgtccatcttgcctacgatggccgtacctagccttcgccggctacggctagatggccatcggcctcgtcttataagtcgagctctaccttgtcgccatcagcttcctcatcctcgagggtgacaacatcgagaagctccttcctggcacggtggtgaagatcctgggggtaccaggtgtatgggaagcagctattcatgctcgcggtggggcgccatcatcctcctgacgacgtggctcaagaacctcagcatgcccgcctatgactcggcggtcgggctcatctcgttggtggtgctgattttgatttgtacccgattattgtattcgtgatttacaaaagaaaatgcaaaatttgaaataagggaatagaaccgtgagagactaccaccgggagttttaaatttgtatgttgtacggtggcataggcgagtctagagaagatacaattaaaaggtttttacatgggcttgatttaaagtttcagcttaggcttaaaaataaaacacatagccatctttttagttacttttgatacatgagaatattcttgcgccttctattgtatataacatcatgtaggaaggtaaaagaaattttgaagaaaagaataataaagcacctaaattaactcaagagagcatttcaggtaacttaattgatgttcaactagaccaaggtaggaataattgtgttatgctacaattgtccactagttatgctatgttagagcaacctctagtggaacgaatttctaatgtgcctttatcacaagctaaaaattcagattgtgttgatattgataatgcttgtaatgaggaagagttgtgcaatgcttaacttatatacatggcacaattagtgaaagaacatgctacttctatttctgaatatttgggttccactcaaaataaacgtgtctttgctattgctaatgactgagaagagctgcaattattgtcttctttatgtactttaggttatatcgaatttgacgttccttgtgatctaaataccttagagatgaaattttatgattttctatgtttttcttggaatagttatcatgtcattggtaaatataataatagaggagattatatggtgcatcgtgtttatatatgttcatatttgaatactcctttaaatatggaaaaaatgtgagaaactaaatggatcgtacagcgttgatgctattgggataaatttacttaaccttgttttgaagatcgatgacaatattcaagaaggggagtgctatgcaccattagattctatggtcaagtctcactatctttttaagacatgtccattaaggtgagttcgtttttcgtgatgtaaattggatttatatagaacaaatgatgctacacaatgattgcttgtttgctatttttttcatgtgatctctcctatgacgacaattgcaacaagaaatcgagaacggtttccagacaagaaggaggatgatgtgatcatcaagtatattcatacaaccaagcatgagaaatataaaacattgcaaaagaatacatcggatgaatggaggatctaaagatattaaagtccaatgagttttggaatccagttcagcctccggagacagcactgacttcaaacggacctagcgccttcatatggtcatgccaactccgatttggatgatgttggacttgatggaaagcttatctaatcaactttcaaatgcatccagtctcatatccaaattcattttgagttaacgggaatcgtcaaaacaagacagtgttgttgctaaaaccgaacttgggccttgggctttctaatagactaggcccatctcgaaagtgtctccctctacctccacgaatcagcactaaaccctatatctattttcctctataaatatttatgtacaccctctagaacaattgggttttgtttagttgaattttgctaagtgtcattcaccttgtttctagtccttgctcgattagttggcgactatagattcagagcccccaatgattaatacataaggtagtcatggttatctcgcttggttgctttctatctcgttcttgtttgtgttcttcgattggcaaatagggattagccttctcggcgaggtcatccgcgtttcgacacgggtgataaccagaggagacgtgatactgcgattgcagggctcaagagcgtgcgcgttcaagaagccagatcgatttgtgtcgcgactccgcccaaatcgtcgtttatcagaaccttttggaagatcgggaaccctagtgtacatcaagaaatgttccgcacaggatgctgtgatagacaaagataaatacaatatgctccatgacaaggtgaaaccgaggacggtttccaatcaagaaggggaggatgatgaggacataactagctcggatataaccatgactaccttatgtattaatcaaataaaggtgcatatattctacattagatttacttgttatatatttgaacaaacgttactacacaatgaattttgtgtgttttcgattgcagaggtacttgcttgggcgaaggaaaagagaccgagcttaactaatacatggatgattaaagaagttgattggggaccaaaccaagaccttctccaagtctacttctacctcaccacatcacttttggcacatagaagacaagagatcaagttgtacacgttttggattcggattcgggcctcctgacagcatcaacttcaaacagacctagccactgatctagaaggtatttcggggcccatgagtacttattagaaagcttattgagtctactttcagatggttttagttccacgtcaaaattcctaccgagctgccgggaatctgcaaaacaattcacgtatctcatctagatccgaatctgatttgggttttgagccttgtaattgtgtcgtgggcttagcccaagggattgtgcaccctagggcaaccctaggacgtccctaatcacatttattcagtagccgtcatcgttttgagtcgggttttgcttagattattctgtcgagaacagtttcgtcgctagatcggtttgtaagaccccaactcgtgagcttaatcattcatctacaattttggttgttttctatctcgttcttgtttgtgttcttcgattggcaaacagggattagccttctcggcgatgtcatccgcatttcgacacggtgataaccagaggagatgtggtgctgcgattgcggggctcaagagcgtgcgtgttcaagaagctggattgatttgtgtctcgactccgcccaaatcgttgtttatcagaacctttcagaagatcgggaaccctagtgcacatcacccaatagttggtgtgttgatttgccgggtcgattggatctaccacttcaatcacaactattcctttgtgcttaatcccctattcgcaatattttgattgcatcttatcttattcttgcagtgttctctcgtttgcattgcagggatcatcaaccgtgcgtcacggttggtacgacatcgtttgcggtgtagcgattgcacggcgtcctagacttgttttggttgatagccacgtcgcaaacatcgcactcgatcaaagcgagagttatcccctcaccaggagatcgggccacgagagagagcatcatcagtagtccaatacaattttagttaaattaaaaggtagtgtatctaaatttggaaggtgttgcatcataaacttttttatgtcgagttaaaatagagatctctcgcaccggtcggttgtagcaatctctcacaccccgacttctaactgtcgagagatgcatactcctggttgtacactagtcgtttatagcgatctctcgcacctcaacttctaacggtcgcaagggactccgcggggggagccctcgccggggccggaatagtcacaaccggagtagttggggggagggggtatagacctcgcacccagctcggaagaggggcagctctgggtgagggggggggggtcggaggagatagctcgcactggggtcgggagaggcgaggatgagggggaggaggagggtcgccggaatcttcaccgctaggggaaggaggggaaagtggggggctcgccggcggcgtcgccctcgctaggggaggagggaaaagtggggggagggaggacggggggtggggaatgaggggacggatctgtgaaaggttcgacgtggtgtggtgcgtgcgttagcgtactatgggcgatggcaaggcggggtaatttcgggcaaaagggtcatgctcgcgcggcgctgtacttacgcgagtgagtgtaggtgtagcgccattagaggttgaccaccacaaaaacaaaaactgtgcgacgcattttcttataattaattaagtatttactattttttataaaaaatatattaatatgattttttaaagcatcttttgtaaagaatttctttggattagtagtttgaaaagcgtgcacgtggaaaatggggaggtgagttaggaaagcgtgctactctttctgttttatattacaagtcatttgatttttatccaagtcaaaaaattaaagtttaattaaatttataaaaaagggtgatatagtagtattttaatataaaataaacatattatcaaaatatattgatgaaattaatttggtattgtaaatatcttctctactacttacaaaataaaagatgtttccgccgtccgtataaaactaaaaaaacggcgagaaaaaaattctgttaaaaaaaaggaaaagaatgtctggctccccttaaaaaaacgtttgattccttagaaaaaggacttcttgtccgtataaaaaaaggaaggacttctcgtccgtaaaaaaaaagtcctaattcaaagtccataaaaaaaaaaaggtcaaaacgctctacccatacattttctcatctaattaattccaaaaatcgattctctattccgtcctcatcctttcccaatttcccctttcaatttggttttaattcaccgaatttaatctccatttaacggttgtcaatgatggccgaccgatgatttttcccaatcccaagtattgcagtttcgttccgattttgcaaaaaatagaatgaggagatcaagtggatcaaaatcactcaataaattttcagtgatcaagaatatttgatgggatgatccggaagcaggccgagcgaagggaggtaggacacaaggctttttcaatttattcctcaactcctaatagttgatgtactactggaaaaaaagcctttacctattgtaacacatgggcaagtttccatcatcttaaaaaaggaaaaaaaaatcagaccctaaagcgagaaaaacgccattataagaaaatctgttcgtaaaaatcacctgactcaacacgaggagaaaaactgtcgtttataaaaataccagttatagaaaacgtccgacttaatgtgagataaaaatcgttgtatataaaaaaagattaaagaagtccgaatccacacgagaaaaagtggatcgaaaaaaccgttcgaccccacgcgagaaaaaaaaagtcatttataaaaataccgctctgaagaaaactatctgacccaatgtgaaaaaaaacccgcgcttataaaataatccggttcggcactgtgcaatgaaaaaaaaaaagtacctgatttcaagaaaaaaaaatccgattccatgaaaagtagtcatatcgtttgtaagttccatcgtctcctgtgtcagtttggttttttcaaaacgttcgtggaatattttggtgtgaattcttgtttgggttttttttttctcggaacgagaacaaattgatcgaggcttggttggataggatcatcaatttttttctatctcctacacgtcttgtgttccatgatctactctcctactccttccatcccataatataagcgatttgggagggatgcgacacatcgtagtactacgaattggatatagagcatgtctagattcgttgtactaggatgtgtcgcatacctcccaaattccttattttatgggacgaagggagtacgttggaggccttgtacgtctctgtatgcaattatcagactactttgttaagtatagctaatattaatatttttgatacgtatcatataaaaataattatatattaagagaatagttcacggtgactctgttttgtctagacttgaccatgcgagatgttgacggtccttacatcataatatctgactgtcaatatttgcatataataaaataaaatatggtatctaacttagtggtaagaattattactgatcatttccattagtcttattaaaaatatgaaaacaaaaataatcatgtactaatactagctcgagctcctttgcatcaggaccacccatgggccgtgggcccgaggccaatcctgctaaccgaagcacgaaataggagagcctatctcagagtcacgcaaggttggtggcaagaacagaaacaacttcggcttcactctcgtgaaagaaaaataggttactggcagagtggaatatgtgggtggaaagtgtatgatttgctaacgcagctattggccattggcatgactggttagattatggcctcctataaataaacctaataggttaacatttaagatgtataatatagtttattgttattagttaacaattctttcaatatctcaacttcttttttatttgatgtgatttgttttgttagatagtggagcaaactagatagccatgattagtaggagtgatacaataacactgaatttaatgctcacatataagagcatctccaatagaggactacaaaatagtccctataaaatagtcccaaaaaatattagattaggaccaacccataaatgattgggcacaaaaatcttcatctccaggagattctcaaaacttgaatcctaaaaataaaaatatggttgttggcctgtaggccgtgtgggtagctagggtcgtcgctctctaccgcttaccattgcagttctctgccacgtgcaatcgccgtacgcttctttttctagccgctctacttttgcgcccccgccaccactactgttgttcggattgaccgatcgtgtggagaaacggaagactaagtcatatggaaatcatgcattgagactaatccatgcaacctcccttttctgtagagatttttacgaaagcgtatcggtaaacatttgtttatgggagctactctagtctgcagtaccaaatgtattgcacatatccattattgtcacttctcatatagccataaaaaaaagctgccacattatcaacaagtttgatataatcagtaagtaacaagaaagaaaaacctgaatacaatgcacacacattgttctactgattcgacagtcacctagttcagtcagtttactctatatgacaacataacaaaatttccaaactgcagattggtgaataatacagcaaatgaagaaaaggggaaacagttcgataaaatggttctaaaagcgcgttttgaatgtagtactccctccgttttgaaatgtttgacaccgttgactttttagcacatgtttgaccgttcaccttattcaaaaacttttgtgagatatgtaaaattatatgcctacataaaaatatatttaacaatgaatcaaatgatagaaaaagaattaataattacttaaattttttaaataagacgaacggtcaaacatgtgataaaaagtcaacggcgtcaaacatttcgaaacggagggagtaattagctaggtccatcatcctatagtccaaattcaaaacacatgtacagagctgccaagttttccaggatttccatggcagaacagagcatagggttactaatatagttagtgttttgatatacgaagctagaccttaaaaacctaaccaaattaaattaggcttcatggtgaagcacttttaagatttgcagagaacaatagcaacaccaaaaacaaacgaatcatgaagtagacagtttacatttcagagcatagtgtgatgtggaataggctgttgcataatttctgaataaggtatagtacagtaggaaaccacacacaactcgtcttctgaaagatatatagatgcaccatttatcaactagctggaattcagtggacttgtaagcacattcattatttttaactgccaattcaatagaatgcccaccaaactttaggctgcagattcaagacaaatgattactcattacttttttatcacctacttggacgcctggagcatgacagcaagtagcaacaacaacctgaagtcgatcatattgcaatttcagtttgtcctactcagtttgcacaaagattttctggtaggagtccattccccctcaatcagcaaaagtagatttttcccacatgttaaaacggcatcaagcagtgcattcacttgacagctacactgagagtgcatcagtctatccattgaaaacatgcaatgcatcattcaacaagaaaatgctaacgagagagaccaagcgacgttcaggggatcgtcgtttacctgcaacacgggatccggtgaccgccaacgaaggggatgcagcaccataagatggagcgggcgaggcagcctggaaggaggtaaggccgtgcggtggcgcccttgagggtcctggatggaggtcaagctgtgtggtggtgccctcgatggccctgatcggaggggggcgtcggtgacataggttgtgacttccctttaaactttcaaaaaatgtcacattaaatgtttggaaacatacatggagcattaaatatggacagaaacaaaaccaattacacagtttgcatataaattgcgagacaaatcttttaagtttaattgcgccatgatttaacaatatagtgctatagtaaacatttgctaataacggattaattagacttaatagatttgtctcgcagtttacaagcgaaatctataatttgttttgttattaacctatgtttaatactttaaatgtgtgttcatatacgtcaaaaaaatttttataaggaactaaacacagccatggaaggaatggaggcgagcatggagttcaacaaaaaatgttgtgattcctcggattgggggcctctgcaccttggatgaaggactggcgctgccataggtgaggagacaattaatcagacaagtcaacgaaggcaagaacgcggcttcatccggagctatgaaggatatgacccaggaagcctacggcacgagaggaagagaaaaatggtgcgtacggaaaaaattggcgctggcggcccaaatctactgtggttgggaatgcgcagagcatcccaaaatctggttaggattggcaccgattttggatgtgggtgaatataagggccatataggtacgtaaaatctaaaccgagaggcttctcgctttagtcgtatcacgcgacacggctcacagccgttcgatcgtgcctgtcatcccgacgtacatctgcgtggctgcgctctaatggctcaataagaaggatcaacgtagtgcctgtttgcctttttttaatagatacgtatgtcttttttctcctcaaataaagttttctctcaaattacttatccaatctataatccgattacaccattatgttcattacaattaaatcttcacaacaagatcttacatgattatattacgatgaaaaaatatttatatttataaattacttttattatatacgtaagttacttttatcatatatataagttacttttagatttgactaaattacttcttagacatataaaagtaaattcaataaagtctaaaagtaatttacatatattataaaagtaacttaaaaccaaacggaagtaactttatcacgatattagaagtaaattcattgtagggataaaaatatgattttatctcgaaattaaatttaatcagtacagattaacacaagtaagtttaacattttttaaaagtaacttcaatgttaattagaagtaacttttgcatggttgagaagtaactctctgtaaatccgtttaataaaaagaagataaaacctttcatggattgtaaataacattgatggaataacttttaggctttattgaattacttttttagtccaagaagtaatttagtgaaatttaaaagtaatttagatatattataaaagtaatttataatttttcatcaaaatataatcatgtgagaacttgtcataaagatttaattgttacgaacacaacggtgtaatcggatcgtatatcagatgagtagtttaagagaaaagtttatttgaagtataggtagatagtatctttaatagatggagtggtagctggtttctgtgtatccatgtcctaataaatagtagcgtatagcgggttgttagtggattagcgtctgtgtagagtgttgcggatagcgggcgctaagttccgatagcaaatataagaaaatagccataaatatatcaatattaacataaatttcacgtaaaaattagaattaataatacatttttaattactcctatatttcataacataaaaaaaaatatgaaatcacatatagatttataagataaataagataaacaatgtaaagttctacaatccatatatgaagaacaacatttaagcgttacaatggtccaacaaagtcaatagcgggctgttatagcggacacgaagcgctataacaggctgttatagcagtagcgaaatgctatagcgggcgctaagttacaacatgctatcttcagtctgctacctcgtagcggtagcggtagaggtccgcgctatagtgggtgctacgaacgctatttattagcttgttgtatatgttggatgtatggtttttcgctaaattccgaatctgattggaactttttttatctcttttgggaatctgattggaccttttttttatatgctctaaacagtgcgagcaagggagtaaatagtaacaggaaaatgattgatattaatactagcaagaatggcacgatgaggtggtttacaacgatgttggagcaggagcagctctcgtcctccctaccgccagcaggtcgttctgcatgtataagctgccttaacctcagcaacctgacatgtgcctcagcctcagcaacgtgatctcagttattgcatgctctccgtgccgtatgcgctgtcgtagggcaggtgctactacataagaaattttttgaggaccctggttaggctgcagacggatcataattgtccacgtctataaaaatcagccttcaaattcatatacggtttagtaagatgcccgcattcgaaaatcgattttcacaaacgaacctagacgcaagtgaaaataaacctatttttacgagatatttaactgtttactacttttagatgtggcaaataactatttgccactggacccaaatgtcattaagatagaggtggcaaatagttaaatgccaaatctaaaagtggcaaatagttaaaagctcctattttggcatgcggtcccttaaccacatgcaaaaatacattttcgtatacgatgccttaagtgatccgcatacaaaaatatctccttttttttctcccatcctctctctttccctcctcaccacttcaatttttttcacccatctcctctcaacatattttcaatcctctcctccactcctctcttcctctcctctcaaaatcctctcctcaatctctctatctctctccctccgagtgggcggcgatgggcggtcagcagtgccaccgtcatccccttcctcaccgccaccgacgacgacgaggaggaggcgatcggctccatcccccccgacgccgccgccaccgacgaggcggcagcagcggttgatgccatgcggcgggcctcctcctgcccatatctggtgatggcggcgggagcggtcggtggctcggcgatgggagcagtggcggtgggagcgaacgacggctcacctcctcccgcccacatctggcgacggcggcaggagtggtcgacggctcggcgacgggagcagcggtggtgggagaggacggcggctcacctcctcccttgcatatctggcgacggcggtgggagtggacggcagctcacctcctcctgcctagatccagtggcggcgggcctcctcccacccagctccgatagcaggaccggacggcggcggaagcagcggtggtgggagggccttttcccacgatggcggcttgcctcctcccgcctagatccagcgacgcagtgggaaaaacttttgttgctatataaaatatcctaaaagatccatgaataaataggtatgatcgtgagtgatctacgaataaaatctatattgccttgtcttgcacagtactactggtatggtctgctttagacagtgaggtagcttgccttgccccaaaccagtttttcactaattaatggctaattaggtgcatgaatcggaggtggggctggcgccctaaccagcccaacagatctcccactgtggccacctcgccttcgacggctacagccagatagccatcggcctcgtatatgttaatggctaattaggtgcatgaattggaggtggggctggtgccccaaccagccccaaccgtggatctcccactgtgaccacctcgcctttggcggctacagccagataaccatcggccttgtcatgtacatcaagctctacctccttgccatcagcttcctcatcctcgagggcgacatcctcgacaagctactccctagcacgtggtggagatcctacggtaccagatgtgtacgggaagcagttgttcatgctcgctgcgggtgccgtcatcctcccgacgacgtggctcaattacctcagcatgctcgcctatgtcttggcggtcaggctcatctcgtcggtggcgttacgacatcgctggtttgggtcggcatgtccgataagggcttcgacatagagggcaactgcctcttaacctgagagggtccctcagcctctacttcgtctgcttcgccggccatggcgtcttcccgaccatgtactcctcgatgatgtctaataagaattttgccaaggtacaccttttaaaatgtatttatgtgttgttgatagtaagtttgctaaaatttgtgataacaattaacaatgtaaatttagaattatggttaatgaaaattgaaaagtcaatggtggaattaagttagcaacaggtttagtaaggatacaaacatattttttttattatatggatgcatggaagacgcgcacactcataattactttttagatttcgtacatcactaatcatgcacactatactcgcacacctcttaatcatcatcgctgctatgttcccattatactcaccattgcatggcctcatatcatatgttttgttggcgctcccatctatatagattgtgcagataaagtttaagctaataagtttattttgatcgtctaattaaaagtaagaattaggatcatacgaaatcaacattaaaatcatttattaaaataagttgtaccatcccttaaaaaaatgttgtactacttataaattttataaattttgtaatgttaatttacaatgatacggaatggcgagtgcaatatggaattaatggcaagtgcaatattcagattttagcattaatatttttttttgcattatgacgtaaattaatggcaagggtaatgcctggttggcctttcgactagtttaacatgtgtagtgacatggaggcgtaatgtgccacagtatagcctatcaccccagcaggatgaacaggtgactgaaggcgatgaaggtcacctctcaactatatggttacctctaatccacccatttaaaagcattgtagcttaaagataaagctaatcatgagccgcctattatggattaatttatatgttaaacctgaacttagaagatgcgtctaacacttaaatgaaagaattatattagccatttgaaaacaaagtttatgaaatttgttttttaagtaattttatacatagtccaatacaattttagtgaaattaaaaggttgtgtatctaaatttgaaagatgtgttgcatcataaacttttctatgccgagttaaaatagagaactattgtgttgtatatattattgtactaagttagtcttaaccaatctactttcatgaaaggtaaatcccaccaagctaccagcatgctccacgcaatcaaaataataaagaccgtcggattagaaaatgagcattagccgtccgatgtttacttcaaacattacaggccatcggataatctcaatctctcgtcatttggaatcttctcgaatgttgttcgcagaacttcttaatgctgtattcggttctttaactttgggaactaatcctccggcgtgaaaaacgaagcaactcattaacgcataattaattacttattaactaaaaaatttgaaaaaatatattaatatgatttttttaaagtaactttcatacaaaaaaaatttttagcaaaaaaaacataccatctagcactttgaaaaacgtatgcgtgaaaaacaagtgaggggaggttggaaaagagagggaacgaacacagtcttaaagcaaggataatagtgagatataagagcatccccagcagctcctctatccggtcctccatcccgtttttggcgcatggaggggaaaaacaacgctccagcagaggctccatccgatgcgccaaaattggcggatcgccaaacacgaagagagaagtgtcaaatttggcgtttctctctcctcacgccatccccaaacgcccgctcccatccggttctcccgcccccatccggatcgagcataaagggtgaaggaagaggaaaagagaggacgcactggtggctaccttcgccgaccgaccgccgtcggccaacggagcagaggggaggagacttactggatctggccgcccgcgccgccgtccccgctgctcgcccgacaccgccgcccgctcgccgccacctgcctcctccgcggctcctccacccgcctccagtcgtccgccgccgcccctcgcccacctgcctccggtcgtccgccgccacggagtagagtgcgtagaggcagcggatctggctgcgacgccgctcctccgcatggcgatctcccgcgacgctgctcctccgcgccgctcctccgcatgcgaccgccgcgccgctccccgcccgcgacgccgccgtccctccccctcccccaggcgggcgcggatctggcgtccttcctgcctccgctgccttcccctccccctccccgcctccccacctccaccgccttcccctccccctcccgggaagaaggcggcctcgtgctccccgcgctccccggcctggaggatcttgtagacgcgcgggacgagcgggcccaacttatcggtggacgcgtagttccccgccacttggtgctctggcgggcgtaggtcggaggccatggcggcggtggtgggtggtggaggtgaaggggattcggcgagagaggagaagagttgagaaaagagtagatgagaggagaagagttgagaaagaatggaatgaatagaagagaaaaattaatataaaatagatggcagttgaaagataatagtaaaatataggatagataatgtaatatgaatgatttgttggagtaaaaagaaatatggagtgagaatccttttggaggactatccaaataggcatatggaggattgaatatgaatgagctgctgggaatgctctaagcactactacaaaacatggtacaccaccactcctccgttccgcccgagttctccctcttctttctctctgttgccgcctacgtggtggaggcgttctgctcgccgccggccacttgccctcatatacaaatccactggcaactgcaacagaatatggaaatggtgacaagcagaagccatggggcttggcgatgtggaaccggatccacatccacgtgacggctgtggtgctgtacgtcccgtggtgcaggggcggaggtagcatatgggcaggggtgtccagcaacccgatcaaaatttttttttaagttataactcatcgatatggtgattttcactatgtgtgtaaccttctcaatacaaacttagacacacgcattaaattgaacttgatctaaaatagaataaattaagcaagaagcaccatcctctatttcgttctgttctagttccgccctgccgtggtatgtggcaatcgttcgccgatccataacagcaaccatgaggctcggagcctcggagaggttggcgtcgaagaaatcatagtagctgcacatcctgcgccctctcacccaggcatcttccaggctaatacattggtacgtattgttgcaattgcaaacctactgataaagccagcaagcaaatttcccgtgaattttaattaatggagaaggtatcatcctgtttttcttcttttaatttgcagataatcctgggctttcagtactctggattttgatgtatctttgattctgtgatgaactaatcactgatacagctagaggccagatttctgttcactaggtaaaagtcactgatactactaaaaagaatatcagggatctcgatgctctgatgcttctctctctttcccaggctaacctggtagaaaaccctggagttgtacttttaacaaaaacagggcactcagccttgaaagtaggacacaaaattctttcttagatcactcggaagtggcatttgttttgtcatgacctttcccctttccaattacaagttgaaggagtatcgacacatatttatggactaaatgacaacctgtaactgtttgatcaaataatttataaataaattcgacaaaatctaatacaactggcgcaaaaatgacaggtcgcgccgaaatatttaaaatagataataggccaattttgatggcccaatcccaacgctacagactataaattttgactgtgtatacttggctcatctaataaattttcatacacatcacatataccgtgattgttagagtcgtgcaaatgcacgacttaataggccagtaggtatgagaattgttagggataatataccaaagtgtaggatattgactattggtcaaacagcttatgaaagtttattgaacaatcttggacctttcactatcttttactgatacttatctatgatctaatatcagatattttatcaactgtcgcatccaatggtccatattttcaaatgatgtggcttaatgatgttgcgttttaagttttaccttttacttagagggataatttagacatgttataaatagatagcataggtcaccaaacttatagatcatgttgtatgcttgcatgagattaaatatgtaattattgttagtgggtgataatgtgacatgattgcatgttgagctttagacttagtggactttaactttataggaagcatagataacacttccttgtcaagcattcaattcaactttttacaaattaataattatattttaatttagtttgttataagaacatgaagagttttggttggataggacatatcttagtaccacaaatttggacatgcagtctgtccatatttctagtactgggatatatccattctaaccaattatatttttcaactaaaactctttatattttgggacggaggaagtatgagttttaaatgcacccactccatgagttttaaaacttgacgtggtgcggtgcgtgtgctagcgtacttgggcgatggcaaaggcgaggtaatttcgggcaaaagggtcacgctcgcgcgacgatgttctgtacgcgagtgagtgtaggtgtagtgctgttagaggttgaccaccacgccgtgcatatgtgtatgctccgtgtgctaccagctagtactacaactttttattatttttttaaaatgttttttaaatttgttttcatcttctatagatttaggcggtgttttttctaactttcccaactcaccttcctcgttttctgcacataaacatctcttactgctaaacggtgtgtttttcaaaagttatatgtaaaaaaattgctttaaaaaatcatataagcaatttttttaaaaaaatagcgaaagcttaattaatcatacgctaatgtgtcgtaacattttgcgtgcgtgagaaatgagaaataagctctcaacaccgtgtaacaaatgcggccttataccccctaacacacattgggaaaaatcctctttcagacagcgttttacacgaagtagtatacaatctttgacgcatggtgatgatcgcccatcagggttggccattttggacatataatgattatattatgatgaaaaaatatttatatttataaattacttttattatatacgtaagttacttttatcatatatatatataagttacttttagatttaactaaattacttcttagacatataaaagtaaattcaataaaatctaaaagtaatttacatatattataaaagtaacttaaaacaacttggaagtaactttgtcacgacgttaaaagtaaattcgttataggaataaaaatatgactacatgtccaatgaaaaaaggcattcattaaagttattttctttttgtcataagttacttctataatatatgtaaattacttttaggctttattgaatttacttttatatgtctaagaagtaatttagtgaaatctaaaagtaatttagatatatgataaaagtaatttataatttttcattaaaatataatcatgtaagatcttgttataaacatttaattgttacgaatataacggtgcaatcggatcgtagatcggattagtagtttaagagaaaattgtatttaaagtataagtggatagtatctctcttatatggagtggtagctggtttagacaaaccagctaccactagctgtgtagtcacgtctaattttaaagccattatattttgtaaacattttattaaagaaatatgaaaacaaaagaaaatcctagtactaataccatctcagcgcctttgcgtcaggaccgacggtgggccgtggccccgaggcccatcctgctagccgagaaacagttacaggagagcccatcagagaacctcacgcaaagttggtgggcaagaactcaaacaacttctctcttgaaagaaaaatatgttactggcagtgtggaatgtgtgcatagaaagagggtgaaaactgtatgatccgctagcgccgttatatgactgggtaggttactgcctcctataaatacgtaatgggttaacatttaagaggtataatatggtttatatagttattagtttacaagttctttcgatatctcaacttctgttccattttacgtgatttgtttgtatgagatagtggagtaaaccaggtagccataattagaaggagcaaataataacactgaatttaatactaacatctaaacggtgcgagcaagattataaatagtaataagaaaaaaaatggtactaaataatattagcaaatatatctacgacacgatgaggtggtttacgacgtggagcagccgccgcccctccaccctactggtggatcactggcgcttcctttaggaagagctgcttcaatctgagcaacgtgatggcagccggcatggggatgctctccgtgcagtacgtgctgtcgtagagcatgtggcttagcctggcggtcgatctcccctatatttggcgccatctgcttctacaccggcaacctaaacaaccgctgcatgcgcgctgaccactgcgtcagaagctacccggacatcggccacctagtgatgaatctagaatgtaaatttaggtgggaatgtgtaaaagctttagtatgatggaaacaaactagaaatatattcttattttagttaaattttatctagaatctagaaataattttatccgtagtctaatacaactttagttaaattcaaaggtagtgtatctaaatttggaagatgtcttgcatcataaacttttatatgccgagttaaaatagagatatattgtgttgtatatattcttgtactaagtttagacttaaccaataggtatgagaattgtttcggataagatgccaaagtggtaggacattgactattgctcaaacagctcatggaagtttcttgaacaatcttggacttttcaccacttttactgatacttatttatgatctaatgtcagatattgtatcaactgttgcatccaatggtccatattttcaaatgatgtggtttaatgatgttgcattttaagttttaccttttacttagagagataggttatacaagttataaatagatagcacagttcacaattcttttcttaaagtaatactaatatagtgtgcttagtatcattatatactaggtaattccccacgttttgctgctggaattactaagcaattctcaatttttttttgacaatcaagcactaccacataaatgctaatagaagtcggcactataggtggcggaagatgtaaaaccgccacctatagtccctttctgcccacgcgcctgcccaaaccacaagaacaccagttcttaaacaaaaccgacacattttaccccagtcagagatagatgccggttttaatttaaaaccggcatcttttggttggcacagggcccaccttacaacccacatctttgtggtaaaaggaataggtgccggttttttaaaaaaaatcaccgcctataaaatattataggtgtccgacaccccataagacctagccaccacacgctctctctcgcatggtttttttaagccgttcttatccatgcatcaaccgatgctctctctctctctcacacacacacaccgacgctctcttatctcctcttctcctcctcatctctcgtacgcatcggcggtggcctggcggtgcagtcggcggcggcgcctcccctccgccagatccgctcggtatgagaggcggtggcgccctccgccacatctggccggtagcagaggtaggcggtggcgggagggaaggtcagatgagagatatgtgaattctgtgaataattttactatcactttgtcggatgaagaaatgaccaaaacaaaagttatagatcttgatgagttatacaaatttgttgttgatgacttttccaattgaaatcatttagtatttgaaaatgttgtttgaagttttcatattttcaaatttaaattcaaactgttcaaaaaataatatatagaaaaatgaacaaaataaagttgtaaatcttgataagttatacaactttgttgttgatgacttttcaatttggaatcatttagtatttgaaaatgttgtttgaagctgtcatatttttaaattcaaattcaaactgttcaaaaaatgttatatagaaaaatgaacaaaataaaagttatggattttgataagttatacaactctgttgttgacaacttttccatttgaatcattttctacctgaaaaatttatttgaatttcttatcttttaaaattcaaactttatatagttcaatcaaatccggatgtagaaatgaccaaaataaaattggtagatctcaatgagttctacaactttgtttttgacagctttttcatatgagttcatttagtatcataaaatttaatttgaaactcatttttgccttaaagtctgattcctcctcatcatgttaatacttgctaaatatatatttgatccaattaactcagtttggctggtgaaatatgtgaatggatgtgaaatatatgatcaaaatggatgttctttgagcgtggttgtgttaaatatattgatggttgtgtatgtgaataaatgtacaacttcttttccggaagccgatctccaaagaactatgaggttaagcgtgctgatattttggtgcacacgagtaaggcaatttcgggatgggtaaccgaccgttgttataaatgattatattttgaagatcataaccatatccgattgagaaattttttctggatgcacacgagcaattttaggataggtaaccgaccgttgttataaatgatgatattttagagatcataaccatatccgtgtctatccaattgttcaccatatccatgtcttttgaggggtagttaatgactgagctcgtttatataatagcaaacttttcaatcaacgtaatggtggaatacagattactatctacatgtttcatcgcttgttcatttattattcagaaaatatttttattttacaagaggatgtgtaccaaattatacctaaacactattctatttcatatacaaatcaatataataaaaaactatttttattttacaagaggatgtataccaaattatacctaaacactattctatttcatatacaaatcaacttttataatagtagagatatgaaagaaatgaagtgtgcgaaagtattaatttcgggaatagcgatataataatgaaatcggtgattaattatcactaatggcacaacctggcgtatacgtatgaatattgtgagacacgtgccgtcggctgctctagtgccttgtagaggcacttatatactcatgacattttgatatagctagggtgatcgatacaatttcgtggttggctagatgaaaggaaaatgtgtgaatgttttcatttgaatggaaacatgccactgtagcattgtcattagaggatgttaatcacggtgatttgccggcagttgatttgcatggaaacgtaggaaattaaaaggcaagatagctatctggatgaatattcctcgccatgagcatcacgaacgcgtatacgaatacaaagaaacaatttatccatatcacgcctaatcggaaaggagtcaccgacgcggtaggttcgaaaggaaaatacagtgagcaggatgtggatatcgataagaagaaatgttacatatggaggaatgatggtgcaaatcatagaatcatgttaattattggctagccactgcaagctggtaaatagcatgcgtataacagaatggaaatatatatcccattgatagtagaatttaaacgtatcgttgtttaatggaaacacaccatcacagtatcattgtgagatggaaaagtatcacacctttttctatattaatcaacaggaaacttcgtgatggatatgtatagaagtgaagcaaataaacatggcagctgttcctatcattccttgcattgctctgtgccgactgtgcatgcaccggctcctctctagtataaaatgctaagccatatcatttgcaaaggggacagcggagagagtacagaggcacgagccgagggcctgcagttcacgccgccgccgccggcaggcgctgcgccgtgcccagccttggcagtagtccatagagagacatacatagagacacaggagagaaacacagagaagcacaaggacaaggagagcggacacaggttgctcatcgtcatcgggaaccatcacgcacgtcgttttcgccggagtatctcggcgtccggcgggaacgtgcgtgctctgcggccggcgacatcggctgccgtatctcggcgtccggcgggaacttgtgcgctcggcggccggtgacgttggccgcagtgcctcggcgtctggcaaggaggcgcgcggaggaggagacgatcgccggagcacgtactcagccatcgccacgagtttaacttcttagttttcttttgttttccttctctttctgttcagatcagcatgcatgcacaagatggcgacatggagagtttccggtgctgcctggcccgctggatatagcgtcctctccgcttgtcggaggcaccgccagccggagatcgcgtcgctccctctcgtcggagacgccggtcgccggtgacacatctacctgctgccgcgacgtccttgcctcgccggccgcaacctctatcccacgacgtctttacctggcgatgtgatgtcgtcgagatgctggatcggacgtcgtcgccttgccggtcgcggcctcttctccgcaacatcgtcgacttccgctcgccctcatcaaagctgctatcctctacacacattgtcttgctgcttgaagagaacgccggccggagcgccactactcggtgcccgcaaggcgtcatcagctctggctgcgtcccgaaccatctcgctggagttgccgtggacaccgctgagccgcccaaatccatagacggcgaggcgttgccagctaacgctagcttgtccccgtcatcatccgctgcccgccggagaaggccattgccaggtcgccaaggtgctagttgccgatatccggaggtcgttaacatatcatccacaagtcgcgatgggtatcgtcggacccctgttgccagcacctgtcatgatgcgcccttggtgggcagggatgtcccactgagactctactaatcggccggtgacgccctccgtcccccacgctcgttgtagcctctgcgggtcgccgccaacgtctattgaatatcatcctcaccggcgctgcctatttccgcacgtgctcttcatcggcttcgctgccggcgtcactatgctgccgtggagctgccgaccaagccatcccaaggtcatcattccccggaggccatcacgtcgtttgcagccgccgcgctgaaattactcagatgcttgtattgtgcatgcgcactgtacgaatgcatgtatatgcatgctactgtacatgatgacaagcaagcaaacaagatgtgcatgcatgctaccgtacatggtgagaagttaaattgagttagcaaattcatactcatttgatgctgctctgtactaaaccttcgagccatgactaattcggctatcattcgtgttgatcattcctacctttataatctaattccgatgcaattgctatggggtcgagtcatcttagctacacaattccatgtatgtcttcaacaacaatatacaccaacacgttgttcaagaccgatgaggctgaacggcagggcaggcggagtctatatgaagactacgtcaccaacaccggcgcacggaccgacgaagccgtggaccactgtcggcgcccacacacatctactccaccatcactatcatgcatgggagaacatgaagcgaagactgacggcgcagtactcccaagtcaagccactacgatcagaggtgacccaacataatttgggttttggctccgattgtcggcgcatatacaagagagccacctagttcctggaacgcgtctcatcgttctcaggctaggctacgcccctaacgtcccctaaaaaccgctcaatactatgtgctgcagcgatcagaaggctaactcttgtaccatgaggatggtcggccagtgccgtggagactagaagggcgatgctaccctatcgccagtgacgacaagcttggcatctctaccgacgaccaatgccatgctagtctccattacaagcaccatctttacctccaccgacgaggctgaacggcagggcgggcggagtctatgtgaaggcgacgtcaccaacaccgacgcacggaccgatgaggccgtggactactgccggcgcctacacaaatctacatcatcactaccatcacaatcatgcatgggagaacgtgaagcgaagaccgacgacgacgaccagcgcagcttaatcggaggtgtctcgcgggtttaacccgcgagagtaattaaccgggtgttttccgagaccccgggaactaggagaacacaatcgccaagtcagatccacctcaccgatgggctgtggagcgcatttgactaaggattttgtattttcgtaattccttgagaattataataaaatacattttcctttgtccattttatttttgtgtacgtggttaactggcatgcccgcacatcttactttattctacttccctgggcggagagacaaaaagttattttttctctccaaacaactgagatataaaaacaaaaccctagccttatcctctttctccccatctccacaccacataggcggaggcggcgcccacaccacacaggcggaggtggcgcagggcgccagggcgcaccgcgcaccggcaccgtgcattcctcaggatctcgtcgtcgccagttgccctctcccctcacttcctctcccctctggcctccgccctctctccttgcctcctaacccctcccctccggcctcccgactcccatcctctctagtatccctctcactccggtctgccgacaacgcacgggcggcgcgcggggaggcacacgggcactgcacagcgagggcgaggcggccggcgagccacaagggagttgtggtcatgcatgcttcatggatggaatgatggatcaatatgtgtttttgctgatttttttgtgatgctattcaagcattcatgctatttttgatggtatgtacaatatttgctcttaccgaattgatgattgccttgtatttttggtgctaattggatggagatgctacccaatgcgggccccggaagtgttggagacggtgcctgatttggccccgcatctccagtcggggccaggggcggtgggtgaagtcgagggtcgggggagggccgttctagtccaacccggccccgcaccgccccattgccatccctaagcgcctttgcatcaagaccacccgtgggtccgaggcccatcctactagctgaagcacgaaatgggagagcccatcacagtcacgcaaagttggtgggcaagaaagaacagaaacaacttctgcttcactctcatgaaagaaaaataggttactggcagtgtggaatgtgtgcataggaagagggtgaaaactgtatgatccgctagcgcagctatgggccattggcatgactggttaggttactgcctcctataaatacgtaataggttaacattttaagatgtataatatggtttatagttatgggtagtagttacaagttgtttcaatgtttcaacttcttttcctttgtaagtgatttgtttttatgagatagtggaggaaacatatttagattcaataatcccttatctatcaaacaaatgtgtaagattgagcatatatagtcgtacccatagttccattcgccacaaatatatggcccggtgcgaagaatagcgtacatgctagcattctgtatcaccttgatgtcgtagttccccttaaagttgtactacatatcaaaaatttcatgaaggtcaggaacaagaacaatgctggaatagattaaaattatccaaaatgcacattttgtatgaggtggcgtatattcgtagtttgaactgtaattattattaactataactgaggctctcctataagatccctccataattttaagagcactaaaaatagctggaattttcacgtctgacatattaaaaaaaaagctaaaccgtccaaactacatgaaatttcgattaaactactttgtttcttacattggttagaaatcaagaatctggtttgcaaaataacctacatgcagggatactacgatctatacgcaaggaatataaggatgtataaactaagcttaatttatctaaataatatataattatactcgtcaattgagcaaatcccgtgattctatttcattatctaaaaatatactcatcaattagctaggcatataatcatttggataaattagcaacaagttcacaacaaatttcttataattaggttggttttcatggtatactttattaatcgttttgttgaatccctagtggcccaaaactcttcagtaggctaaaattgttttattcatgtcgataattaatgctaaaatataattttttcactcaatcatattgtgtgtcaaagtgccatgtctgctatccgactcagccaattaacattattgccagcccacccctgacacaatttttatcaattcttgtagcgattatatatataatataaaagattactgaaattgattgaaatggaaccgcatacccaacggtaggttacattctctctctcggtttgaaccatcaggcgggttgatgctactacctagttgtaaattaggaatacgctcgctgcattgcctggtggagaaaaccggaccggtgagtgacccagacaacccctcggttcaccggttcgacggactgactagggaactgtcggttgaaccgcggttcaataactataatatatatatatatatatatatatatatatatatatatatatatatatatatatatatatatatatatatatatatatatatataatgtatatttcctctacttcacaagtgaaaaagcggtaggatggctagagccaagtgctctcagcctctcagtgcgcagaccagggttcgagtcctcacgccacaagcatttctctgatttcaggtacagtgtgtgttgcggctttagcttttggaaacatctctcacttacgaccgtttggttgatcgcagcagcttttggaaaagcagctacgagaaagtcaaaaaacccgtttggttgatcacctgtggtttttgggaaacatctctcacttacgaccgtttggttgatcgcagcacgggatgagagaacaggtggcggagtcgtcgccatcctctcctcgcgcgtcccaacccaaggcaagctggcgccgagcggggacgagcagggcggcgccgaacaaggacaggcggcgatcggccggggacgagcagcgtcagcgccgagcggggacgagtagggcggcgtcgggtgttgccagcgtcgagcaagcagcgaggtcgtaggacgacgagatggacgttgtcctctcctctacctccgccgcgctgggaggaggccggcgacgggagtcagggggcgcggtgggggagaagctcgccgtctcgccgggaggtcgccgccttgccgtttcgccgcgttgccgggaggtcgcctcgccgggaggagaaggggcgagaaggggtggggttggcgtcggacggggaggagaaagggcggcgtcgggcggggaggagcaggggcggcgccgccgtcgggcggggaatgaggtggccggccggccggagggcaggggcggcgccggccggagatgcgcctctcctcccacctgctgcgcgtggtgcggatgcgggatgacatgagacgagattatcgaaccgttttcttcgtaatggttgaggtggataattttttttcccaaaagcaggtgaaagtagggggtagaggtgcttttgatttatactataccaaaagttagctttgggcaaaagcagctgcagcttttaggccctttggttggcttttggcttttgcaaaagtaaaagcaggttgaaaagcctaaccaaacacacccttagtcggttcaatccgctcaaccgaactgtggagtcctctagttccagttttttccggtgaattgtcgtcccacctcatgatgtagtcatcggagacacacagcgggccaaaccatcgaccacacgtacacgatgtccagataggagcaaaacgctgcaggtttcccatcggagttgcgctaggtgatctggacttccgattctctcaacagttcggaaaattttgtgtcgtgattgtttagctacttaattgggttgttcacttctgtttagattaggcaagtggtcagctattaatgggctggttcagcccaactagctattaggtagatggttgtatggtgcgtaaacgtaatggcataattatgaggtgaggggaatgttgcccgttagctagagatgaaaacggtcaaaaatgatatcattttcttattaattttatagaaacattcaaaaaaatcttcatatattatgagtttagctatttagtggtaatttcaatacgatgctagcagaaattagaaaagctaattttttagaaatggtcatcatcggtaaagatttttttaagataatagaatagaatgccagcatttgctcaaagagttacagccaatcatcagtaaatatattattgttgtattagttttgtggaaaacgatatattaaaatggtcgggaaattttcgtactatgcccgtaattcgtatctgtattaatatagaaatgaggcgttcaccccttccaatcctatatctcaattcaacatgttaaatctctaccgttcattcgcagatcaagtgtaatcaccgattccgctcctccgcccaggtgattacacctgatggcgatgcccacgcgtccgctttaccactccctttgacaccgcccctcgatcctcgctgcgtgcagctccgccaagctccaggtagccctggagcgtggagacgacaaagctttgttacgacggccgacaggtggtcctgaattccaccgccaaaatcaggttagttcatccctaaatcatgtttccaatcccatatcatctgatccccattgtcccaacatcgatcaattgacttcttagtgcgtaccaagctttttcactcggctcacctcaggtcagtgtttttctggtttcttggttcagttggttgtctctaagttgatgcatcatatctagccatcaggaatataatgtagtgttattttccaaagaagctgtgatttgacactcaataagaataatttggatgtgaagaattgattcaagttaacagtgtgagtttggatggaatctctgaacccattttgggaaaacaagcacgggggactgtcgctagctacatagctgcatccaagatttgatatcacagtatgcatgagcatttatcagtctgtctgtgacaaacatcgtctcctcaagtctgcctgtagttgtatgttcgtccaaacatgcacaaattttgaatcttttgtcactgtggaaatcatattatttcacttttctgatgacctgatgtagatggccataaactcttgcaggaacaagaacaaccatgaactacttccttgatgggcgaataaagagggcataaattatttttctatgtgtagcacgcttcctcatcaccgtcttcctgggctctgttgtgcactcttctaacgccaaggacgtggaggagaagctaagtatgtcaagattaaatttgagcacaaccaatctgtattttctttgagaataaactccttctgatgtcaagaagtacaatctgtttgcgggggacagtagaggcacaaagctcagcactgatgttgctgacaaagatagtagtttcaccacctgaaagaggaccagattacacaatgcagaaggtaacaagtaatgaaattgctatcaatttttttcagaaaattgttgcctgatcaagaagaattcaaggacggcggagatgaagattttgacactggcaccgaagagttcatcatttagattaagaagagacgatcaatcaaggccaaaccacccaccctgtctgaagatttgtgcagcttaaaaagaactcatctaccaccagaaattcagaataaattacagagcacatctgctcttattttgttcatttccattttcggtagagcattgcacatgcatctcatgacaggaagatgattaaagtacttctctaggtttttccagcaaatgtgatacgtgatttaatgcaaattatttgtttagtttgaaggctttccgagaatcatttggaaatctgggaattaatcgttggtagctcgaaggaattagatgttgattgcgatgcataatctaatctatcttttgcctttctcagcagatattgcaacaatcaggatctccatacatgatgtagcctggtcatttgaaaagaggccataaagaaagctcggtgtagtgcattgtgtctcaatgaggatgtacaagcagcaaagcagtgatccaaatgtacttatatagtagaacttgtcccattttacaaataatgtgcaacgaattattgtctattgcaaaaataaaagtctgtggatggaaaatctacttccgatcttcaattatcgacaaaatgagaaaaaaaattgtgaaaaaatgtgatttagtttccttttattttgggcaaaattattacagtggtgatgaatcagcaagatgcctccctttaacaattaaataaaatatggttagatgtaactacatatatagttttattactgtttgcttcccaatatttagagttctatattagatgagattatcgttcttgtgataatctttattgattgattggtgcgtaaaaaccatgtaacgaagtgtactaatgtattatgataccagataatgtagtttttgttttacttccacaataggatgaatacatttatctaatttgagaactgtttgttgccattacggtactagctaatatcctcagagtagatgaagattaatgttgacgaagtacaatgggactagcaggttgatcaattgttttggtccctttttatgcgtttctaaagttaaaataactatgtagtgataacatgattacttttgctttttataggtttcgcaaggatgtcttataaatttaaatttagtcaaacagattacatatgtttcaataaaggtagtttgtaaattttgattgtgattgtccttataaagtatattataaaaatgtgcattccatgtgcacaattactagtgaggagaaaagcatgagaacgagaacttctattccaccacagcttagtcgttgaaaatggttatataggaatgatattccaccacagcttagtcgttgaaaatagttatataggaatgatagcaaaaggatagtatatgataccatgataattgcatgccctaccgcacttctctatataatatcaataccatacatgttatatttgttatctgcgtgataaatttagagcttttgaacctttgccttctaaatcatagttattatggagtgattaaagccttctaaatcatagttattatggagtgattaaaggtcagcatgagatattagagaaaaacaattaaccaagatatttttatgacacgaaatacatggctctagcaattagagcatcaccaacagtatattctcaaatccttcccaaaactgattatgagatattttagtcaaacaatcagatctaacatatcccatatagccctgtacatgatgttgagttagcattttaattttttcatttccttaatttgaggggaggctccaactctatttctggcatgtccctccttttcttcgccgcttctatcctctacttcattgctagcacattcctcctttatttctcctctttcatcatatacttcccgggccactggcatcgggacagggagtgcgtcgtgtaaggaaagaaacgaaaattttagtttagttggaagtttaacaaggctcattttagttgttggaattgaatttaggcttcatcttataacttcaaaaaattttacggatagattattgctaatctattggtaatgctattactcactccgttccatagtacaaagatgtgtccatttctacttgacccaaagtataagtgaatttggtatagtatttgtcacatatccatcaactccaattcaaatttctacttattttaaccccaactaccaactcacctacaaccaaaatcacatcgagtaaggatgttctagtcttttcttgctatccttaatattgcccaaaagagaataatcgtaatcacatctcataaccatattctagtcttttattgttatccttaatcttgcctaaaagagaataatcatataatagaggagtatcaaatagacaaacatataattgattaatgctccgatcccaattttgttttacattatatgccgtcgatatatactaaggacatatgtgattgaccatattatctagatcaacttataattcgcggatattcacatactactgcggcgaacacacaaatgggtgtaaatgtcgatctttagtacttgcatatatgaaataaagaataaagccatggtgttgaatgatactaaattgctatgtttgattaagacaactatctgagtgggaaaatggtgtcgttatttaaatatgcttgctttttttctctttgtatctgatttgcattggttttattgttaggttgactcggggtaagtatttggaaacaaatatttgacatcatggctataggtctgctacttactttgtggctacttagatagcagtactatactttgctggctatttccgaacaatctaatttttcatctagattttaagaagttgaagttgtggaatccagaaaaaatgaatcaaaagctagaagctaagaaccaatatttagattctcacaagctgactaacaaccaactgcttattaaaatattaagcgtccataacataccataggacttaaactcgagtgagcatatcagttaaattacgatcacttttttttccgacttgatggtctgtttgctttatcctttttctgacgtgtttagtttgatgcttttacaattgtgattgtttgggcaggtgccgatgatccgtgataccagctgatttaatttggcttgaccatactaatgaacataattaaggttgtttaaagaggcccagttacacagtaggtgggtagcataccaaacaccatcagaactttaccctacaaaatgtgctttatctttttcttcacacaaatatagcgtgaattcaattcacgttcacacaaattgaacgccaaacgaaaacaaaccactccttttcagatagcgaatttttttttgggtaataaggcatcaaaacaaaaccggtcctaattggcagtgttttttttttgttttgttttttacggacttaaaatgagccgaagtaaacgaaatcctgaagaacttcaccatgtcattctagattcctagtacatcctcacacagataaacagattccaagtacatccttacacagataaactgcagataaactgttcccatgtgaccttgacatctcccacccttttgtatagcttaaagcaattactcccttcttccctaaatgtttgacgccgttaatttttccgttaatttttttaaacatgtttgaccgttcgtcttattcaaaaacttttgtgaatattattcaaaagattgagtagtagtagtatatttaacaatgaatcaaataatagaaaaagaattaataattacttaatttttttaataagacgaacggtcaaatatgtttaaaaaattcaacggcgttaaatatttagggacggagggagtacatatttacaacaagcgcggttgtgcatgcaacaaagattgcacaaagttgcatctaaagttagtaaattaccaacaaatatgggacacggtatgccaatgatccaagatgaattcaattcaatcagtacaacgccacagatatggaagcagaggattaagcacgaactaccaacacacatcaaatagcacaagcacaaaacaatttactatgcatgtcaaacaaaggcacagaaaacagagcatcaagtgtcaaagccagagtagacgccactccccctcagaagtcgcttctcttcttcaacgtagttcttccccctgctagcctggccacgatctctcttccgcttttccttctgtgagaaggaagcatctttattctctttctccatctgcctcggctgcgggtttcgcacaccaataagcttttctccctcagttactgcagttcttgtgcgctcccgttcttcataggattcagtttgatcttctttgtcgttgcgatctttcccggtggaccaagaccagttaggctcaacctttggagggggcaccgtcaagacagatgggccgccacgatacccatgccggctcaaagcattgaaatccacaccaccaggtttcttcttcttcgacatagctgttgttcagagagctaaaaccaatgttaaaatgaacactaacaatgagaggtaatactcagaaacatgcatcatctggaatccataaggctttgttaggatttaccaaaaccaaactgtgcaagcttactgattacagcaattaaaaagacaacaaaacagacaacccaaaccaacgtcttctactacaatttaattttttttttctcaaaaacgctctactgcaactttatgggagggaacactggatctatgtaggcatgatacattggagctgatgcccaaagactggctaaatgttgactagaggtggtcaacctatggacttcttcagtgatccaaataagggcctcagctttcacaggatggatgatagcatccagaggccggtgctcatcatcactcccaactctctgctgatcccactgtttcaagaggacattggtaaggtaatgtaaaggctgcttatataactgcttcaccgacctgccgagtcccagccatgttgtgcatgggattacagatccacggtgagcaggaactggaatatgcttcatatactcttgatacatttcagccttcctgatcagtgcacctgcatgatctcattatagtaagcatggaaatttgtatctctacgtagaaaggaaaaaaaccttaaaactacatgagccaatccaaagcagaacgctattgtccatgtctgaagggtataaaatccagctcaaagcctctattagtgcttgagaactaaaattatactccatccacaagagttagacctatttcatatttgagttttttttccaaataagttgttcctatttgtagtgtctatgcatccaaaacttaaatggagaggtaaattaaatgtttgattaaaacccaaggagccatcgtaatactcattggttgcatgcgtgcatacacttcttgatctttgttatatgcaagatgagttaatttctctttggtcttggtgacaaaagtaataggtgtaactttttgtggaagaaggagggagtactaatttgctaacttattttgtagtgttggtctctggctcatcccatagggtatatagagaaagcataggactcgactgttgaagctccaaggtaacgggcaactcatgataattctttgaatgacagagtattaattacatacttagttataagagataaatgaaacttagatagacttattatagtggtgttcataattagcacaaaatcatattaaaaactccaagaattttttggccaaatcagcatgtaaaaccaggtacagatataacctgcaagattgtctggatgcaggcactatgagcctgttaatataagtggtatagccagcagtaaataccattgtttgggagacaacttttcttaaaatgtccatcttttaataatggcaacaagtggacaactttcaaactcaaacctcaactgtgaaaataacatgtgggcaatattaacatacagggaaaacagggaattcctccatgacaattgcgataactcaaatatcaacaatatcacaataaattcatgtacttcaaaatactgaacattcacttggtcacatgaaatctatactctatatagaatgctaaaataacatatagcgcgtaaccttgtaagaatagaacactagctaaggtaatgttgcttagtttcaaaagaaaacccatgcttagtttgttctttagcaaagtctaagaaaaatgaatactaccactagagaaaaacacgtgagttcccccagtgtactgctatataatttactgttatatcaatcccaatcaatatgaaaagaacaagccccaaatttccatagatggctggccaaaataatcttaagataacgttaacgaatctacagtaatgctgattctctgatgtgaaaggtaacgggtaaataaccactatggctttgcttgagtggaaggggactagatccaatccctttggatagatatagaaaactgcagttaaaatccctggccatccaaatggatagattctgatccctgcatatagaaacaagccctaatttcacaaatagactaaatttacagtccgaaacaacataagctagctaggaaacacagactaaaaatccatactccatgttgaactcatatctcacaggcaacacacaatacagacattcaaaacaatcttgtgagagcatagcgaggccatatagcatgctaacaaaccaaaaatatgaaaaatctcctcgtgagctaacaaaaagacagagacagatcactgggatagctctcaccgtctggtgcggcagctttggtggaattgggcagcccgaaggcgttgtcccctttccccttcccggcttcatcgtcggaatccgagctcagggagtcgtcggaggagacttccagcggctcctcccacggcgccgccctcttcatacctagccgcacccggccaccgccacatctaggggggttagcgtcacgccgttggcgaacggtggagtcgaggccgtggatgatgatgagcgagggggggcaatggacgggtcctcacctggatcacggagacgtcaccggcggcacggcgcgccgagggagaagcggcgcggcgcgcgagggagaaggtcgctggctcgctcgccgtcgcttgtcgccggcggcggggacgacgaggccgaaaccctcgattgctgtgttgggctttggatcgctggatgagggtggagacagaaggaaaaagtacacctaaggtacctcaacttgtccgcgaaaccatatatgggcaccatggtatcaaatgcacaaaatcactcaaatttttcaaaattttcaaattattagtatatacctagttataataatttgatttatacctatacttatcaacaaaacaactcaaatttaactttatttcacaatccatgattacatacctaactaattatatgtatggatgctatatacctagaatcaaaatctaacaaaaacaagttcaaattcagttcaaacttgctttaaactagttagtaaagtagttaatgttaatacctaagtaattgaaaaagtttcatactcatttgaattgggtatatactcaatttcaacaatggtgcccgggcaccatggagcaccaaacaaatttacatatatatatatatatatatatatatatatatatgtatatatatatatatatatatatatatatgtatatatatatatatgttacttcgcatttatcctaatacatttttttgtatcttgcagaaaagacgtgttgtcggagtcgtccgtcaagcctgagtggaagagctagccctagaaggaattggagcaggcaagtgacgtaataatataaatgattgttatatttgtaatgcaattaattaagattattagacctgtaattagacttatcatataagattgtgtagtgttctaatattatttgagttttaatataagattattttattgtaaattagacttagtatgacattattgactacggaattggtgcgactcctagcaattgactattgtagtcttaattagacttagcatatacgcacgaaacacttagcatacattactattttagtcttagcatgtaatattatttgagttttaatataatattactttatttgtaattagacttggtatgtaattattgactacggaattggtgcgacaagtagcaattgactattgtagtcttaattagacttagcatatacgcacgaaacacttagcatatacatgactattttagtcttagcatgtaatattatttgagttttaatataagattattttatttgtaattagacttagtatataattatttactagctagggttgtataatatacgtcacctagacttagcttatatcacgatttgtaattagacttagcacgtaaggttgtgtagggttctaatgtacgacatttacacttagcatacatgacttagattgttaaaacataaatgtctcgtgacttagcatatacgcacgaaacacttagcatatacatgactattttagtcttagcatgtaatattatttgagttttaatataagattattttatttgtaattagacttagtatataattatttactagctagggttgtataatatacgtcacctagacttagcttatatcacgatttgtaattagacttagcacgtaaggttgtgtagggttctaatgtacgacatttacacttagcatacatgacttagattgttaaaacataaatgtctcgtgacttaacagatgtttcttgtatcaacagatggctgaccgcgatgaggaacagatattgtacgatacaatcgcggagggaagcagccagtactggaatgaagaagaggggaacgaggatccaaaccagtacttgaacgaggaagggaacgtggagaggaatgcggaggggaaccagcaggggcacgtggaaagggatgtggaggggaaccaggaggaggaggctagtggtagtcaaccctccgttggacagaagagggcacgcgggcaacgaggtgcagcgaagaagcttaagggtcggcacatcataacggaagtggaagaagatggacgtcctagtgccccagccgaagccaccaagaactatgtacgtcacagcggttgggttgtgcgggataacgtgcctgtcagtacggtgtactggcgaagaacaagggcacacggagatcatgagagctttgtcccagattcggagaaagagatgctgtggaccacaatgctcgagacattcacccttcctgcgggtacagaggacaaagtgaaaaggtggactctgaagaaaatggcagaacagtttcagagcttcaagggagatctgtaccagaagtatatactgaaggggcagacaccgaacttcgacacattcccaaagctaagggatcactgggacgagttcgttgcatataagacaggtgaacaagggcaggcgatgatggaaagaaacaaagaaaatgccgccaagaagaagtaccatcaccacttggggtcaggaggctatagcgtcgcgatgccgaagtgggagcagatggaggctagcttgattgagaggggtatcgaaccggcaacagccaattggccggaacgatcgaagttctggtactatgctcacgatggaacgctcaacccagctgatggctcactggtcttcggctatcagatacgagaggctgcgcgacgactaacagatgcagtggaagcctcctctcagggcacgttctgaccagacagagatagggacgagctgacactcgccctgcagactccagagcatccaggacgaactcgagggaaaggggtgattccttggaagattggtttcaaggaggacatccacacatacaggagtcggatgaggagcaagagagataccgaggcgaagattgcagacctagagttccgggtatcgagctacgaactcaacatgcaagaggaggtggcaaggaaggttgatgaacgcatggccgcacatcggtcccatgatccccagccgaccattcctcctgcaatggtgagcccgtcaggaaaccgtagcagctgcgcctcaacggggcaggtaggatcacagagcatggacgccatgcaaacacaggacgaatcgacctgtcccgttgatgacatcactcagcggacaccatatgagctgtatattcctttcaagaacttatcaataaaggtaagatttagccattccgctagttgctgcttatatatgttgattactaataaataatctctcacaacatgaaggtggcgtcgggcatggccatcccaacggacccttcaggtacttaccactgcaggccgattccagcaggatactcgaaggtcgaagttgagttggtcgaaggcgcgtacgaggacctcgagctggattaccctggaggagacggtgagacgcatctacgagacacatgccatgccattattctatggcgcaggcggtacatcatcctccctgggcgacaagcggcgtctcgtgcaccatctcctccggctccgccatctcctcctcaggatcctgcaccgtctcctcctcatgctccgccagcaccgtctccacctcaggctccagcatcgactcctcctcaggatcctgcaccgactcctcctcgtgctcctacacctactcccccgcaagctcctcttccggcaccttcaaagtcaagggcccccccagctccaccgcctacccacacaagggcaacgaagaaggcgaaagttgacgccgccaagaacaaggacccggggtacgattgcacgcaagaggagctcgacgcttacgttgcatcagaagtcaagagaccattcaagcctcgaagtccagaaaagaagattcctatagaccccagtgtcaggaacttcttcaggggtatgtctgcatctgtcaaggaggccatcaagctatcggactatgagcgaacgctgaagaaagcatcttctggaaagtccaaaccagtccctcagcttggagagcaaccaaaccaggagatcgagccgttggtgaccggtaaagaaatgacgatagaacaatttattactgacaccggtctaactacggatcaattgctaggagtcgcaccaatcgaaaaggtggaagtgaaatacatgtacgaactcggtaaaccgcttgtcaagcctgagctgctgcagtccctacccacacaaatgtacaagttccatcagctgtacatggagatgagcgccaccggtagagagatgatcggagcgaggatcagggacacggacttcttgcaaggagatgacattctctggatcaatttcaggggaatctacgaactataccagctggacgccctcgacgtctctattatgagttgctggattttgtaagtatatcgttcagttagatttcttactatacgtctcctttaattaattaggtccttgtatataagtagaccatagaaaataatatactcccttttatcgttgtagaatggagattcaaagggcccgacggcggagggttttcgatactggattcatcgaccctcggaaaataaacgtcgcaatgctcgaccaatatccacaagaaacagaggacaatctcgtccatcttctgaaggcgcatcattacaagacgttcatactgttgccatacaacacagagttagtttaattttactgtcttcctacataccaaatttcattcccgtacgaacttgctaagtgtttcatatgtaatgcatcccacgcacattgcagattccactgggtgcttttactcatcgacctggaggcctgcaccgtcaacgtatatgactcaatggataaaaaagagtctacgtttgacaaggttttcgaacttatagacaggtaccgccataagttcctttgttaattaagaaaatcttgttatgttaattgctactacgaatcatagctttaaactccatgtagggcttggtatcggttccgtcatttggtccgcggcaaatggagagaaagacttaggcggaagttcaaatttcctgtgagtacacatgctctacatttatatttctccgattcaaatacatacaagtgtatattaattagatctctcgttgtttgtcatttatttgtagtgcgcaaagcaaaagcaaggaactaacttgtgcggctattacgtgtgcgagtattgccactgccttgcagaccaaatcatcaccacaagagagctcgatgtacgtacaaataaattcaaaatttcattacgtagcgatttcttgtttaattactaatcaatttcatacattcatatagtttattcgcatgagggataacctgaccacacacaaggaatttatcgcggcggttcaagaacaactcatgggattcatcaacgaagaaatccttgatcccaagggtgaattctactacgacggaaacacaattcaccggtccttagcttctgagctatcagcgagtactactacgtcgaaatcgtagctagctaggacatataatggattgtaattaatacatgactacatatgtttctatatgcatgtgtacacattttctataatgtaaatatattttgttcatatatatatctatatacatatgcatttgcataacatatatatgtataaatacatatatattatgcatgtatatacatataatataatataatatatatatatatatatacatatatatatatgtatgcatatatatgtattgaaacatatatatatgcatggtttatatatatatatatatatatatatatatatatatatatataaaccatgcagcaatagggggcatgcaaaaaaaaaggtcagctcgatctttactcccggttatttcacccgggactaaagatagcgatctttagtcccggattggtactcccggtttggaaaccgggactaaaggggggttacgaaccgggactgcaaagggtttctccaccagtgaacgcctccgaccttgtcgtcgtccccatggatcaactgccgccaagccctatggcccctcccttctctcgagacacacagtgtcgaccgatacattgacaccctcgcgccaaagagaccggatccacaccatctggtctttctcagcgccacgatcactggtagaaaaagcattttttttacgtggaggtcttattttcgctggcggacatgacgcttagagccaaataaccacctacaaaaatataaatcggcgcctgcgaaaattagtgtggtatatatatgtggcacatgcagctgaaatttttctaagtcttctcctcttccctcactctccccgccggcggaaggggcagacggtgtggggcggccagcgggctccccctccctcccctccagatctggccggagggggcaggggggaggccggcagccggcagcgaagcgcggaccggcagccaggcgcgggacggtgacggcgtgtgctcccggcggcggcggcgggcggtggcggcgaagggcggcagcggtgaggagggtcgaggcggcgcggctcccgacccctccctcccaaatctggtcggagggggcggggggagagcagtggccggaggctcccggcccctccctcccagatctggccggaggggggcggggaaagcacggcggcggccgggtggcggagaggagggtctaggcggcgcggccacggtggctcccggccacccctccctcctagatctggccggagggggggcgggccgcggccgtgcggcggcggcgggacgacggcacggcgcagacatgcagaagcggcgacggacgacggctgggcggcggcggacgacggctaggaggcggtcgtgattttttgaatgtttttatttgctttctttgctaaaattgattcggtgattttggatgaactggatgaattgatttggtgatttttggatgaactggatgaaatgaatggattggatggggaatggattgcgaatgggaagctgcccattttttttagcgctcgaagctattttcgtagctggatctattgcgcgcctgcgaaaatcaactattttacaggcgttgaggtgcaagcggatgacttgtccgcctgcgaaaatatgatttggcggcctggaaaaagcctttttctagtagtggacgtccgtgaggtagaggaggacaggctagcgccgctataggaggagaactgcaacggtggcagctcgaggcaagaggaggaggcgagcgcatggcgtagcaggtttgcatcggtccgactcaggcgaacacctcgcgagagccccttacaccggggaagccaacaccgctggaacgaggggtggagcaatggtgtggtgccgtggtgggtctttttttttgggggggggggggggtaaaattttcatatacttttaataattacagcaatatccctgaatctgttttttttttctcttcttcgcattatatttcacttaaggataatgttttcttttcgcaaaatttaaaataagatgtaggtagcgaaaggagtttcgctattttagaaaatatcaaaagctttcgtgcaaaacgtgtagagctaatccatacgtgtctagcatgcacatgcccctaattaagagcgtttacagtgcatccacacaaaaaccgaacctgggatgccatattggatggaactctacaaagcaactcaacccatagtgcaagctaattataatgggccccaccaacatacactttttcatcttccctgtctttcctcattacctttttaaaaatcctaacacatcccctccgtaaccgattcctctcctctcatatcccagcgaccacgtcagtgcctccctcccctacccacctcggtgatggcggatatggaacttgacgacagcgaacatggatagtggcggtgatgggattggcgctcgacggcggcagtggacttggcctcccctcttctcgctcgccgccgccgcctcttctgcgtcttcctcgcggaggtcaccgccgactggagctgcgcgactcaccggatctggcccggcgcggcactgacaaggctcgccagatctgatggcggtggcttgtcggggagcagcacagcgcggtggtggcgagtctcgacgacggcgtggccaagctcgacaaatccagtggtgatggctcatcggggcgcgacgtgaggatggtcatggccatggcttcgtcgtcgccgccgtggttgccaccgcgctgccctcctcgcctacgccggcgagcccctcccctctttaccatcgtattctcctctctctctctctcccttgcttcctgctgcgcgtaaagacccactccctcacttttcctaacgaagttgatgaggtccctggtaccaaaagagtgcacgagaaccccatgaaaacatggtccccatccctttctcttctccacgcaaccaattcatctacgtggctagtcggagctgaatgacacatcggagctttgtgaatggcctaataacccatgcccggacgtccatatcagacaccaagctaggcaacacacaacgccatataaacaagcacgtgcccagtcgcccataccaaacacggaaacgcccgataaatagtgcgatgacagtccaaacacaaactccttttcctctagtccaatcaggaagcaccgctgaaaaaaaaaacagcgtgacagtcaatcgaggataaaaaatttcaataaaggagaaagacggtggggacagggatattattaaccgatgatacatgatcgtgctggcaaatcttattcgagcggtacaaagattcattcttaggccctctcgttcgatggtaaactgataatgatacattttagggagttgatagttcgttgatgcacattttgttgggcatatttgttttcatcgtcagatacgcccccaactttgctccaaaaggcatgctcgctacaatcggcggaagatggcaagtgataatttgcattgctcggagagattttcaattgacagtatttctggagctatcgacaaagacatcatgtattttaacatcactcaacagctagataaatatcattcacacctgtaacagcgcacgaaattaccctgaagaattgcaagttaggccaatagcaaccaataactttctgctacctgcaaaactgccaaatttgccaaaataacatcgaaaaagaaacgcgaaaagagtaagctaaaaatggcgcgagaatctcctcttcctcttcgtccttggtctataagcacactcgataagcttagccacatcgagcaattcttgtagtaatcctgcagaaagagtatacaaggaatccaagaaacctgcaagcatctatctagccatggccgccgcgagagcgggcaacgccgtccggttaaccttcgccgaggaggcggcgccgccggtggcagctacttcgccgggccgccgctcgctgcctcgaccccattgccggggagaccgacggcgacgacgacgtcccttgcagccggtccaactgcgtctcctgcagctgggttatcgtctgaggacagttcagttttctcgggcgtttcttgatatgttcttttcaggtttaatcagcgagttttatgggagtttgatgagtagaaaaaagagggggcttaattagcgtgttctatggctggattaactaatcctcgatccaaattcttcatctaccaactcttctaaatcaatcataatttttctctattgaattccacatactttcttaaccatgtccaagagttttaggagatattagcaaataactagcttttatctcccctgttgctactcgaatttgaagtaagctttaattaacttatcggttttgagcgaatcagcgagtcgtactactctggtagatagataatcttctagtacctatgtaatgcgaactgttaagttataaatctttccctttttttgagaaagagaggatcacctctcccatttcaatacagaaatgagaataatactgtcagttattacaataccaaaaggaagaaccttctaccgtgatgcagcaaacaaccttctacatcatacatccaatctaacggtaagcaactatcagcggattccatacaacatcaagagacaaaaaaggcaagttaaatctacatgaatacatcaaatcaagtgggaattaattcttttgtttatgccatttcacattggattctaataagtacaattacttcagcacatgctacaagattgggtatacttaattacattaaggaacccagttaagacaacaaaaaaaaaaggacaaactggaagcatttcatctattaattataagttctacaatgatatacataaattcagctttccgtacagtggtttggctatatgaagactactaaaagaagctacgttcacaaagaaccaaatctgcacaaggtattcagctgccaacaatgtccatggcaagtcaacatctctgaaatctaactagtagctggccttattcagttctctgtggtatgtcttccaacctaatagaactgggacctatttttaggtgccaaaaatactccagaatgtccaaggtaccacagcaagcggtacattgaacaaaccaaataaataaaacaacaaaaatcgattacaattgcgacaaacatcatacctagcgacgtgggtacagatcccaacctaagtctggctcttttcgcttcaatactggcaccccagagctgccaccctgtgacatgttacccatgcgctcgtccacaaacatggtctgaccttggaaagacacaggccaatagcttgcaccttccctacgtgcaccttcatatgaccttccatagttgagatccatgctgggatgaaaatagctcaattcactagagggtgggattgctctgctgccgagagatggatgagatgtgcccactcctaagtttggcaccgttggtacaccgaaacctggcaatggaggtataactggcgtgccctttgcatcaaccatataaggaacagtccctggtgcatagaaaggtgacgggaaagacaaagcagaatgagacgaatagctgacaacactataatcagggggtgtatgcccgtaagattgcatagaccttgcaggatctcttgattccacacttggcccaagaaagttatgctcattttgatggctatgttccttctgtccaagaactattctcttgcccagaattgtcactgcagaatggtctgacacatccctcccagaagtcttgacagaggactcatctgcacctcgtaaaaagccatccacgattggtgtgttgtcattcaagtcaaagttccttactgcaggttgccttgaagatgaagaggaagaagggtgactccaatcgccattacattgttgtcgattccaaaatgatggtacattacttgtggtgattgcagcttcctcatcgtcacatggacaattaaggtcaagttcaaggctattcaggccaacagttgcagaggcatcctttcgcactatgtcagaagaaagcggaaggatggctgctgaaagtggttcaccagcagtagcattgtcactttcagaaacattcaagtcaaacagagcattgcctgttctctgtgaagaggcagatactgatttctctccatcgggagtacaccgaggagaagccggtcgaaaagcactggtggctgcagaacctttccatcccagttcaccttcaaagtgcaatcgagctgggaatacagatgaggttcttgaggcagccacagctataggtgttgataaattaattgaattactaagcgtggacttcgtatgacaatcaacttcctcagtgcactggttttcattaagatcaatgcctcccagcttcatgcttcgcgtatgttttctactgaaagtaccactgtcatccgtgatgcctgaaccatcctccttcatagatgaggaacttcctgaatcctcccctgtagtggaggatttattatcattatccggttcatccatgggcggttcaggctgccggcgtgcttctaagtcgggactatcagaccgtctggaattaatatcaggggaaccacaaaatggtcccctgtagtcaatgacttcccgctctacctcaatagcaaccagacgagctacttccagtgcatcagtatcatcatactcagctaatggtgttgatgtatctcccttttctgctttcgatttcttgtctgctgcctttgaggaatccccaaagctcgtcatgcatctcttcaacctcaattcattgacagcgccctttacatctgtatcagatgatgatgtaggcccctcctctttccttgtactttcatcatctgatgaatcttgcatgtcaaggggggctaggtcccagcctcccactgtattcttctcagagtgtggcatatcttccaaaaaggattcacctttcttgatatccacgctaatagaaacattttggtcctgcacatccattttgttactaacaaatggattttctggattattagtcccagaagacttggcctctgcagttccatctggcagtgagacttgtgcagcaccactttttgcatcattgttagcagaagactcctccgtcacaggtacattttctaaaccattacgacatgcaagtgatggtactgaggggttcccatcaccaataatggcatttccatcggagtttgggggtatcatcaccagcgactgcttcactatatcacagttatcattggtctgggagtgattaggcaaaggaacactcgagcagaccatcacctcagacttcgacttatctcctgcaattgcagcttcatttgccccaccagactcaggtttaggttctgggagtttgagttgatctgggttccgctcttttgctaccatgtcatggacatcagaagtgcatttcggtacacttctccatttatgacaaagcactcctgcctttttgttgatatcagtattgctatgagaaagtagatgctcaacagtatgcagaacaccacaagaagtaatttgtgcattttcaactggaagacactccagtgcagacaatactgcaactattaggtcttctgctgcattgctgatatcctcaccacagttctgagcatcctgaagccattgatggaggaaaccgacaccatttagctgaacaaaatgctgaagacactcttcatttttggtggacgctagagtgtttgcagccgttgcacactgccttatcaagtcagcggtgttaagttcagcagcacttttgagcttcttgatctcagataccagttctccaattcgtgctacagttgaaatgccatccttcatctcagtaagagtaaagaaatcctcaagcatcgtgcttcttgcactaagtcactatacggctgcttgagtgctaaactgagtgttatctggtttgatggttatataacatcctgaaatatggaaagcagcttggccattaaaaagtattttggatcaacttaccacaattcaaataacagtatgaatcatggtgaagaaaacagctaaaaaagataatatcgaaagtgtatctaggcaaaagaagaaaaaagaatatatgagcagaagtgcaagcagcagcaccctttatctctaggaataattgcatgtgcataacccaataaggcattagttttagttaattgcataggatataatgaatggcttagatccttatttggtcaagacaatacaagtattgactttgagtgtgtccgtatatgccactgacaaaaagatgcctaacatttcttaatttacagaactacgtccactgctcagagctcagtaattctttatcagcaaattctaaagagtcatctaatcggtgcgttctacaggcggagtaagaagtgcaaattatgccacaattacacatgaatcacacataaatctaagtgtagtgtactagtgcagtaagccactaataaggaagaaacacgcatccaccagaatcaaccgcaatttccccgcttataacgaatagcgcatccaatcagtaaatcatacacacaggagtaaatcgtacacatcggcaagtgaactgcaaaaggaataagcacagatcaacacaaatcccataggcacacgcgcgcgcaccgtctcgaaaccagcacgaaatgcgcatccgcaaaattcgcccccaaatcacacaccacccccgaaggcctaaaccctataatccatcgtggaggggaaaggtgcgtacgaaaaaggggaaactcaccgtctacgccacaagtctccaccacccgacggggcatgggactccgcggggatgagccc

SEQ ID NO: 5738 - DNA, 12032 bp, Oryza sativa
cgccatggcgtccctcctgcacgccgacatcgccctcgttacctgcacccacagatcgatcgtcacgacgacggcggcggaggcggcggcggcggcgtgtgagtgactgacctcgaaggagaggtgggaggagcggagggcggaggcgaggcgggaggcggagtcggagtagccctcgagggaggcggcgccgaggcggagggcgcggcaggcgtcgcagaggcgggaggtctcgtccatgtactcgtcgagccaggcggcgccgccggggaggtggagcgagccgacgagccgggcgagccccgcgtgcgccgcgcggatcagcgccagcgccgcccgcagcgacgccgccgacacgaactccgccgccgccgacgacgccgccagcgaccgctccagctcgtccagccccctcgccagcgtcccgtagaacgccgccaccgtcgacggcgacggcttcatggccagagatgatatctccgagatctcgagagaggttagctagctatagctatagctacagcttatggtggtagctagctagcaatatggagggagagcaataatggcgcgagcgaacgaacgaacgagtgcaactgtgcaaccgtgcgggatggatatatggagttggggttggatggcgaccttgttcttactcccaagcccaacaaggctctactagctagtagtaggtatagctaggctagccttctttgcaactctactgcaagcaacaatggcctctctctctctctctagagatctctctcatgtggccatggctgctggtagctggtgaggaagagacttggatggatggatggatgtatggaaggaagaagatgggagggaaagggggctcctttgtgctgtgtgttatatagggccagggcacttctccaggggggctacatgcctttaggctttagctatgtactgctctttctgccacacctactgccagtcaaagcctagagaattttcattgatttggggtgaatttttcagggactggcaaaaataactgtggatatatatggtaaccagaaatttgttcaaataaactttaaacaataaggaccattttggttttgattccaaaatatatatatgtcctaccaaattgttggtactttgaatagaattttagctagtgttcggtttgctatcaaaatatgcccaataacacatataagttgctaaaaaaatggcactactaaaatttatctatattttggcattgtcaacattttaacatgacagtaaaccaaacaagccttaatttcttttatcttctgttgtcaaagatgtcacgatgtatggaaaaaaacatgaaattttgagagattttgagggaaagctagcatatttactctttttcttgatttgatccactagtaactagtaccaaattaaaatacctgaaactcaagagagatcgatttgaaattccaaatcgtgctaccaccgagcagacaacatgtcaattacacccaaagttgatagtgcgagctatcatcaataataacaatcatcatcatcatcatctcatgagaggtagggtggaccgtggacttaattccctacgagatcgagtgattgatcgaccggatatatatgttcatgggtcacctttttatttcccttccttataattagctcgctcgcttttctgaaagatacttgtcagtagactgtgtttttttttttgacacagtgatgatgtggagttgtggatgccctagctagagagagacagttgatggagatctactgcatttggcactagtgttcactggccggtcagctgatccatgcaagcaagctatccctttttcttcttttcttttttttttctttttgaaaagattgtatgcaagatacttcgtccgtttcatattataagactttctagtattgttcacattcatacatatgttaatgaatctacacatttacgtgtatctagattcattaacatctatatgaatatgagcagtgttagaaagttttataacctgaaacggaggtagtacttgttaagagtatttattctgatatggatataccgaagggtgagaaaggagacaacttatatgtatgcacaaatcatttgtatgcatgttctcatgtcattctactcaatctcctttttttttgtttttttttaccatcgtgtgtcattctactcttgactgaaattagttatcatcaaacaaaaactctaaactatgagcacacttttttttttgacatgatgagcacaatgttttaggggtattggatccaagtagagaaatcaatagacaaattaggaaggtagggaattccctttgttttgtgggttttacccatcacaaatacattggcaccgtgtttagttacaaagtttttcttcaaaatttcaacttttccataacatcaaaactttcctgcacacacaaactttcaacttttccatcacatcattctaatttcaaccaaacttccaattttggtaggaactaaacacagcctagctctacttattcttgtgattgtgcatattaatgctctacaccaatatccaaaaaagatatagttcccaatttttcttttggcaattgggcttttgtaaggttgtggtctatgtggccatgacaaccccaccctagaaagcgaggatgcaaccaactaaaggatggcgatgagagtcggaggatgagtggtgtggtatggatatcggatggaatcactagagagaagtgaaaaggatggaggggaaacgagctagcgattgatgaggaaaaccgacgagcaccataagggttgaaggtgtcaaattagagtggagaatacaagaaatatatatactttggaagttagttttgtttttattggtgggcttgggcaatggtggagcataattgtcgactatacacaatcacgatttatgccttcttgctctctctatcataatatccaatacagaggtagtcatgattcaatacattttcatggccaataacatttaaccaaaatactccatgtgcaaaccttgttcccatagtaacctttttatcccctaggattcaccgttaatgtttgcagtagctaccttttttttagttctctatagagatatactttggtcctcaaatttgtgttctaatgcacttattagggtctgatttgtgatgcgatcagatcctccacttgtgtaggggtgactagctaactgcagaagatccgatgtgagcaaagattacaggtgagactaatccgaatctgaaaatttgactgatgacttgacccgaatctttcctccaaaacggtcatcacagtggggtttgggccccctcattgccatgaaagtaagaaaaaaaaatcaccaaggctacttaattgctactagtattagtttcaaaaacttaataattactattagctactaattagtactataaactagtacctttctctacaaaagtaaatccttccattcctgaatattagtagagtaaggtgatcgtatttagttggatataatgttctttatttagacgtcgccgaactagtactatacattcgattcctctcctttttcatttcgaataaaatgtcttttttccccttgtgatggggcatggacatctgcataaagttgttattatatctttattatgctgtgctaattattacctcatatgtgacaatgcaagatatggcaagaagaaatattatttttttttcttctccttttatcatgagctttccatcttgggtggacacttggtgccactaggagtaggaagctgtaattgagagatctccttgcccttgtgaatatatgtggtactagtattgctacattgaagctaggtgagcttgcttttgttttgggggaaactggaccaagatttcttaatcttgtgaagtgatggtgatggtggtagtagtggtggtaggctagaaaggccattgattgactcatgtgcttacaggaccccatttcataagcaatatatgcaaatgattacaatgtatctatgccctcctactattttatatagcacggttttgtttcaccgtgaaatatcgaatcaaatcaaactttgaccattaatttctcttacaataacattttatttacccaatatcgtataattgtacaacttttgtaccactaaaacatagtatatttttaagatcacaataatgttctctgccacttggcatacaataaaaagtgttctaataataaaagtctactaaacatatgctatctctgtattttcaatatatatgacactattatctttatttgatcaaattaaactttcaaaactttgaccatcgatagctctcctcaaaatatttagtttgaaaacatataaatcatatagattggtttttctttataagttctttgtgatattataattccgttagatattatccttatattctaatagtaaaataatgcacatcagagaccgaataaagtcaatagtgctacacatttaaatgtgacggcagtatgtcgggctaatatgtgatcgaagtcaagtgagtactgtacacggtgccaggggcggaggcaaagtatattagcggtcaagacaactttttattaagcaaactcaatataaacttaggcacccgcccgcatcagcttaaactcaatctaaagtagagtaaattaagcaaatgacacccctccccgtttcgttctagctccacccctgcacggtgcgcagctccattccactcacttgcatccatggcttcacttcacaatccattcttgcccatgcattgcatatgccaccatcatcgatggcaataatatgctgaacccgtcgtgccatcgacggtgggtttcctagctcccagcctccctcctgttaccgagaagagggctaatcatctcctccttgttccaaggctctctgcattggaatgaatgattcaccatgtgactgaccttgctgctgccctcttcctttcctcgagccatctgtagatatcagagaaattcatcatgctgcagatgacctcgaatcgaatccatcgagtagcttagcttgtagctagggttcctttggttaatttgctccaatggcattgctttggttgctcagaaaagaaaagaaaaactctaatttcatggggtttggttaattcctaggggagggggggggggaatggggatgatgatgcatcatcctgcatatatgtttgcatcaaatccatatctcgaacccccactatatgtctatgttggtaatgcagagatcttcttttcagattctctcacttggcccaagctttaattctcccttttgttttttcctcggctgcatcttgctggaattaatcctcctcctttttatatatatagcgccttttgctttgggattcgatttttcttttaatttcagagtgtaattaaaagaattgtaaaaagtttccactgaaaacattatgtaacaaaattcgtgaaactatattaccataatttctagggttacgcgctgcatgccaaactacttgtggttttgtgcaacatagagcataatacccaggattttatgatattcactccaaaaaagattgtaaaaattcgccactgaaaacatgaggtaagctttttttttctttttctttgtaggaaatagagcatgttgttagtgagaaattcagaggaattgatttatttgcttttgtacttactactacttattttatgatgtttttttgtttgtgctgcactagttcagtgaaaatttgtagccatgctaattgcagaatttatatatatttatgggttggtgttcgtgggttgttggagaatgtgatgctcttggactcggaggaaggtatgttggtcctgcttctccatgcagatctcgttggctaattaaaaagccttgccttcagctcactttcagaacacttttcagctggctcaagactcgattatcttctgtctatgttcttccaagtggaaattaaagaaagaaaatatcttttgtatcagaggttttctatggtcgttgaagttgcatatgtatttttagcgttaattaggaggtatatgtacctatcaatacctctcgaaagaccattaaaaaaaaacctgtaccagcaaggaaaactttaacactgagagtattttatttctgtgctctagttctaggtttgctttttctctgctcttctcatgactcttgatttgatttcaagttacgccatgtgaccacttctcattttatatgccatcttaatcaaagtatcctattgtaaggtgttggcttgtcttaactatagaaaaataagggggttaaagtccccattcttagtttctcaccaatatgattatgaatcttgatctcttaatctataccttaaacctcaagtcatgccccccggaccacttccctctattaagttccaaatcctatggataatagataatcagttatctcaatgctgtaataatagcaaattagccatatggttgacggcaatgaaaaggtttataggatagggttgtcaactattcttcttttttccttttcttcattcagtgttcatttccaattgcatcaattatttgtcaacatttaagagcagacaatatagcatgccttgcttggattgtttgtctggaaaggctcaaacaagacctacatattctgagctttaacaaaatggggcccaaacaattctatgtggagttcctgatgcatataggtcatattcccttttacttggcaaaaaaacatattttctttacgacttctgaagccactgccttggccattttggttttcagttttcagccgaaattggtagctggtcatcttcatcaaacctcatctcatcttcttgtcgaggaaaaaacagtgatagataaatataatgttgatgatacatttatggctcttattttctagctaattgtagatgaaaagggggaattccaaattttacaggattttcattggcatcaattctgatggaggccttagccttttattagcttccacataaacacagatggtaatttacacctttttgcagatcctgaaaattggtttctttggaaaaaagaacattggtaacattgtgcacactgcaaaatatggtataatcacttatgcggaaaaatatgtatgacattagagtatgtatccaatttcttccatgagaatatgatatctaagatgaaccttgctcagcaatactgagcaggattctagtcgtactgccgaagcatctctccctgttgtgtcctacttttttcttgcatcagattactcaagaaagatgaggcgagtggcgatacgcgtgtgagtgattcccattgcaaatcttcatagatgaactcgcatgaataatatatccccctgatcggcacagttcatcgtggccccgcttgtcggtgactgttcacgggcattttcgtttcgcagagagaatttttctagcttctaatccacagagttgaagaggactaccatgatggttatggttttacatgtgcaaaatctaggacaggataggccaacaaaatgcttttaggaattaattcttactgaatacttcctaatcatacacaattccttttttatgcatatgtagcagccaacccaaatgatgtgttatatgtgatctcaagagtgttccttttttctttcctttctttcttttttcttcaattggccacctgaagaaaagattggctccacacatttgaactgtgcccttttctgatgcttttgcatgataggtcactctcattgttcacaccaaagctcaactaaattattagtttaatggagatcaactaaattaaactagcttttctctttgcttttgatcttgctttggacacgagccaggagatcttaccgaaatctagagcggccgaatccaccaccatcaccactgattagtttggaatctgcaagcttaagctagcattgtacaataattctccaaagccctaatcatggcgtccacacccagcatgaacccctctacccttctacccttaagaggggcccctgaaaacagcgtgaagacgggttttcagtgacggtgaccggtacggtctccggaccaccatggtcgtcatcgtcttcgcaccctttttattttttcggttgggtgataaggtgatgatcaggggggagattggagaagattgtgctacaaaagtggcagcttcactttgtgtcgctggaggaggcatggcaccctggggtctaatcagccatcattccatcctcaatttttcttaagttgggagcattttgcatcactcttttgagcttttgggtggaaaaaggaggagaaaggagaggggaggaggaaattcacctttgtttatgtcaaccctcctgttgcgtaatcgcgccttcctgcactgttttaaggatggatgaatagatcagttgtttctaagaaaagatagaagaaaaccgagcgaaagaaaaggcgaaaaagggagtctctttgagcaaatggtttggtcatggattttcaaaagatggatgtatggtttatttcttgccaggtgagtgtagatactcactcctccccaaggggaatcacccaatgattgacagaatgatcattgataggcaaagcagaaagaatgaggggcacaatcccatcggattggcatcatataaagcaatcttgatcttttttatgaatgccattatgagcccatgattagatctcaacttaacaaagaaaactttgtagaacaaatggtacactcatattccaaaggacaagtggttctctttattcttgtacaggtgtatgtatgtacaaactagaattacatgatcagcagctttacaacgtgcaatgtacattagggtctttttgttgcagaagcttgatgcacacacagttgcaagggggcagtttccatcagatgccagcacccattatctcccaaaaattcctgctatttctctgcaatactgaaacatccgaatgctagattcaaatgctacagtccacatacttcttgcaaagaagggctgaagatcttgacttaagatgtcccttctgatttattgttcctgtcaaccagtaataaacagccaggttaagagcttgttcactttgttattaccattttcgaccttaccaacatttggtagtaccaaattttggcatattttaatgttactaaattttggtagtgtccgaagcgtttagtttaaagatttaccaaatatgggtagtgtttttaagagtggaagcttccaaattttccaaaatgtggtatggtagcaatggcaagaatttgtttggtatgttgccctaccaaaatttggtagggttgaaaatggtaataaagtgaacaaaccttaaatttgataactggtgttactatgtctatgtgatatgcagaaaagttctgatgcactagtaattattctcgttgcatgagaaacttgagctgaattccatgtataatatacagatatcgcacaataagatgtaaacttatttgggtacatatgaaaatcgagtgtcatacacagaacaaactaagggtttctaaaagcacccagaaaaactccattttagctatcttgtccgaattaatttaaataaacaaaacttttgaatataccagaaagaacacagtaataatgtcattttaatcaggacataggatctaactttcaaatgataacaaagtttcaaaatgatactggtttcccaatccttaacctgtctagaatggtgcctaaggaagtccataacacctgcttagagaacacatgtatttgcactttcaggtgctaaaaactttgatttttttcaaaggattgtaacactcattagaatgacaagaaaaataacgaggactcagagacgcttgcataactctaatttctgcaaataaaatagtggaaacatgacacaacacatttatattagacagtccaactttctggtgattcattgcattgggggtagacagacttcaccatccacattgggctcagcacggaatgttagatgcaggaattccggaatcacagtgccattgaatgcgatacatgaggacacaaataaccaggaaacattgtattctgctcccctgctcccccctagtgattcccaaggtgtaaagcaaatttattttggatgcacaaatataacatagtgcttcctattcacttgtgaagtttgggtaataaacaaaagtacatagaaattttgtgcttctgtattagcaacacaagtttagacttcaggccaccctaaggagcactgcttgagcagagcattctgctaacttacacacacaattgacggaagtggaaagcagatagcttaagcttaattagtcccatcacgattcaactacaaccaaagcatagatattatcccattcctcataaagaacaatgggtaaatcaaggtcaccatgccaactcgctgcagggataacagaggagcctgcagtctgggtaaatcaaggtcaccatgccaactcgctgcagcgataacagaggagtctgcagtctggaagctttgcaggagcacaaatggagctttaagttcgaaacaatgtcttggtcatgaaattttgtactgagtaaaagtctttattgtttcttttcttcaatttaatatttttggctttgatatacatctgcgtactttgagcctcgttcattgcccttaattcaaatgcgcattctctaaaaacaaaataaataaaatagaaccacgaacatcaacaatcaacatacaactaaccaaatcagacaatctgctggccgttcagtagcttaatatctacaattaagtgcacaagcacacgtaagaattaattcttaaccggatgaaataatcaggtaattctggacatccagatggaggaggaggagatttgtggcaatggaggtttcacctctcgcccagggaccggtagaacctggcgaagcggccgcgctccttgggcttgggcttgacgggcttcttccggcggagcccggcgatctcctgcaccagcgggacgtgcaccagcaccgtcctccacgccacgtaccagcctgcgacccgccgccgccgcgagcagcgaacgaaagaatcagggaaacccctcgagccaaaagccgaagcgagaggaggagagggcggccgtactgagggcgatgatggagaggacgaaggcgaaggcgaggaggggccggaggacgaagacgacggcgatctcccacgccgccgccgccagcgcggctcctcctcctcctcctccggccatggcgccgcggcgacgcttcgtcggcagaagggggaaggtaaggagacgtggggaatcggcgggttagtccatgacatgtggggcccacgaaagcttagaggagcaaagctaaatcgttgcgtagaagtttgtgttactagcttgtgccttgtggcaggggtagacggatctggaattcgagaggtgtttcataacttgccctttaatgcaaacggatttgttatgtttcaccaaatgaaattcgatgtttcatcagtgtgaatgaaatgtctcagtcgtgatttgaatgtgttttaatattttaacaaggtgaaatatttttttaacagtaaaacattttatctggtagagcgcccgatttgtaagttccctgcctgaatttggcccaggtgtgcgcacaattggccgagtgcatgtaaatttggcccacttgcgcgttttataatttcatcccatctatggtcaaattcggcctgaatgtttacgatcagttttaagggtacagagacgattgccaatcaacacatactagcaattaatcttcagagtccccagggtaacataacatcttctaccctataattcaccaactacactcatgcaaacctcattcatcaaatccgacggtccagaatcgtcgaattcaacggctcgactccgcacccatgcctgcccgcgttcctcctctcccgtttcacccgcccatcgcgccgccgccggtttccaccacgccccc
